United States Patent Application Publication US 2026/0265736 A1 - sequence listing, part 3

SEQ ID NO: 2048 - protein, 2096 aa, synthetic construct
MPAAKRVKLDGGDKKYSIGLDIGTNSVGWAVITDEYKVPSKKFKVLGNTDRHSIKKNLIGALLFDSGETAEATRLKRTARRRYTRRKNRICYLQEIFSNEMAKVDDSFFHRLEESFLVEEDKKHERHPIFGNIVDEVAYHEKYPTIYHLRKKLVDSTDKADLRLIYLALAHMIKFRGHFLIEGDLNPDNSDVDKLFIQLVQTYNQLFEENPINASGVDAKAILSARLSKSRRLENLIAQLPGEKKNGLFGNLIALSLGLTPNFKSNFDLAEDAKLQLSKDTYDDDLDNLLAQIGDQYADLFLAAKNLSDAILLSDILRVNTEITKAPLSASMIKRYDEHHQDLTLLKALVRQQLPEKYKEIFFDQSKNGYAGYIDGGASQEEFYKFIKPILEKMDGTEELLVKLNREDLLRKQRTFDNGSIPHQIHLGELHAILRRQEDFYPFLKDNREKIEKILTFRIPYYVGPLARGNSRFAWMTRKSEETITPWNFEEVVDKGASAQSFIERMTNFDKNLPNEKVLPKHSLLYEYFTVYNELTKVKYVTEGMRKPAFLSGEQKKAIVDLLFKTNRKVTVKQLKEDYFKKIECFDSVEISGVEDRFNASLGTYHDLLKIIKDKDFLDNEENEDILEDIVLTLTLFEDREMIEERLKTYAHLFDDKVMKQLKRRRYTGWGRLSRKLINGIRDKQSGKTILDFLKSDGFANRNFMQLIHDDSLTFKEDIQKAQVSGQGDSLHEHIANLAGSPAIKKGILQTVKVVDELVKVMGRHKPENIVIEMARENQTTQKGQKNSRERMKRIEEGIKELGSQILKEHPVENTQLQNEKLYLYYLQNGRDMYVDQELDINRLSDYDVDHIVPQSFLKDDSIDNKVLTRSDKARGKSDNVPSEEVVKKMKNYWRQLLNAKLITQRKFDNLTKAERGGLSELDKAGFIKRQLVETRQITKHVAQILDSRMNTKYDENDKLIREVKVITLKSKLVSDFRKDFQFYKVREINNYHHAHDAYLNAVVGTALIKKYPKLESEFVYGDYKVYDVRKMIAKSEQEIGKATAKYFFYSNIMNFFKTEITLANGEIRKRPLIETNGETGEIVWDKGRDFATVRKVLSMPQVNIVKKTEVQTGGFSKESILPKRNSDKLIARKKDWDPKKYGGFDSPTVAYSVLVVAKVEKGKSKKLKSVKELLGITIMERSSFEKNPIDFLEAKGYKEVKKDLIIKLPKYSLFELENGRKRMLASAGELQKGNELALPSKYVNFLYLASHYEKLKGSPEDNEQKQLFVEQHKHYLDEIIEQISEFSKRVILADANLDKVLSAYNKHRDKPIREQAENIIHLFTLTNLGAPAAFKYFDTTIDRKRYTSTKEVLDATLIHQSITGLYETRIDLSQLGGDGGPAPGGSEAAAKGGLGIEDEYRLHETSTEPDVSLGSTWLSDFPQAWAETGGMGLAVRQAPLIIPLKATSTPVSIQQYPMSHEARLGIKPHIQRLLDQGILVPCQSPWNTPLLPVKKPGTNDYRPVQDLREVNKRVEDIHPTVPNPYNLLSGLPPSHQWYTVLDLKDAFFCLRLHPTSQPLFAFEWRDPGMGISGQLTWTRLPQGFKNSPTLFNEALHRDLADFRIQHPDLILLQYVDDILLAATSELDCQQGTRALLQTLGDLGYRASAKKAQICQKQVKYLGYLLREGQRWLTEARKETVMGQPVPKTPRQLREFLGKAGFCRLFIPGFAEMAAPLYPLTKPGTLFSWGPDQQKAYQEIKQALLTAPALGLPDLTKPFELFVDEKQGYAKGVLTQKLGPWRRPVAYLSKKLDPVAAGWPPCLRMVAAIAVLTKDAGKLTMGQPLVILAPHAVEALVKQPPDRWLSNARMTHYQAMLLDTDRVQFGPVVALNPATLLPLPEEGAPHDCLEILAETHGTRPDLTDQPIPDADHTWYTDGSSFLQEGQRKAGAAVTTETEVIWAGALPAGTSAQRAELIALTQALKMAEGKRLNVYTDSRYAFATAHIHGEIYRRRGWLTSEGREIKNKSEILALLKALFLPKRLSIIHCLGHQKGDSAEARGNRLADQAAREAAIKTPPDTSTLLIAGKRTADGSEFEKRTADGSEFESPKKKAKVE

SEQ ID NO: 2049 - protein, 2100 aa, synthetic construct
MPAAKRVKLDGGDKKYSIGLDIGTNSVGWAVITDEYKVPSKKFKVLGNTDRHSIKKNLIGALLFDSGETAEATRLKRTARRRYTRRKNRICYLQEIFSNEMAKVDDSFFHRLEESFLVEEDKKHERHPIFGNIVDEVAYHEKYPTIYHLRKKLVDSTDKADLRLIYLALAHMIKFRGHFLIEGDLNPDNSDVDKLFIQLVQTYNQLFEENPINASGVDAKAILSARLSKSRRLENLIAQLPGEKKNGLFGNLIALSLGLTPNFKSNFDLAEDAKLQLSKDTYDDDLDNLLAQIGDQYADLFLAAKNLSDAILLSDILRVNTEITKAPLSASMIKRYDEHHQDLTLLKALVRQQLPEKYKEIFFDQSKNGYAGYIDGGASQEEFYKFIKPILEKMDGTEELLVKLNREDLLRKQRTFDNGSIPHQIHLGELHAILRRQEDFYPFLKDNREKIEKILTFRIPYYVGPLARGNSRFAWMTRKSEETITPWNFEEVVDKGASAQSFIERMTNFDKNLPNEKVLPKHSLLYEYFTVYNELTKVKYVTEGMRKPAFLSGEQKKAIVDLLFKTNRKVTVKQLKEDYFKKIECFDSVEISGVEDRFNASLGTYHDLLKIIKDKDFLDNEENEDILEDIVLTLTLFEDREMIEERLKTYAHLFDDKVMKQLKRRRYTGWGRLSRKLINGIRDKQSGKTILDFLKSDGFANRNFMQLIHDDSLTFKEDIQKAQVSGQGDSLHEHIANLAGSPAIKKGILQTVKVVDELVKVMGRHKPENIVIEMARENQTTQKGQKNSRERMKRIEEGIKELGSQILKEHPVENTQLQNEKLYLYYLQNGRDMYVDQELDINRLSDYDVDHIVPQSFLKDDSIDNKVLTRSDKARGKSDNVPSEEVVKKMKNYWRQLLNAKLITQRKFDNLTKAERGGLSELDKAGFIKRQLVETRQITKHVAQILDSRMNTKYDENDKLIREVKVITLKSKLVSDFRKDFQFYKVREINNYHHAHDAYLNAVVGTALIKKYPKLESEFVYGDYKVYDVRKMIAKSEQEIGKATAKYFFYSNIMNFFKTEITLANGEIRKRPLIETNGETGEIVWDKGRDFATVRKVLSMPQVNIVKKTEVQTGGFSKESILPKRNSDKLIARKKDWDPKKYGGFDSPTVAYSVLVVAKVEKGKSKKLKSVKELLGITIMERSSFEKNPIDFLEAKGYKEVKKDLIIKLPKYSLFELENGRKRMLASAGELQKGNELALPSKYVNFLYLASHYEKLKGSPEDNEQKQLFVEQHKHYLDEIIEQISEFSKRVILADANLDKVLSAYNKHRDKPIREQAENIIHLFTLTNLGAPAAFKYFDTTIDRKRYTSTKEVLDATLIHQSITGLYETRIDLSQLGGDGGEAAAKGGGGSEAAAKGGLGIEDEYRLHETSTEPDVSLGSTWLSDFPQAWAETGGMGLAVRQAPLIIPLKATSTPVSIQQYPMSHEARLGIKPHIQRLLDQGILVPCQSPWNTPLLPVKKPGTNDYRPVQDLREVNKRVEDIHPTVPNPYNLLSGLPPSHQWYTVLDLKDAFFCLRLHPTSQPLFAFEWRDPGMGISGQLTWTRLPQGFKNSPTLFNEALHRDLADFRIQHPDLILLQYVDDILLAATSELDCQQGTRALLQTLGDLGYRASAKKAQICQKQVKYLGYLLREGQRWLTEARKETVMGQPVPKTPRQLREFLGKAGFCRLFIPGFAEMAAPLYPLTKPGTLFSWGPDQQKAYQEIKQALLTAPALGLPDLTKPFELFVDEKQGYAKGVLTQKLGPWRRPVAYLSKKLDPVAAGWPPCLRMVAAIAVLTKDAGKLTMGQPLVILAPHAVEALVKQPPDRWLSNARMTHYQAMLLDTDRVQFGPVVALNPATLLPLPEEGAPHDCLEILAETHGTRPDLTDQPIPDADHTWYTDGSSFLQEGQRKAGAAVTTETEVIWAGALPAGTSAQRAELIALTQALKMAEGKRLNVYTDSRYAFATAHIHGEIYRRRGWLTSEGREIKNKSEILALLKALFLPKRLSIIHCLGHQKGDSAEARGNRLADQAAREAAIKTPPDTSTLLIAGKRTADGSEFEKRTADGSEFESPKKKAKVE

SEQ ID NO: 2050 - protein, 2096 aa, synthetic construct
MPAAKRVKLDGGDKKYSIGLDIGTNSVGWAVITDEYKVPSKKFKVLGNTDRHSIKKNLIGALLFDSGETAEATRLKRTARRRYTRRKNRICYLQEIFSNEMAKVDDSFFHRLEESFLVEEDKKHERHPIFGNIVDEVAYHEKYPTIYHLRKKLVDSTDKADLRLIYLALAHMIKFRGHFLIEGDLNPDNSDVDKLFIQLVQTYNQLFEENPINASGVDAKAILSARLSKSRRLENLIAQLPGEKKNGLFGNLIALSLGLTPNFKSNFDLAEDAKLQLSKDTYDDDLDNLLAQIGDQYADLFLAAKNLSDAILLSDILRVNTEITKAPLSASMIKRYDEHHQDLTLLKALVRQQLPEKYKEIFFDQSKNGYAGYIDGGASQEEFYKFIKPILEKMDGTEELLVKLNREDLLRKQRTFDNGSIPHQIHLGELHAILRRQEDFYPFLKDNREKIEKILTFRIPYYVGPLARGNSRFAWMTRKSEETITPWNFEEVVDKGASAQSFIERMTNFDKNLPNEKVLPKHSLLYEYFTVYNELTKVKYVTEGMRKPAFLSGEQKKAIVDLLFKTNRKVTVKQLKEDYFKKIECFDSVEISGVEDRFNASLGTYHDLLKIIKDKDFLDNEENEDILEDIVLTLTLFEDREMIEERLKTYAHLFDDKVMKQLKRRRYTGWGRLSRKLINGIRDKQSGKTILDFLKSDGFANRNFMQLIHDDSLTFKEDIQKAQVSGQGDSLHEHIANLAGSPAIKKGILQTVKVVDELVKVMGRHKPENIVIEMARENQTTQKGQKNSRERMKRIEEGIKELGSQILKEHPVENTQLQNEKLYLYYLQNGRDMYVDQELDINRLSDYDVDHIVPQSFLKDDSIDNKVLTRSDKARGKSDNVPSEEVVKKMKNYWRQLLNAKLITQRKFDNLTKAERGGLSELDKAGFIKRQLVETRQITKHVAQILDSRMNTKYDENDKLIREVKVITLKSKLVSDFRKDFQFYKVREINNYHHAHDAYLNAVVGTALIKKYPKLESEFVYGDYKVYDVRKMIAKSEQEIGKATAKYFFYSNIMNFFKTEITLANGEIRKRPLIETNGETGEIVWDKGRDFATVRKVLSMPQVNIVKKTEVQTGGFSKESILPKRNSDKLIARKKDWDPKKYGGFDSPTVAYSVLVVAKVEKGKSKKLKSVKELLGITIMERSSFEKNPIDFLEAKGYKEVKKDLIIKLPKYSLFELENGRKRMLASAGELQKGNELALPSKYVNFLYLASHYEKLKGSPEDNEQKQLFVEQHKHYLDEIIEQISEFSKRVILADANLDKVLSAYNKHRDKPIREQAENIIHLFTLTNLGAPAAFKYFDTTIDRKRYTSTKEVLDATLIHQSITGLYETRIDLSQLGGDGGPAPGSSEAAAKGGLGIEDEYRLHETSTEPDVSLGSTWLSDFPQAWAETGGMGLAVRQAPLIIPLKATSTPVSIQQYPMSHEARLGIKPHIQRLLDQGILVPCQSPWNTPLLPVKKPGTNDYRPVQDLREVNKRVEDIHPTVPNPYNLLSGLPPSHQWYTVLDLKDAFFCLRLHPTSQPLFAFEWRDPGMGISGQLTWTRLPQGFKNSPTLFNEALHRDLADFRIQHPDLILLQYVDDILLAATSELDCQQGTRALLQTLGDLGYRASAKKAQICQKQVKYLGYLLREGQRWLTEARKETVMGQPVPKTPRQLREFLGKAGFCRLFIPGFAEMAAPLYPLTKPGTLFSWGPDQQKAYQEIKQALLTAPALGLPDLTKPFELFVDEKQGYAKGVLTQKLGPWRRPVAYLSKKLDPVAAGWPPCLRMVAAIAVLTKDAGKLTMGQPLVILAPHAVEALVKQPPDRWLSNARMTHYQAMLLDTDRVQFGPVVALNPATLLPLPEEGAPHDCLEILAETHGTRPDLTDQPIPDADHTWYTDGSSFLQEGQRKAGAAVTTETEVIWAGALPAGTSAQRAELIALTQALKMAEGKRLNVYTDSRYAFATAHIHGEIYRRRGWLTSEGREIKNKSEILALLKALFLPKRLSIIHCLGHQKGDSAEARGNRLADQAAREAAIKTPPDTSTLLIAGKRTADGSEFEKRTADGSEFESPKKKAKVE

SEQ ID NO: 2051 - protein, 2094 aa, synthetic construct
MPAAKRVKLDGGDKKYSIGLDIGTNSVGWAVITDEYKVPSKKFKVLGNTDRHSIKKNLIGALLFDSGETAEATRLKRTARRRYTRRKNRICYLQEIFSNEMAKVDDSFFHRLEESFLVEEDKKHERHPIFGNIVDEVAYHEKYPTIYHLRKKLVDSTDKADLRLIYLALAHMIKFRGHFLIEGDLNPDNSDVDKLFIQLVQTYNQLFEENPINASGVDAKAILSARLSKSRRLENLIAQLPGEKKNGLFGNLIALSLGLTPNFKSNFDLAEDAKLQLSKDTYDDDLDNLLAQIGDQYADLFLAAKNLSDAILLSDILRVNTEITKAPLSASMIKRYDEHHQDLTLLKALVRQQLPEKYKEIFFDQSKNGYAGYIDGGASQEEFYKFIKPILEKMDGTEELLVKLNREDLLRKQRTFDNGSIPHQIHLGELHAILRRQEDFYPFLKDNREKIEKILTFRIPYYVGPLARGNSRFAWMTRKSEETITPWNFEEVVDKGASAQSFIERMTNFDKNLPNEKVLPKHSLLYEYFTVYNELTKVKYVTEGMRKPAFLSGEQKKAIVDLLFKTNRKVTVKQLKEDYFKKIECFDSVEISGVEDRFNASLGTYHDLLKIIKDKDFLDNEENEDILEDIVLTLTLFEDREMIEERLKTYAHLFDDKVMKQLKRRRYTGWGRLSRKLINGIRDKQSGKTILDFLKSDGFANRNFMQLIHDDSLTFKEDIQKAQVSGQGDSLHEHIANLAGSPAIKKGILQTVKVVDELVKVMGRHKPENIVIEMARENQTTQKGQKNSRERMKRIEEGIKELGSQILKEHPVENTQLQNEKLYLYYLQNGRDMYVDQELDINRLSDYDVDHIVPQSFLKDDSIDNKVLTRSDKARGKSDNVPSEEVVKKMKNYWRQLLNAKLITQRKFDNLTKAERGGLSELDKAGFIKRQLVETRQITKHVAQILDSRMNTKYDENDKLIREVKVITLKSKLVSDFRKDFQFYKVREINNYHHAHDAYLNAVVGTALIKKYPKLESEFVYGDYKVYDVRKMIAKSEQEIGKATAKYFFYSNIMNFFKTEITLANGEIRKRPLIETNGETGEIVWDKGRDFATVRKVLSMPQVNIVKKTEVQTGGFSKESILPKRNSDKLIARKKDWDPKKYGGFDSPTVAYSVLVVAKVEKGKSKKLKSVKELLGITIMERSSFEKNPIDFLEAKGYKEVKKDLIIKLPKYSLFELENGRKRMLASAGELQKGNELALPSKYVNFLYLASHYEKLKGSPEDNEQKQLFVEQHKHYLDEIIEQISEFSKRVILADANLDKVLSAYNKHRDKPIREQAENIIHLFTLTNLGAPAAFKYFDTTIDRKRYTSTKEVLDATLIHQSITGLYETRIDLSQLGGDGGGGSPAPGSSGGLGIEDEYRLHETSTEPDVSLGSTWLSDFPQAWAETGGMGLAVRQAPLIIPLKATSTPVSIQQYPMSHEARLGIKPHIQRLLDQGILVPCQSPWNTPLLPVKKPGTNDYRPVQDLREVNKRVEDIHPTVPNPYNLLSGLPPSHQWYTVLDLKDAFFCLRLHPTSQPLFAFEWRDPGMGISGQLTWTRLPQGFKNSPTLFNEALHRDLADFRIQHPDLILLQYVDDILLAATSELDCQQGTRALLQTLGDLGYRASAKKAQICQKQVKYLGYLLREGQRWLTEARKETVMGQPVPKTPRQLREFLGKAGFCRLFIPGFAEMAAPLYPLTKPGTLFSWGPDQQKAYQEIKQALLTAPALGLPDLTKPFELFVDEKQGYAKGVLTQKLGPWRRPVAYLSKKLDPVAAGWPPCLRMVAAIAVLTKDAGKLTMGQPLVILAPHAVEALVKQPPDRWLSNARMTHYQAMLLDTDRVQFGPVVALNPATLLPLPEEGAPHDCLEILAETHGTRPDLTDQPIPDADHTWYTDGSSFLQEGQRKAGAAVTTETEVIWAGALPAGTSAQRAELIALTQALKMAEGKRLNVYTDSRYAFATAHIHGEIYRRRGWLTSEGREIKNKSEILALLKALFLPKRLSIIHCLGHQKGDSAEARGNRLADQAAREAAIKTPPDTSTLLIAGKRTADGSEFEKRTADGSEFESPKKKAKVE

SEQ ID NO: 2052 - protein, 2096 aa, synthetic construct
MPAAKRVKLDGGDKKYSIGLDIGTNSVGWAVITDEYKVPSKKFKVLGNTDRHSIKKNLIGALLFDSGETAEATRLKRTARRRYTRRKNRICYLQEIFSNEMAKVDDSFFHRLEESFLVEEDKKHERHPIFGNIVDEVAYHEKYPTIYHLRKKLVDSTDKADLRLIYLALAHMIKFRGHFLIEGDLNPDNSDVDKLFIQLVQTYNQLFEENPINASGVDAKAILSARLSKSRRLENLIAQLPGEKKNGLFGNLIALSLGLTPNFKSNFDLAEDAKLQLSKDTYDDDLDNLLAQIGDQYADLFLAAKNLSDAILLSDILRVNTEITKAPLSASMIKRYDEHHQDLTLLKALVRQQLPEKYKEIFFDQSKNGYAGYIDGGASQEEFYKFIKPILEKMDGTEELLVKLNREDLLRKQRTFDNGSIPHQIHLGELHAILRRQEDFYPFLKDNREKIEKILTFRIPYYVGPLARGNSRFAWMTRKSEETITPWNFEEVVDKGASAQSFIERMTNFDKNLPNEKVLPKHSLLYEYFTVYNELTKVKYVTEGMRKPAFLSGEQKKAIVDLLFKTNRKVTVKQLKEDYFKKIECFDSVEISGVEDRFNASLGTYHDLLKIIKDKDFLDNEENEDILEDIVLTLTLFEDREMIEERLKTYAHLFDDKVMKQLKRRRYTGWGRLSRKLINGIRDKQSGKTILDFLKSDGFANRNFMQLIHDDSLTFKEDIQKAQVSGQGDSLHEHIANLAGSPAIKKGILQTVKVVDELVKVMGRHKPENIVIEMARENQTTQKGQKNSRERMKRIEEGIKELGSQILKEHPVENTQLQNEKLYLYYLQNGRDMYVDQELDINRLSDYDVDHIVPQSFLKDDSIDNKVLTRSDKARGKSDNVPSEEVVKKMKNYWRQLLNAKLITQRKFDNLTKAERGGLSELDKAGFIKRQLVETRQITKHVAQILDSRMNTKYDENDKLIREVKVITLKSKLVSDFRKDFQFYKVREINNYHHAHDAYLNAVVGTALIKKYPKLESEFVYGDYKVYDVRKMIAKSEQEIGKATAKYFFYSNIMNFFKTEITLANGEIRKRPLIETNGETGEIVWDKGRDFATVRKVLSMPQVNIVKKTEVQTGGFSKESILPKRNSDKLIARKKDWDPKKYGGFDSPTVAYSVLVVAKVEKGKSKKLKSVKELLGITIMERSSFEKNPIDFLEAKGYKEVKKDLIIKLPKYSLFELENGRKRMLASAGELQKGNELALPSKYVNFLYLASHYEKLKGSPEDNEQKQLFVEQHKHYLDEIIEQISEFSKRVILADANLDKVLSAYNKHRDKPIREQAENIIHLFTLTNLGAPAAFKYFDTTIDRKRYTSTKEVLDATLIHQSITGLYETRIDLSQLGGDGGEAAAKGSSPAPGGLGIEDEYRLHETSTEPDVSLGSTWLSDFPQAWAETGGMGLAVRQAPLIIPLKATSTPVSIQQYPMSHEARLGIKPHIQRLLDQGILVPCQSPWNTPLLPVKKPGTNDYRPVQDLREVNKRVEDIHPTVPNPYNLLSGLPPSHQWYTVLDLKDAFFCLRLHPTSQPLFAFEWRDPGMGISGQLTWTRLPQGFKNSPTLFNEALHRDLADFRIQHPDLILLQYVDDILLAATSELDCQQGTRALLQTLGDLGYRASAKKAQICQKQVKYLGYLLREGQRWLTEARKETVMGQPVPKTPRQLREFLGKAGFCRLFIPGFAEMAAPLYPLTKPGTLFSWGPDQQKAYQEIKQALLTAPALGLPDLTKPFELFVDEKQGYAKGVLTQKLGPWRRPVAYLSKKLDPVAAGWPPCLRMVAAIAVLTKDAGKLTMGQPLVILAPHAVEALVKQPPDRWLSNARMTHYQAMLLDTDRVQFGPVVALNPATLLPLPEEGAPHDCLEILAETHGTRPDLTDQPIPDADHTWYTDGSSFLQEGQRKAGAAVTTETEVIWAGALPAGTSAQRAELIALTQALKMAEGKRLNVYTDSRYAFATAHIHGEIYRRRGWLTSEGREIKNKSEILALLKALFLPKRLSIIHCLGHQKGDSAEARGNRLADQAAREAAIKTPPDTSTLLIAGKRTADGSEFEKRTADGSEFESPKKKAKVE

SEQ ID NO: 2053 - protein, 2088 aa, synthetic construct
MPAAKRVKLDGGDKKYSIGLDIGTNSVGWAVITDEYKVPSKKFKVLGNTDRHSIKKNLIGALLFDSGETAEATRLKRTARRRYTRRKNRICYLQEIFSNEMAKVDDSFFHRLEESFLVEEDKKHERHPIFGNIVDEVAYHEKYPTIYHLRKKLVDSTDKADLRLIYLALAHMIKFRGHFLIEGDLNPDNSDVDKLFIQLVQTYNQLFEENPINASGVDAKAILSARLSKSRRLENLIAQLPGEKKNGLFGNLIALSLGLTPNFKSNFDLAEDAKLQLSKDTYDDDLDNLLAQIGDQYADLFLAAKNLSDAILLSDILRVNTEITKAPLSASMIKRYDEHHQDLTLLKALVRQQLPEKYKEIFFDQSKNGYAGYIDGGASQEEFYKFIKPILEKMDGTEELLVKLNREDLLRKQRTFDNGSIPHQIHLGELHAILRRQEDFYPFLKDNREKIEKILTFRIPYYVGPLARGNSRFAWMTRKSEETITPWNFEEVVDKGASAQSFIERMTNFDKNLPNEKVLPKHSLLYEYFTVYNELTKVKYVTEGMRKPAFLSGEQKKAIVDLLFKTNRKVTVKQLKEDYFKKIECFDSVEISGVEDRFNASLGTYHDLLKIIKDKDFLDNEENEDILEDIVLTLTLFEDREMIEERLKTYAHLFDDKVMKQLKRRRYTGWGRLSRKLINGIRDKQSGKTILDFLKSDGFANRNFMQLIHDDSLTFKEDIQKAQVSGQGDSLHEHIANLAGSPAIKKGILQTVKVVDELVKVMGRHKPENIVIEMARENQTTQKGQKNSRERMKRIEEGIKELGSQILKEHPVENTQLQNEKLYLYYLQNGRDMYVDQELDINRLSDYDVDHIVPQSFLKDDSIDNKVLTRSDKARGKSDNVPSEEVVKKMKNYWRQLLNAKLITQRKFDNLTKAERGGLSELDKAGFIKRQLVETRQITKHVAQILDSRMNTKYDENDKLIREVKVITLKSKLVSDFRKDFQFYKVREINNYHHAHDAYLNAVVGTALIKKYPKLESEFVYGDYKVYDVRKMIAKSEQEIGKATAKYFFYSNIMNFFKTEITLANGEIRKRPLIETNGETGEIVWDKGRDFATVRKVLSMPQVNIVKKTEVQTGGFSKESILPKRNSDKLIARKKDWDPKKYGGFDSPTVAYSVLVVAKVEKGKSKKLKSVKELLGITIMERSSFEKNPIDFLEAKGYKEVKKDLIIKLPKYSLFELENGRKRMLASAGELQKGNELALPSKYVNFLYLASHYEKLKGSPEDNEQKQLFVEQHKHYLDEIIEQISEFSKRVILADANLDKVLSAYNKHRDKPIREQAENIIHLFTLTNLGAPAAFKYFDTTIDRKRYTSTKEVLDATLIHQSITGLYETRIDLSQLGGDGGGSSGGLGIEDEYRLHETSTEPDVSLGSTWLSDFPQAWAETGGMGLAVRQAPLIIPLKATSTPVSIQQYPMSHEARLGIKPHIQRLLDQGILVPCQSPWNTPLLPVKKPGTNDYRPVQDLREVNKRVEDIHPTVPNPYNLLSGLPPSHQWYTVLDLKDAFFCLRLHPTSQPLFAFEWRDPGMGISGQLTWTRLPQGFKNSPTLFNEALHRDLADFRIQHPDLILLQYVDDILLAATSELDCQQGTRALLQTLGDLGYRASAKKAQICQKQVKYLGYLLREGQRWLTEARKETVMGQPVPKTPRQLREFLGKAGFCRLFIPGFAEMAAPLYPLTKPGTLFSWGPDQQKAYQEIKQALLTAPALGLPDLTKPFELFVDEKQGYAKGVLTQKLGPWRRPVAYLSKKLDPVAAGWPPCLRMVAAIAVLTKDAGKLTMGQPLVILAPHAVEALVKQPPDRWLSNARMTHYQAMLLDTDRVQFGPVVALNPATLLPLPEEGAPHDCLEILAETHGTRPDLTDQPIPDADHTWYTDGSSFLQEGQRKAGAAVTTETEVIWAGALPAGTSAQRAELIALTQALKMAEGKRLNVYTDSRYAFATAHIHGEIYRRRGWLTSEGREIKNKSEILALLKALFLPKRLSIIHCLGHQKGDSAEARGNRLADQAAREAAIKTPPDTSTLLIAGKRTADGSEFEKRTADGSEFESPKKKAKVE

SEQ ID NO: 2054 - protein, 2096 aa, synthetic construct
MPAAKRVKLDGGDKKYSIGLDIGTNSVGWAVITDEYKVPSKKFKVLGNTDRHSIKKNLIGALLFDSGETAEATRLKRTARRRYTRRKNRICYLQEIFSNEMAKVDDSFFHRLEESFLVEEDKKHERHPIFGNIVDEVAYHEKYPTIYHLRKKLVDSTDKADLRLIYLALAHMIKFRGHFLIEGDLNPDNSDVDKLFIQLVQTYNQLFEENPINASGVDAKAILSARLSKSRRLENLIAQLPGEKKNGLFGNLIALSLGLTPNFKSNFDLAEDAKLQLSKDTYDDDLDNLLAQIGDQYADLFLAAKNLSDAILLSDILRVNTEITKAPLSASMIKRYDEHHQDLTLLKALVRQQLPEKYKEIFFDQSKNGYAGYIDGGASQEEFYKFIKPILEKMDGTEELLVKLNREDLLRKQRTFDNGSIPHQIHLGELHAILRRQEDFYPFLKDNREKIEKILTFRIPYYVGPLARGNSRFAWMTRKSEETITPWNFEEVVDKGASAQSFIERMTNFDKNLPNEKVLPKHSLLYEYFTVYNELTKVKYVTEGMRKPAFLSGEQKKAIVDLLFKTNRKVTVKQLKEDYFKKIECFDSVEISGVEDRFNASLGTYHDLLKIIKDKDFLDNEENEDILEDIVLTLTLFEDREMIEERLKTYAHLFDDKVMKQLKRRRYTGWGRLSRKLINGIRDKQSGKTILDFLKSDGFANRNFMQLIHDDSLTFKEDIQKAQVSGQGDSLHEHIANLAGSPAIKKGILQTVKVVDELVKVMGRHKPENIVIEMARENQTTQKGQKNSRERMKRIEEGIKELGSQILKEHPVENTQLQNEKLYLYYLQNGRDMYVDQELDINRLSDYDVDHIVPQSFLKDDSIDNKVLTRSDKARGKSDNVPSEEVVKKMKNYWRQLLNAKLITQRKFDNLTKAERGGLSELDKAGFIKRQLVETRQITKHVAQILDSRMNTKYDENDKLIREVKVITLKSKLVSDFRKDFQFYKVREINNYHHAHDAYLNAVVGTALIKKYPKLESEFVYGDYKVYDVRKMIAKSEQEIGKATAKYFFYSNIMNFFKTEITLANGEIRKRPLIETNGETGEIVWDKGRDFATVRKVLSMPQVNIVKKTEVQTGGFSKESILPKRNSDKLIARKKDWDPKKYGGFDSPTVAYSVLVVAKVEKGKSKKLKSVKELLGITIMERSSFEKNPIDFLEAKGYKEVKKDLIIKLPKYSLFELENGRKRMLASAGELQKGNELALPSKYVNFLYLASHYEKLKGSPEDNEQKQLFVEQHKHYLDEIIEQISEFSKRVILADANLDKVLSAYNKHRDKPIREQAENIIHLFTLTNLGAPAAFKYFDTTIDRKRYTSTKEVLDATLIHQSITGLYETRIDLSQLGGDGGEAAAKGGGPAPGGLGIEDEYRLHETSTEPDVSLGSTWLSDFPQAWAETGGMGLAVRQAPLIIPLKATSTPVSIQQYPMSHEARLGIKPHIQRLLDQGILVPCQSPWNTPLLPVKKPGTNDYRPVQDLREVNKRVEDIHPTVPNPYNLLSGLPPSHQWYTVLDLKDAFFCLRLHPTSQPLFAFEWRDPGMGISGQLTWTRLPQGFKNSPTLFNEALHRDLADFRIQHPDLILLQYVDDILLAATSELDCQQGTRALLQTLGDLGYRASAKKAQICQKQVKYLGYLLREGQRWLTEARKETVMGQPVPKTPRQLREFLGKAGFCRLFIPGFAEMAAPLYPLTKPGTLFSWGPDQQKAYQEIKQALLTAPALGLPDLTKPFELFVDEKQGYAKGVLTQKLGPWRRPVAYLSKKLDPVAAGWPPCLRMVAAIAVLTKDAGKLTMGQPLVILAPHAVEALVKQPPDRWLSNARMTHYQAMLLDTDRVQFGPVVALNPATLLPLPEEGAPHDCLEILAETHGTRPDLTDQPIPDADHTWYTDGSSFLQEGQRKAGAAVTTETEVIWAGALPAGTSAQRAELIALTQALKMAEGKRLNVYTDSRYAFATAHIHGEIYRRRGWLTSEGREIKNKSEILALLKALFLPKRLSIIHCLGHQKGDSAEARGNRLADQAAREAAIKTPPDTSTLLIAGKRTADGSEFEKRTADGSEFESPKKKAKVE

SEQ ID NO: 2055 - protein, 2096 aa, synthetic construct
MPAAKRVKLDGGDKKYSIGLDIGTNSVGWAVITDEYKVPSKKFKVLGNTDRHSIKKNLIGALLFDSGETAEATRLKRTARRRYTRRKNRICYLQEIFSNEMAKVDDSFFHRLEESFLVEEDKKHERHPIFGNIVDEVAYHEKYPTIYHLRKKLVDSTDKADLRLIYLALAHMIKFRGHFLIEGDLNPDNSDVDKLFIQLVQTYNQLFEENPINASGVDAKAILSARLSKSRRLENLIAQLPGEKKNGLFGNLIALSLGLTPNFKSNFDLAEDAKLQLSKDTYDDDLDNLLAQIGDQYADLFLAAKNLSDAILLSDILRVNTEITKAPLSASMIKRYDEHHQDLTLLKALVRQQLPEKYKEIFFDQSKNGYAGYIDGGASQEEFYKFIKPILEKMDGTEELLVKLNREDLLRKQRTFDNGSIPHQIHLGELHAILRRQEDFYPFLKDNREKIEKILTFRIPYYVGPLARGNSRFAWMTRKSEETITPWNFEEVVDKGASAQSFIERMTNFDKNLPNEKVLPKHSLLYEYFTVYNELTKVKYVTEGMRKPAFLSGEQKKAIVDLLFKTNRKVTVKQLKEDYFKKIECFDSVEISGVEDRFNASLGTYHDLLKIIKDKDFLDNEENEDILEDIVLTLTLFEDREMIEERLKTYAHLFDDKVMKQLKRRRYTGWGRLSRKLINGIRDKQSGKTILDFLKSDGFANRNFMQLIHDDSLTFKEDIQKAQVSGQGDSLHEHIANLAGSPAIKKGILQTVKVVDELVKVMGRHKPENIVIEMARENQTTQKGQKNSRERMKRIEEGIKELGSQILKEHPVENTQLQNEKLYLYYLQNGRDMYVDQELDINRLSDYDVDHIVPQSFLKDDSIDNKVLTRSDKARGKSDNVPSEEVVKKMKNYWRQLLNAKLITQRKFDNLTKAERGGLSELDKAGFIKRQLVETRQITKHVAQILDSRMNTKYDENDKLIREVKVITLKSKLVSDFRKDFQFYKVREINNYHHAHDAYLNAVVGTALIKKYPKLESEFVYGDYKVYDVRKMIAKSEQEIGKATAKYFFYSNIMNFFKTEITLANGEIRKRPLIETNGETGEIVWDKGRDFATVRKVLSMPQVNIVKKTEVQTGGFSKESILPKRNSDKLIARKKDWDPKKYGGFDSPTVAYSVLVVAKVEKGKSKKLKSVKELLGITIMERSSFEKNPIDFLEAKGYKEVKKDLIIKLPKYSLFELENGRKRMLASAGELQKGNELALPSKYVNFLYLASHYEKLKGSPEDNEQKQLFVEQHKHYLDEIIEQISEFSKRVILADANLDKVLSAYNKHRDKPIREQAENIIHLFTLTNLGAPAAFKYFDTTIDRKRYTSTKEVLDATLIHQSITGLYETRIDLSQLGGDGGEAAAKGGSGSSGGLGIEDEYRLHETSTEPDVSLGSTWLSDFPQAWAETGGMGLAVRQAPLIIPLKATSTPVSIQQYPMSHEARLGIKPHIQRLLDQGILVPCQSPWNTPLLPVKKPGTNDYRPVQDLREVNKRVEDIHPTVPNPYNLLSGLPPSHQWYTVLDLKDAFFCLRLHPTSQPLFAFEWRDPGMGISGQLTWTRLPQGFKNSPTLFNEALHRDLADFRIQHPDLILLQYVDDILLAATSELDCQQGTRALLQTLGDLGYRASAKKAQICQKQVKYLGYLLREGQRWLTEARKETVMGQPVPKTPRQLREFLGKAGFCRLFIPGFAEMAAPLYPLTKPGTLFSWGPDQQKAYQEIKQALLTAPALGLPDLTKPFELFVDEKQGYAKGVLTQKLGPWRRPVAYLSKKLDPVAAGWPPCLRMVAAIAVLTKDAGKLTMGQPLVILAPHAVEALVKQPPDRWLSNARMTHYQAMLLDTDRVQFGPVVALNPATLLPLPEEGAPHDCLEILAETHGTRPDLTDQPIPDADHTWYTDGSSFLQEGQRKAGAAVTTETEVIWAGALPAGTSAQRAELIALTQALKMAEGKRLNVYTDSRYAFATAHIHGEIYRRRGWLTSEGREIKNKSEILALLKALFLPKRLSIIHCLGHQKGDSAEARGNRLADQAAREAAIKTPPDTSTLLIAGKRTADGSEFEKRTADGSEFESPKKKAKVE

SEQ ID NO: 2056 - protein, 2097 aa, synthetic construct
MPAAKRVKLDGGDKKYSIGLDIGTNSVGWAVITDEYKVPSKKFKVLGNTDRHSIKKNLIGALLFDSGETAEATRLKRTARRRYTRRKNRICYLQEIFSNEMAKVDDSFFHRLEESFLVEEDKKHERHPIFGNIVDEVAYHEKYPTIYHLRKKLVDSTDKADLRLIYLALAHMIKFRGHFLIEGDLNPDNSDVDKLFIQLVQTYNQLFEENPINASGVDAKAILSARLSKSRRLENLIAQLPGEKKNGLFGNLIALSLGLTPNFKSNFDLAEDAKLQLSKDTYDDDLDNLLAQIGDQYADLFLAAKNLSDAILLSDILRVNTEITKAPLSASMIKRYDEHHQDLTLLKALVRQQLPEKYKEIFFDQSKNGYAGYIDGGASQEEFYKFIKPILEKMDGTEELLVKLNREDLLRKQRTFDNGSIPHQIHLGELHAILRRQEDFYPFLKDNREKIEKILTFRIPYYVGPLARGNSRFAWMTRKSEETITPWNFEEVVDKGASAQSFIERMTNFDKNLPNEKVLPKHSLLYEYFTVYNELTKVKYVTEGMRKPAFLSGEQKKAIVDLLFKTNRKVTVKQLKEDYFKKIECFDSVEISGVEDRFNASLGTYHDLLKIIKDKDFLDNEENEDILEDIVLTLTLFEDREMIEERLKTYAHLFDDKVMKQLKRRRYTGWGRLSRKLINGIRDKQSGKTILDFLKSDGFANRNFMQLIHDDSLTFKEDIQKAQVSGQGDSLHEHIANLAGSPAIKKGILQTVKVVDELVKVMGRHKPENIVIEMARENQTTQKGQKNSRERMKRIEEGIKELGSQILKEHPVENTQLQNEKLYLYYLQNGRDMYVDQELDINRLSDYDVDHIVPQSFLKDDSIDNKVLTRSDKARGKSDNVPSEEVVKKMKNYWRQLLNAKLITQRKFDNLTKAERGGLSELDKAGFIKRQLVETRQITKHVAQILDSRMNTKYDENDKLIREVKVITLKSKLVSDFRKDFQFYKVREINNYHHAHDAYLNAVVGTALIKKYPKLESEFVYGDYKVYDVRKMIAKSEQEIGKATAKYFFYSNIMNFFKTEITLANGEIRKRPLIETNGETGEIVWDKGRDFATVRKVLSMPQVNIVKKTEVQTGGFSKESILPKRNSDKLIARKKDWDPKKYGGFDSPTVAYSVLVVAKVEKGKSKKLKSVKELLGITIMERSSFEKNPIDFLEAKGYKEVKKDLIIKLPKYSLFELENGRKRMLASAGELQKGNELALPSKYVNFLYLASHYEKLKGSPEDNEQKQLFVEQHKHYLDEIIEQISEFSKRVILADANLDKVLSAYNKHRDKPIREQAENIIHLFTLTNLGAPAAFKYFDTTIDRKRYTSTKEVLDATLIHQSITGLYETRIDLSQLGGDGGGSAGSAAGSGEFGGLGIEDEYRLHETSTEPDVSLGSTWLSDFPQAWAETGGMGLAVRQAPLIIPLKATSTPVSIQQYPMSHEARLGIKPHIQRLLDQGILVPCQSPWNTPLLPVKKPGTNDYRPVQDLREVNKRVEDIHPTVPNPYNLLSGLPPSHQWYTVLDLKDAFFCLRLHPTSQPLFAFEWRDPGMGISGQLTWTRLPQGFKNSPTLFNEALHRDLADFRIQHPDLILLQYVDDILLAATSELDCQQGTRALLQTLGDLGYRASAKKAQICQKQVKYLGYLLREGQRWLTEARKETVMGQPVPKTPRQLREFLGKAGFCRLFIPGFAEMAAPLYPLTKPGTLFSWGPDQQKAYQEIKQALLTAPALGLPDLTKPFELFVDEKQGYAKGVLTQKLGPWRRPVAYLSKKLDPVAAGWPPCLRMVAAIAVLTKDAGKLTMGQPLVILAPHAVEALVKQPPDRWLSNARMTHYQAMLLDTDRVQFGPVVALNPATLLPLPEEGAPHDCLEILAETHGTRPDLTDQPIPDADHTWYTDGSSFLQEGQRKAGAAVTTETEVIWAGALPAGTSAQRAELIALTQALKMAEGKRLNVYTDSRYAFATAHIHGEIYRRRGWLTSEGREIKNKSEILALLKALFLPKRLSIIHCLGHQKGDSAEARGNRLADQAAREAAIKTPPDTSTLLIAGKRTADGSEFEKRTADGSEFESPKKKAKVE

SEQ ID NO: 2057 - protein, 2091 aa, synthetic construct
MPAAKRVKLDGGDKKYSIGLDIGTNSVGWAVITDEYKVPSKKFKVLGNTDRHSIKKNLIGALLFDSGETAEATRLKRTARRRYTRRKNRICYLQEIFSNEMAKVDDSFFHRLEESFLVEEDKKHERHPIFGNIVDEVAYHEKYPTIYHLRKKLVDSTDKADLRLIYLALAHMIKFRGHFLIEGDLNPDNSDVDKLFIQLVQTYNQLFEENPINASGVDAKAILSARLSKSRRLENLIAQLPGEKKNGLFGNLIALSLGLTPNFKSNFDLAEDAKLQLSKDTYDDDLDNLLAQIGDQYADLFLAAKNLSDAILLSDILRVNTEITKAPLSASMIKRYDEHHQDLTLLKALVRQQLPEKYKEIFFDQSKNGYAGYIDGGASQEEFYKFIKPILEKMDGTEELLVKLNREDLLRKQRTFDNGSIPHQIHLGELHAILRRQEDFYPFLKDNREKIEKILTFRIPYYVGPLARGNSRFAWMTRKSEETITPWNFEEVVDKGASAQSFIERMTNFDKNLPNEKVLPKHSLLYEYFTVYNELTKVKYVTEGMRKPAFLSGEQKKAIVDLLFKTNRKVTVKQLKEDYFKKIECFDSVEISGVEDRFNASLGTYHDLLKIIKDKDFLDNEENEDILEDIVLTLTLFEDREMIEERLKTYAHLFDDKVMKQLKRRRYTGWGRLSRKLINGIRDKQSGKTILDFLKSDGFANRNFMQLIHDDSLTFKEDIQKAQVSGQGDSLHEHIANLAGSPAIKKGILQTVKVVDELVKVMGRHKPENIVIEMARENQTTQKGQKNSRERMKRIEEGIKELGSQILKEHPVENTQLQNEKLYLYYLQNGRDMYVDQELDINRLSDYDVDHIVPQSFLKDDSIDNKVLTRSDKARGKSDNVPSEEVVKKMKNYWRQLLNAKLITQRKFDNLTKAERGGLSELDKAGFIKRQLVETRQITKHVAQILDSRMNTKYDENDKLIREVKVITLKSKLVSDFRKDFQFYKVREINNYHHAHDAYLNAVVGTALIKKYPKLESEFVYGDYKVYDVRKMIAKSEQEIGKATAKYFFYSNIMNFFKTEITLANGEIRKRPLIETNGETGEIVWDKGRDFATVRKVLSMPQVNIVKKTEVQTGGFSKESILPKRNSDKLIARKKDWDPKKYGGFDSPTVAYSVLVVAKVEKGKSKKLKSVKELLGITIMERSSFEKNPIDFLEAKGYKEVKKDLIIKLPKYSLFELENGRKRMLASAGELQKGNELALPSKYVNFLYLASHYEKLKGSPEDNEQKQLFVEQHKHYLDEIIEQISEFSKRVILADANLDKVLSAYNKHRDKPIREQAENIIHLFTLTNLGAPAAFKYFDTTIDRKRYTSTKEVLDATLIHQSITGLYETRIDLSQLGGDGGPAPGSSGGLGIEDEYRLHETSTEPDVSLGSTWLSDFPQAWAETGGMGLAVRQAPLIIPLKATSTPVSIQQYPMSHEARLGIKPHIQRLLDQGILVPCQSPWNTPLLPVKKPGTNDYRPVQDLREVNKRVEDIHPTVPNPYNLLSGLPPSHQWYTVLDLKDAFFCLRLHPTSQPLFAFEWRDPGMGISGQLTWTRLPQGFKNSPTLFNEALHRDLADFRIQHPDLILLQYVDDILLAATSELDCQQGTRALLQTLGDLGYRASAKKAQICQKQVKYLGYLLREGQRWLTEARKETVMGQPVPKTPRQLREFLGKAGFCRLFIPGFAEMAAPLYPLTKPGTLFSWGPDQQKAYQEIKQALLTAPALGLPDLTKPFELFVDEKQGYAKGVLTQKLGPWRRPVAYLSKKLDPVAAGWPPCLRMVAAIAVLTKDAGKLTMGQPLVILAPHAVEALVKQPPDRWLSNARMTHYQAMLLDTDRVQFGPVVALNPATLLPLPEEGAPHDCLEILAETHGTRPDLTDQPIPDADHTWYTDGSSFLQEGQRKAGAAVTTETEVIWAGALPAGTSAQRAELIALTQALKMAEGKRLNVYTDSRYAFATAHIHGEIYRRRGWLTSEGREIKNKSEILALLKALFLPKRLSIIHCLGHQKGDSAEARGNRLADQAAREAAIKTPPDTSTLLIAGKRTADGSEFEKRTADGSEFESPKKKAKVE

SEQ ID NO: 2058 - protein, 2094 aa, synthetic construct
MPAAKRVKLDGGDKKYSIGLDIGTNSVGWAVITDEYKVPSKKFKVLGNTDRHSIKKNLIGALLFDSGETAEATRLKRTARRRYTRRKNRICYLQEIFSNEMAKVDDSFFHRLEESFLVEEDKKHERHPIFGNIVDEVAYHEKYPTIYHLRKKLVDSTDKADLRLIYLALAHMIKFRGHFLIEGDLNPDNSDVDKLFIQLVQTYNQLFEENPINASGVDAKAILSARLSKSRRLENLIAQLPGEKKNGLFGNLIALSLGLTPNFKSNFDLAEDAKLQLSKDTYDDDLDNLLAQIGDQYADLFLAAKNLSDAILLSDILRVNTEITKAPLSASMIKRYDEHHQDLTLLKALVRQQLPEKYKEIFFDQSKNGYAGYIDGGASQEEFYKFIKPILEKMDGTEELLVKLNREDLLRKQRTFDNGSIPHQIHLGELHAILRRQEDFYPFLKDNREKIEKILTFRIPYYVGPLARGNSRFAWMTRKSEETITPWNFEEVVDKGASAQSFIERMTNFDKNLPNEKVLPKHSLLYEYFTVYNELTKVKYVTEGMRKPAFLSGEQKKAIVDLLFKTNRKVTVKQLKEDYFKKIECFDSVEISGVEDRFNASLGTYHDLLKIIKDKDFLDNEENEDILEDIVLTLTLFEDREMIEERLKTYAHLFDDKVMKQLKRRRYTGWGRLSRKLINGIRDKQSGKTILDFLKSDGFANRNFMQLIHDDSLTFKEDIQKAQVSGQGDSLHEHIANLAGSPAIKKGILQTVKVVDELVKVMGRHKPENIVIEMARENQTTQKGQKNSRERMKRIEEGIKELGSQILKEHPVENTQLQNEKLYLYYLQNGRDMYVDQELDINRLSDYDVDHIVPQSFLKDDSIDNKVLTRSDKARGKSDNVPSEEVVKKMKNYWRQLLNAKLITQRKFDNLTKAERGGLSELDKAGFIKRQLVETRQITKHVAQILDSRMNTKYDENDKLIREVKVITLKSKLVSDFRKDFQFYKVREINNYHHAHDAYLNAVVGTALIKKYPKLESEFVYGDYKVYDVRKMIAKSEQEIGKATAKYFFYSNIMNFFKTEITLANGEIRKRPLIETNGETGEIVWDKGRDFATVRKVLSMPQVNIVKKTEVQTGGFSKESILPKRNSDKLIARKKDWDPKKYGGFDSPTVAYSVLVVAKVEKGKSKKLKSVKELLGITIMERSSFEKNPIDFLEAKGYKEVKKDLIIKLPKYSLFELENGRKRMLASAGELQKGNELALPSKYVNFLYLASHYEKLKGSPEDNEQKQLFVEQHKHYLDEIIEQISEFSKRVILADANLDKVLSAYNKHRDKPIREQAENIIHLFTLTNLGAPAAFKYFDTTIDRKRYTSTKEVLDATLIHQSITGLYETRIDLSQLGGDGGGGSPAPGGGGGLGIEDEYRLHETSTEPDVSLGSTWLSDFPQAWAETGGMGLAVRQAPLIIPLKATSTPVSIQQYPMSHEARLGIKPHIQRLLDQGILVPCQSPWNTPLLPVKKPGTNDYRPVQDLREVNKRVEDIHPTVPNPYNLLSGLPPSHQWYTVLDLKDAFFCLRLHPTSQPLFAFEWRDPGMGISGQLTWTRLPQGFKNSPTLFNEALHRDLADFRIQHPDLILLQYVDDILLAATSELDCQQGTRALLQTLGDLGYRASAKKAQICQKQVKYLGYLLREGQRWLTEARKETVMGQPVPKTPRQLREFLGKAGFCRLFIPGFAEMAAPLYPLTKPGTLFSWGPDQQKAYQEIKQALLTAPALGLPDLTKPFELFVDEKQGYAKGVLTQKLGPWRRPVAYLSKKLDPVAAGWPPCLRMVAAIAVLTKDAGKLTMGQPLVILAPHAVEALVKQPPDRWLSNARMTHYQAMLLDTDRVQFGPVVALNPATLLPLPEEGAPHDCLEILAETHGTRPDLTDQPIPDADHTWYTDGSSFLQEGQRKAGAAVTTETEVIWAGALPAGTSAQRAELIALTQALKMAEGKRLNVYTDSRYAFATAHIHGEIYRRRGWLTSEGREIKNKSEILALLKALFLPKRLSIIHCLGHQKGDSAEARGNRLADQAAREAAIKTPPDTSTLLIAGKRTADGSEFEKRTADGSEFESPKKKAKVE

SEQ ID NO: 2059 - protein, 2096 aa, synthetic construct
MPAAKRVKLDGGDKKYSIGLDIGTNSVGWAVITDEYKVPSKKFKVLGNTDRHSIKKNLIGALLFDSGETAEATRLKRTARRRYTRRKNRICYLQEIFSNEMAKVDDSFFHRLEESFLVEEDKKHERHPIFGNIVDEVAYHEKYPTIYHLRKKLVDSTDKADLRLIYLALAHMIKFRGHFLIEGDLNPDNSDVDKLFIQLVQTYNQLFEENPINASGVDAKAILSARLSKSRRLENLIAQLPGEKKNGLFGNLIALSLGLTPNFKSNFDLAEDAKLQLSKDTYDDDLDNLLAQIGDQYADLFLAAKNLSDAILLSDILRVNTEITKAPLSASMIKRYDEHHQDLTLLKALVRQQLPEKYKEIFFDQSKNGYAGYIDGGASQEEFYKFIKPILEKMDGTEELLVKLNREDLLRKQRTFDNGSIPHQIHLGELHAILRRQEDFYPFLKDNREKIEKILTFRIPYYVGPLARGNSRFAWMTRKSEETITPWNFEEVVDKGASAQSFIERMTNFDKNLPNEKVLPKHSLLYEYFTVYNELTKVKYVTEGMRKPAFLSGEQKKAIVDLLFKTNRKVTVKQLKEDYFKKIECFDSVEISGVEDRFNASLGTYHDLLKIIKDKDFLDNEENEDILEDIVLTLTLFEDREMIEERLKTYAHLFDDKVMKQLKRRRYTGWGRLSRKLINGIRDKQSGKTILDFLKSDGFANRNFMQLIHDDSLTFKEDIQKAQVSGQGDSLHEHIANLAGSPAIKKGILQTVKVVDELVKVMGRHKPENIVIEMARENQTTQKGQKNSRERMKRIEEGIKELGSQILKEHPVENTQLQNEKLYLYYLQNGRDMYVDQELDINRLSDYDVDHIVPQSFLKDDSIDNKVLTRSDKARGKSDNVPSEEVVKKMKNYWRQLLNAKLITQRKFDNLTKAERGGLSELDKAGFIKRQLVETRQITKHVAQILDSRMNTKYDENDKLIREVKVITLKSKLVSDFRKDFQFYKVREINNYHHAHDAYLNAVVGTALIKKYPKLESEFVYGDYKVYDVRKMIAKSEQEIGKATAKYFFYSNIMNFFKTEITLANGEIRKRPLIETNGETGEIVWDKGRDFATVRKVLSMPQVNIVKKTEVQTGGFSKESILPKRNSDKLIARKKDWDPKKYGGFDSPTVAYSVLVVAKVEKGKSKKLKSVKELLGITIMERSSFEKNPIDFLEAKGYKEVKKDLIIKLPKYSLFELENGRKRMLASAGELQKGNELALPSKYVNFLYLASHYEKLKGSPEDNEQKQLFVEQHKHYLDEIIEQISEFSKRVILADANLDKVLSAYNKHRDKPIREQAENIIHLFTLTNLGAPAAFKYFDTTIDRKRYTSTKEVLDATLIHQSITGLYETRIDLSQLGGDGGGGGGGSEAAAKGGLGIEDEYRLHETSTEPDVSLGSTWLSDFPQAWAETGGMGLAVRQAPLIIPLKATSTPVSIQQYPMSHEARLGIKPHIQRLLDQGILVPCQSPWNTPLLPVKKPGTNDYRPVQDLREVNKRVEDIHPTVPNPYNLLSGLPPSHQWYTVLDLKDAFFCLRLHPTSQPLFAFEWRDPGMGISGQLTWTRLPQGFKNSPTLFNEALHRDLADFRIQHPDLILLQYVDDILLAATSELDCQQGTRALLQTLGDLGYRASAKKAQICQKQVKYLGYLLREGQRWLTEARKETVMGQPVPKTPRQLREFLGKAGFCRLFIPGFAEMAAPLYPLTKPGTLFSWGPDQQKAYQEIKQALLTAPALGLPDLTKPFELFVDEKQGYAKGVLTQKLGPWRRPVAYLSKKLDPVAAGWPPCLRMVAAIAVLTKDAGKLTMGQPLVILAPHAVEALVKQPPDRWLSNARMTHYQAMLLDTDRVQFGPVVALNPATLLPLPEEGAPHDCLEILAETHGTRPDLTDQPIPDADHTWYTDGSSFLQEGQRKAGAAVTTETEVIWAGALPAGTSAQRAELIALTQALKMAEGKRLNVYTDSRYAFATAHIHGEIYRRRGWLTSEGREIKNKSEILALLKALFLPKRLSIIHCLGHQKGDSAEARGNRLADQAAREAAIKTPPDTSTLLIAGKRTADGSEFEKRTADGSEFESPKKKAKVE

SEQ ID NO: 2060 - protein, 2094 aa, synthetic construct
MPAAKRVKLDGGDKKYSIGLDIGTNSVGWAVITDEYKVPSKKFKVLGNTDRHSIKKNLIGALLFDSGETAEATRLKRTARRRYTRRKNRICYLQEIFSNEMAKVDDSFFHRLEESFLVEEDKKHERHPIFGNIVDEVAYHEKYPTIYHLRKKLVDSTDKADLRLIYLALAHMIKFRGHFLIEGDLNPDNSDVDKLFIQLVQTYNQLFEENPINASGVDAKAILSARLSKSRRLENLIAQLPGEKKNGLFGNLIALSLGLTPNFKSNFDLAEDAKLQLSKDTYDDDLDNLLAQIGDQYADLFLAAKNLSDAILLSDILRVNTEITKAPLSASMIKRYDEHHQDLTLLKALVRQQLPEKYKEIFFDQSKNGYAGYIDGGASQEEFYKFIKPILEKMDGTEELLVKLNREDLLRKQRTFDNGSIPHQIHLGELHAILRRQEDFYPFLKDNREKIEKILTFRIPYYVGPLARGNSRFAWMTRKSEETITPWNFEEVVDKGASAQSFIERMTNFDKNLPNEKVLPKHSLLYEYFTVYNELTKVKYVTEGMRKPAFLSGEQKKAIVDLLFKTNRKVTVKQLKEDYFKKIECFDSVEISGVEDRFNASLGTYHDLLKIIKDKDFLDNEENEDILEDIVLTLTLFEDREMIEERLKTYAHLFDDKVMKQLKRRRYTGWGRLSRKLINGIRDKQSGKTILDFLKSDGFANRNFMQLIHDDSLTFKEDIQKAQVSGQGDSLHEHIANLAGSPAIKKGILQTVKVVDELVKVMGRHKPENIVIEMARENQTTQKGQKNSRERMKRIEEGIKELGSQILKEHPVENTQLQNEKLYLYYLQNGRDMYVDQELDINRLSDYDVDHIVPQSFLKDDSIDNKVLTRSDKARGKSDNVPSEEVVKKMKNYWRQLLNAKLITQRKFDNLTKAERGGLSELDKAGFIKRQLVETRQITKHVAQILDSRMNTKYDENDKLIREVKVITLKSKLVSDFRKDFQFYKVREINNYHHAHDAYLNAVVGTALIKKYPKLESEFVYGDYKVYDVRKMIAKSEQEIGKATAKYFFYSNIMNFFKTEITLANGEIRKRPLIETNGETGEIVWDKGRDFATVRKVLSMPQVNIVKKTEVQTGGFSKESILPKRNSDKLIARKKDWDPKKYGGFDSPTVAYSVLVVAKVEKGKSKKLKSVKELLGITIMERSSFEKNPIDFLEAKGYKEVKKDLIIKLPKYSLFELENGRKRMLASAGELQKGNELALPSKYVNFLYLASHYEKLKGSPEDNEQKQLFVEQHKHYLDEIIEQISEFSKRVILADANLDKVLSAYNKHRDKPIREQAENIIHLFTLTNLGAPAAFKYFDTTIDRKRYTSTKEVLDATLIHQSITGLYETRIDLSQLGGDGGGSSPAPGGGGGLGIEDEYRLHETSTEPDVSLGSTWLSDFPQAWAETGGMGLAVRQAPLIIPLKATSTPVSIQQYPMSHEARLGIKPHIQRLLDQGILVPCQSPWNTPLLPVKKPGTNDYRPVQDLREVNKRVEDIHPTVPNPYNLLSGLPPSHQWYTVLDLKDAFFCLRLHPTSQPLFAFEWRDPGMGISGQLTWTRLPQGFKNSPTLFNEALHRDLADFRIQHPDLILLQYVDDILLAATSELDCQQGTRALLQTLGDLGYRASAKKAQICQKQVKYLGYLLREGQRWLTEARKETVMGQPVPKTPRQLREFLGKAGFCRLFIPGFAEMAAPLYPLTKPGTLFSWGPDQQKAYQEIKQALLTAPALGLPDLTKPFELFVDEKQGYAKGVLTQKLGPWRRPVAYLSKKLDPVAAGWPPCLRMVAAIAVLTKDAGKLTMGQPLVILAPHAVEALVKQPPDRWLSNARMTHYQAMLLDTDRVQFGPVVALNPATLLPLPEEGAPHDCLEILAETHGTRPDLTDQPIPDADHTWYTDGSSFLQEGQRKAGAAVTTETEVIWAGALPAGTSAQRAELIALTQALKMAEGKRLNVYTDSRYAFATAHIHGEIYRRRGWLTSEGREIKNKSEILALLKALFLPKRLSIIHCLGHQKGDSAEARGNRLADQAAREAAIKTPPDTSTLLIAGKRTADGSEFEKRTADGSEFESPKKKAKVE

SEQ ID NO: 2061 - protein, 2094 aa, synthetic construct
MPAAKRVKLDGGDKKYSIGLDIGTNSVGWAVITDEYKVPSKKFKVLGNTDRHSIKKNLIGALLFDSGETAEATRLKRTARRRYTRRKNRICYLQEIFSNEMAKVDDSFFHRLEESFLVEEDKKHERHPIFGNIVDEVAYHEKYPTIYHLRKKLVDSTDKADLRLIYLALAHMIKFRGHFLIEGDLNPDNSDVDKLFIQLVQTYNQLFEENPINASGVDAKAILSARLSKSRRLENLIAQLPGEKKNGLFGNLIALSLGLTPNFKSNFDLAEDAKLQLSKDTYDDDLDNLLAQIGDQYADLFLAAKNLSDAILLSDILRVNTEITKAPLSASMIKRYDEHHQDLTLLKALVRQQLPEKYKEIFFDQSKNGYAGYIDGGASQEEFYKFIKPILEKMDGTEELLVKLNREDLLRKQRTFDNGSIPHQIHLGELHAILRRQEDFYPFLKDNREKIEKILTFRIPYYVGPLARGNSRFAWMTRKSEETITPWNFEEVVDKGASAQSFIERMTNFDKNLPNEKVLPKHSLLYEYFTVYNELTKVKYVTEGMRKPAFLSGEQKKAIVDLLFKTNRKVTVKQLKEDYFKKIECFDSVEISGVEDRFNASLGTYHDLLKIIKDKDFLDNEENEDILEDIVLTLTLFEDREMIEERLKTYAHLFDDKVMKQLKRRRYTGWGRLSRKLINGIRDKQSGKTILDFLKSDGFANRNFMQLIHDDSLTFKEDIQKAQVSGQGDSLHEHIANLAGSPAIKKGILQTVKVVDELVKVMGRHKPENIVIEMARENQTTQKGQKNSRERMKRIEEGIKELGSQILKEHPVENTQLQNEKLYLYYLQNGRDMYVDQELDINRLSDYDVDHIVPQSFLKDDSIDNKVLTRSDKARGKSDNVPSEEVVKKMKNYWRQLLNAKLITQRKFDNLTKAERGGLSELDKAGFIKRQLVETRQITKHVAQILDSRMNTKYDENDKLIREVKVITLKSKLVSDFRKDFQFYKVREINNYHHAHDAYLNAVVGTALIKKYPKLESEFVYGDYKVYDVRKMIAKSEQEIGKATAKYFFYSNIMNFFKTEITLANGEIRKRPLIETNGETGEIVWDKGRDFATVRKVLSMPQVNIVKKTEVQTGGFSKESILPKRNSDKLIARKKDWDPKKYGGFDSPTVAYSVLVVAKVEKGKSKKLKSVKELLGITIMERSSFEKNPIDFLEAKGYKEVKKDLIIKLPKYSLFELENGRKRMLASAGELQKGNELALPSKYVNFLYLASHYEKLKGSPEDNEQKQLFVEQHKHYLDEIIEQISEFSKRVILADANLDKVLSAYNKHRDKPIREQAENIIHLFTLTNLGAPAAFKYFDTTIDRKRYTSTKEVLDATLIHQSITGLYETRIDLSQLGGDGGGGSGGGPAPGGLGIEDEYRLHETSTEPDVSLGSTWLSDFPQAWAETGGMGLAVRQAPLIIPLKATSTPVSIQQYPMSHEARLGIKPHIQRLLDQGILVPCQSPWNTPLLPVKKPGTNDYRPVQDLREVNKRVEDIHPTVPNPYNLLSGLPPSHQWYTVLDLKDAFFCLRLHPTSQPLFAFEWRDPGMGISGQLTWTRLPQGFKNSPTLFNEALHRDLADFRIQHPDLILLQYVDDILLAATSELDCQQGTRALLQTLGDLGYRASAKKAQICQKQVKYLGYLLREGQRWLTEARKETVMGQPVPKTPRQLREFLGKAGFCRLFIPGFAEMAAPLYPLTKPGTLFSWGPDQQKAYQEIKQALLTAPALGLPDLTKPFELFVDEKQGYAKGVLTQKLGPWRRPVAYLSKKLDPVAAGWPPCLRMVAAIAVLTKDAGKLTMGQPLVILAPHAVEALVKQPPDRWLSNARMTHYQAMLLDTDRVQFGPVVALNPATLLPLPEEGAPHDCLEILAETHGTRPDLTDQPIPDADHTWYTDGSSFLQEGQRKAGAAVTTETEVIWAGALPAGTSAQRAELIALTQALKMAEGKRLNVYTDSRYAFATAHIHGEIYRRRGWLTSEGREIKNKSEILALLKALFLPKRLSIIHCLGHQKGDSAEARGNRLADQAAREAAIKTPPDTSTLLIAGKRTADGSEFEKRTADGSEFESPKKKAKVE

SEQ ID NO: 2062 - protein, 2096 aa, synthetic construct
MPAAKRVKLDGGDKKYSIGLDIGTNSVGWAVITDEYKVPSKKFKVLGNTDRHSIKKNLIGALLFDSGETAEATRLKRTARRRYTRRKNRICYLQEIFSNEMAKVDDSFFHRLEESFLVEEDKKHERHPIFGNIVDEVAYHEKYPTIYHLRKKLVDSTDKADLRLIYLALAHMIKFRGHFLIEGDLNPDNSDVDKLFIQLVQTYNQLFEENPINASGVDAKAILSARLSKSRRLENLIAQLPGEKKNGLFGNLIALSLGLTPNFKSNFDLAEDAKLQLSKDTYDDDLDNLLAQIGDQYADLFLAAKNLSDAILLSDILRVNTEITKAPLSASMIKRYDEHHQDLTLLKALVRQQLPEKYKEIFFDQSKNGYAGYIDGGASQEEFYKFIKPILEKMDGTEELLVKLNREDLLRKQRTFDNGSIPHQIHLGELHAILRRQEDFYPFLKDNREKIEKILTFRIPYYVGPLARGNSRFAWMTRKSEETITPWNFEEVVDKGASAQSFIERMTNFDKNLPNEKVLPKHSLLYEYFTVYNELTKVKYVTEGMRKPAFLSGEQKKAIVDLLFKTNRKVTVKQLKEDYFKKIECFDSVEISGVEDRFNASLGTYHDLLKIIKDKDFLDNEENEDILEDIVLTLTLFEDREMIEERLKTYAHLFDDKVMKQLKRRRYTGWGRLSRKLINGIRDKQSGKTILDFLKSDGFANRNFMQLIHDDSLTFKEDIQKAQVSGQGDSLHEHIANLAGSPAIKKGILQTVKVVDELVKVMGRHKPENIVIEMARENQTTQKGQKNSRERMKRIEEGIKELGSQILKEHPVENTQLQNEKLYLYYLQNGRDMYVDQELDINRLSDYDVDHIVPQSFLKDDSIDNKVLTRSDKARGKSDNVPSEEVVKKMKNYWRQLLNAKLITQRKFDNLTKAERGGLSELDKAGFIKRQLVETRQITKHVAQILDSRMNTKYDENDKLIREVKVITLKSKLVSDFRKDFQFYKVREINNYHHAHDAYLNAVVGTALIKKYPKLESEFVYGDYKVYDVRKMIAKSEQEIGKATAKYFFYSNIMNFFKTEITLANGEIRKRPLIETNGETGEIVWDKGRDFATVRKVLSMPQVNIVKKTEVQTGGFSKESILPKRNSDKLIARKKDWDPKKYGGFDSPTVAYSVLVVAKVEKGKSKKLKSVKELLGITIMERSSFEKNPIDFLEAKGYKEVKKDLIIKLPKYSLFELENGRKRMLASAGELQKGNELALPSKYVNFLYLASHYEKLKGSPEDNEQKQLFVEQHKHYLDEIIEQISEFSKRVILADANLDKVLSAYNKHRDKPIREQAENIIHLFTLTNLGAPAAFKYFDTTIDRKRYTSTKEVLDATLIHQSITGLYETRIDLSQLGGDGGGSSPAPEAAAKGGTLGIEDEYRLHETSTEPDVSLGSTWLSDFPQAWAETGGMGLAVRQAPLIIPLKATSTPVSIQQYPMSHEARLGIKPHIQRLLDQGILVPCQSPWNTPLLPVKKPGTNDYRPVQDLREVNKRVEDIHPTVPNPYNLLSGLPPSHQWYTVLDLKDAFFCLRLHPTSQPLFAFEWRDPGMGISGQLTWTRLPQGFKNSPTLFDEALHRDLADFRIQHPDLILLQYVDDILLAATSELDCQQGTRALLQTLGDLGYRASAKKAQICQKQVKYLGYLLREGQRWLTEARKETVMGQPVPKTPRQLREFLGTAGFCRLWIPGFAEMAAPLYPLTKTGTLFSWGPDQQKAYQEIKQALLTAPALGLPDLTKPFELFVDEKQGYAKGVLTQKLGPWRRPVAYLSKKLDPVAAGWPPCLRMVAAIAVLTKDAGKLTMGQPLVILAPHAVEALVKQPPDRWLSNARMTHYQAMLLDTDRVQFGPVVALNPATLLPLPEEGAPHDCLEILAETHGTRPDLTDQPIPDADHTWYTDGSSFLQEGQRKAGAAVTTETEVIWAGALPAGTSAQRAELIALTQALKMAEGKRLNVYTDSRYAFATAHIHGEIYRRRGLLTSEGREIKNKSEILALLKALFLPKRLSIIHCLGHQKGDSAEARGNRLADQAAREAAIKTPPDTSTLLAGKRTADGSEFEKRTADGSEFESPKKKAKVE

SEQ ID NO: 2063 - protein, 2105 aa, synthetic construct
MPAAKRVKLDGGDKKYSIGLDIGTNSVGWAVITDEYKVPSKKFKVLGNTDRHSIKKNLIGALLFDSGETAEATRLKRTARRRYTRRKNRICYLQEIFSNEMAKVDDSFFHRLEESFLVEEDKKHERHPIFGNIVDEVAYHEKYPTIYHLRKKLVDSTDKADLRLIYLALAHMIKFRGHFLIEGDLNPDNSDVDKLFIQLVQTYNQLFEENPINASGVDAKAILSARLSKSRRLENLIAQLPGEKKNGLFGNLIALSLGLTPNFKSNFDLAEDAKLQLSKDTYDDDLDNLLAQIGDQYADLFLAAKNLSDAILLSDILRVNTEITKAPLSASMIKRYDEHHQDLTLLKALVRQQLPEKYKEIFFDQSKNGYAGYIDGGASQEEFYKFIKPILEKMDGTEELLVKLNREDLLRKQRTFDNGSIPHQIHLGELHAILRRQEDFYPFLKDNREKIEKILTFRIPYYVGPLARGNSRFAWMTRKSEETITPWNFEEVVDKGASAQSFIERMTNFDKNLPNEKVLPKHSLLYEYFTVYNELTKVKYVTEGMRKPAFLSGEQKKAIVDLLFKTNRKVTVKQLKEDYFKKIECFDSVEISGVEDRFNASLGTYHDLLKIIKDKDFLDNEENEDILEDIVLTLTLFEDREMIEERLKTYAHLFDDKVMKQLKRRRYTGWGRLSRKLINGIRDKQSGKTILDFLKSDGFANRNFMQLIHDDSLTFKEDIQKAQVSGQGDSLHEHIANLAGSPAIKKGILQTVKVVDELVKVMGRHKPENIVIEMARENQTTQKGQKNSRERMKRIEEGIKELGSQILKEHPVENTQLQNEKLYLYYLQNGRDMYVDQELDINRLSDYDVDHIVPQSFLKDDSIDNKVLTRSDKARGKSDNVPSEEVVKKMKNYWRQLLNAKLITQRKFDNLTKAERGGLSELDKAGFIKRQLVETRQITKHVAQILDSRMNTKYDENDKLIREVKVITLKSKLVSDFRKDFQFYKVREINNYHHAHDAYLNAVVGTALIKKYPKLESEFVYGDYKVYDVRKMIAKSEQEIGKATAKYFFYSNIMNFFKTEITLANGEIRKRPLIETNGETGEIVWDKGRDFATVRKVLSMPQVNIVKKTEVQTGGFSKESILPKRNSDKLIARKKDWDPKKYGGFDSPTVAYSVLVVAKVEKGKSKKLKSVKELLGITIMERSSFEKNPIDFLEAKGYKEVKKDLIIKLPKYSLFELENGRKRMLASAGELQKGNELALPSKYVNFLYLASHYEKLKGSPEDNEQKQLFVEQHKHYLDEIIEQISEFSKRVILADANLDKVLSAYNKHRDKPIREQAENIIHLFTLTNLGAPAAFKYFDTTIDRKRYTSTKEVLDATLIHQSITGLYETRIDLSQLGGDGGGGGGSGGGGSGGGGSGGGGSGGTLGIEDEYRLHETSTEPDVSLGSTWLSDFPQAWAETGGMGLAVRQAPLIIPLKATSTPVSIQQYPMSHEARLGIKPHIQRLLDQGILVPCQSPWNTPLLPVKKPGTNDYRPVQDLREVNKRVEDIHPTVPNPYNLLSGLPPSHQWYTVLDLKDAFFCLRLHPTSQPLFAFEWRDPGMGISGQLTWTRLPQGFKNSPTLFDEALHRDLADFRIQHPDLILLQYVDDILLAATSELDCQQGTRALLQTLGDLGYRASAKKAQICQKQVKYLGYLLREGQRWLTEARKETVMGQPVPKTPRQLREFLGTAGFCRLWIPGFAEMAAPLYPLTKTGTLFSWGPDQQKAYQEIKQALLTAPALGLPDLTKPFELFVDEKQGYAKGVLTQKLGPWRRPVAYLSKKLDPVAAGWPPCLRMVAAIAVLTKDAGKLTMGQPLVILAPHAVEALVKQPPDRWLSNARMTHYQAMLLDTDRVQFGPVVALNPATLLPLPEEGAPHDCLEILAETHGTRPDLTDQPIPDADHTWYTDGSSFLQEGQRKAGAAVTTETEVIWAGALPAGTSAQRAELIALTQALKMAEGKRLNVYTDSRYAFATAHIHGEIYRRRGLLTSEGREIKNKSEILALLKALFLPKRLSIIHCLGHQKGDSAEARGNRLADQAAREAAIKTPPDTSTLLAGKRTADGSEFEKRTADGSEFESPKKKAKVE

SEQ ID NO: 2064 - protein, 2095 aa, synthetic construct
MPAAKRVKLDGGDKKYSIGLDIGTNSVGWAVITDEYKVPSKKFKVLGNTDRHSIKKNLIGALLFDSGETAEATRLKRTARRRYTRRKNRICYLQEIFSNEMAKVDDSFFHRLEESFLVEEDKKHERHPIFGNIVDEVAYHEKYPTIYHLRKKLVDSTDKADLRLIYLALAHMIKFRGHFLIEGDLNPDNSDVDKLFIQLVQTYNQLFEENPINASGVDAKAILSARLSKSRRLENLIAQLPGEKKNGLFGNLIALSLGLTPNFKSNFDLAEDAKLQLSKDTYDDDLDNLLAQIGDQYADLFLAAKNLSDAILLSDILRVNTEITKAPLSASMIKRYDEHHQDLTLLKALVRQQLPEKYKEIFFDQSKNGYAGYIDGGASQEEFYKFIKPILEKMDGTEELLVKLNREDLLRKQRTFDNGSIPHQIHLGELHAILRRQEDFYPFLKDNREKIEKILTFRIPYYVGPLARGNSRFAWMTRKSEETITPWNFEEVVDKGASAQSFIERMTNFDKNLPNEKVLPKHSLLYEYFTVYNELTKVKYVTEGMRKPAFLSGEQKKAIVDLLFKTNRKVTVKQLKEDYFKKIECFDSVEISGVEDRFNASLGTYHDLLKIIKDKDFLDNEENEDILEDIVLTLTLFEDREMIEERLKTYAHLFDDKVMKQLKRRRYTGWGRLSRKLINGIRDKQSGKTILDFLKSDGFANRNFMQLIHDDSLTFKEDIQKAQVSGQGDSLHEHIANLAGSPAIKKGILQTVKVVDELVKVMGRHKPENIVIEMARENQTTQKGQKNSRERMKRIEEGIKELGSQILKEHPVENTQLQNEKLYLYYLQNGRDMYVDQELDINRLSDYDVDHIVPQSFLKDDSIDNKVLTRSDKARGKSDNVPSEEVVKKMKNYWRQLLNAKLITQRKFDNLTKAERGGLSELDKAGFIKRQLVETRQITKHVAQILDSRMNTKYDENDKLIREVKVITLKSKLVSDFRKDFQFYKVREINNYHHAHDAYLNAVVGTALIKKYPKLESEFVYGDYKVYDVRKMIAKSEQEIGKATAKYFFYSNIMNFFKTEITLANGEIRKRPLIETNGETGEIVWDKGRDFATVRKVLSMPQVNIVKKTEVQTGGFSKESILPKRNSDKLIARKKDWDPKKYGGFDSPTVAYSVLVVAKVEKGKSKKLKSVKELLGITIMERSSFEKNPIDFLEAKGYKEVKKDLIIKLPKYSLFELENGRKRMLASAGELQKGNELALPSKYVNFLYLASHYEKLKGSPEDNEQKQLFVEQHKHYLDEIIEQISEFSKRVILADANLDKVLSAYNKHRDKPIREQAENIIHLFTLTNLGAPAAFKYFDTTIDRKRYTSTKEVLDATLIHQSITGLYETRIDLSQLGGDGGEAAAKEAAAKGGTLGIEDEYRLHETSTEPDVSLGSTWLSDFPQAWAETGGMGLAVRQAPLIIPLKATSTPVSIQQYPMSHEARLGIKPHIQRLLDQGILVPCQSPWNTPLLPVKKPGTNDYRPVQDLREVNKRVEDIHPTVPNPYNLLSGLPPSHQWYTVLDLKDAFFCLRLHPTSQPLFAFEWRDPGMGISGQLTWTRLPQGFKNSPTLFDEALHRDLADFRIQHPDLILLQYVDDILLAATSELDCQQGTRALLQTLGDLGYRASAKKAQICQKQVKYLGYLLREGQRWLTEARKETVMGQPVPKTPRQLREFLGTAGFCRLWIPGFAEMAAPLYPLTKTGTLFSWGPDQQKAYQEIKQALLTAPALGLPDLTKPFELFVDEKQGYAKGVLTQKLGPWRRPVAYLSKKLDPVAAGWPPCLRMVAAIAVLTKDAGKLTMGQPLVILAPHAVEALVKQPPDRWLSNARMTHYQAMLLDTDRVQFGPVVALNPATLLPLPEEGAPHDCLEILAETHGTRPDLTDQPIPDADHTWYTDGSSFLQEGQRKAGAAVTTETEVIWAGALPAGTSAQRAELIALTQALKMAEGKRLNVYTDSRYAFATAHIHGEIYRRRGLLTSEGREIKNKSEILALLKALFLPKRLSIIHCLGHQKGDSAEARGNRLADQAAREAAIKTPPDTSTLLAGKRTADGSEFEKRTADGSEFESPKKKAKVE

SEQ ID NO: 2065 - protein, 2096 aa, synthetic construct
MPAAKRVKLDGGDKKYSIGLDIGTNSVGWAVITDEYKVPSKKFKVLGNTDRHSIKKNLIGALLFDSGETAEATRLKRTARRRYTRRKNRICYLQEIFSNEMAKVDDSFFHRLEESFLVEEDKKHERHPIFGNIVDEVAYHEKYPTIYHLRKKLVDSTDKADLRLIYLALAHMIKFRGHFLIEGDLNPDNSDVDKLFIQLVQTYNQLFEENPINASGVDAKAILSARLSKSRRLENLIAQLPGEKKNGLFGNLIALSLGLTPNFKSNFDLAEDAKLQLSKDTYDDDLDNLLAQIGDQYADLFLAAKNLSDAILLSDILRVNTEITKAPLSASMIKRYDEHHQDLTLLKALVRQQLPEKYKEIFFDQSKNGYAGYIDGGASQEEFYKFIKPILEKMDGTEELLVKLNREDLLRKQRTFDNGSIPHQIHLGELHAILRRQEDFYPFLKDNREKIEKILTFRIPYYVGPLARGNSRFAWMTRKSEETITPWNFEEVVDKGASAQSFIERMTNFDKNLPNEKVLPKHSLLYEYFTVYNELTKVKYVTEGMRKPAFLSGEQKKAIVDLLFKTNRKVTVKQLKEDYFKKIECFDSVEISGVEDRFNASLGTYHDLLKIIKDKDFLDNEENEDILEDIVLTLTLFEDREMIEERLKTYAHLFDDKVMKQLKRRRYTGWGRLSRKLINGIRDKQSGKTILDFLKSDGFANRNFMQLIHDDSLTFKEDIQKAQVSGQGDSLHEHIANLAGSPAIKKGILQTVKVVDELVKVMGRHKPENIVIEMARENQTTQKGQKNSRERMKRIEEGIKELGSQILKEHPVENTQLQNEKLYLYYLQNGRDMYVDQELDINRLSDYDVDHIVPQSFLKDDSIDNKVLTRSDKARGKSDNVPSEEVVKKMKNYWRQLLNAKLITQRKFDNLTKAERGGLSELDKAGFIKRQLVETRQITKHVAQILDSRMNTKYDENDKLIREVKVITLKSKLVSDFRKDFQFYKVREINNYHHAHDAYLNAVVGTALIKKYPKLESEFVYGDYKVYDVRKMIAKSEQEIGKATAKYFFYSNIMNFFKTEITLANGEIRKRPLIETNGETGEIVWDKGRDFATVRKVLSMPQVNIVKKTEVQTGGFSKESILPKRNSDKLIARKKDWDPKKYGGFDSPTVAYSVLVVAKVEKGKSKKLKSVKELLGITIMERSSFEKNPIDFLEAKGYKEVKKDLIIKLPKYSLFELENGRKRMLASAGELQKGNELALPSKYVNFLYLASHYEKLKGSPEDNEQKQLFVEQHKHYLDEIIEQISEFSKRVILADANLDKVLSAYNKHRDKPIREQAENIIHLFTLTNLGAPAAFKYFDTTIDRKRYTSTKEVLDATLIHQSITGLYETRIDLSQLGGDGGPAPGSSEAAAKGGTLGIEDEYRLHETSTEPDVSLGSTWLSDFPQAWAETGGMGLAVRQAPLIIPLKATSTPVSIQQYPMSHEARLGIKPHIQRLLDQGILVPCQSPWNTPLLPVKKPGTNDYRPVQDLREVNKRVEDIHPTVPNPYNLLSGLPPSHQWYTVLDLKDAFFCLRLHPTSQPLFAFEWRDPGMGISGQLTWTRLPQGFKNSPTLFDEALHRDLADFRIQHPDLILLQYVDDILLAATSELDCQQGTRALLQTLGDLGYRASAKKAQICQKQVKYLGYLLREGQRWLTEARKETVMGQPVPKTPRQLREFLGTAGFCRLWIPGFAEMAAPLYPLTKTGTLFSWGPDQQKAYQEIKQALLTAPALGLPDLTKPFELFVDEKQGYAKGVLTQKLGPWRRPVAYLSKKLDPVAAGWPPCLRMVAAIAVLTKDAGKLTMGQPLVILAPHAVEALVKQPPDRWLSNARMTHYQAMLLDTDRVQFGPVVALNPATLLPLPEEGAPHDCLEILAETHGTRPDLTDQPIPDADHTWYTDGSSFLQEGQRKAGAAVTTETEVIWAGALPAGTSAQRAELIALTQALKMAEGKRLNVYTDSRYAFATAHIHGEIYRRRGLLTSEGREIKNKSEILALLKALFLPKRLSIIHCLGHQKGDSAEARGNRLADQAAREAAIKTPPDTSTLLAGKRTADGSEFEKRTADGSEFESPKKKAKVE

SEQ ID NO: 2066 - protein, 2115 aa, synthetic construct
MPAAKRVKLDGGDKKYSIGLDIGTNSVGWAVITDEYKVPSKKFKVLGNTDRHSIKKNLIGALLFDSGETAEATRLKRTARRRYTRRKNRICYLQEIFSNEMAKVDDSFFHRLEESFLVEEDKKHERHPIFGNIVDEVAYHEKYPTIYHLRKKLVDSTDKADLRLIYLALAHMIKFRGHFLIEGDLNPDNSDVDKLFIQLVQTYNQLFEENPINASGVDAKAILSARLSKSRRLENLIAQLPGEKKNGLFGNLIALSLGLTPNFKSNFDLAEDAKLQLSKDTYDDDLDNLLAQIGDQYADLFLAAKNLSDAILLSDILRVNTEITKAPLSASMIKRYDEHHQDLTLLKALVRQQLPEKYKEIFFDQSKNGYAGYIDGGASQEEFYKFIKPILEKMDGTEELLVKLNREDLLRKQRTFDNGSIPHQIHLGELHAILRRQEDFYPFLKDNREKIEKILTFRIPYYVGPLARGNSRFAWMTRKSEETITPWNFEEVVDKGASAQSFIERMTNFDKNLPNEKVLPKHSLLYEYFTVYNELTKVKYVTEGMRKPAFLSGEQKKAIVDLLFKTNRKVTVKQLKEDYFKKIECFDSVEISGVEDRFNASLGTYHDLLKIIKDKDFLDNEENEDILEDIVLTLTLFEDREMIEERLKTYAHLFDDKVMKQLKRRRYTGWGRLSRKLINGIRDKQSGKTILDFLKSDGFANRNFMQLIHDDSLTFKEDIQKAQVSGQGDSLHEHIANLAGSPAIKKGILQTVKVVDELVKVMGRHKPENIVIEMARENQTTQKGQKNSRERMKRIEEGIKELGSQILKEHPVENTQLQNEKLYLYYLQNGRDMYVDQELDINRLSDYDVDHIVPQSFLKDDSIDNKVLTRSDKARGKSDNVPSEEVVKKMKNYWRQLLNAKLITQRKFDNLTKAERGGLSELDKAGFIKRQLVETRQITKHVAQILDSRMNTKYDENDKLIREVKVITLKSKLVSDFRKDFQFYKVREINNYHHAHDAYLNAVVGTALIKKYPKLESEFVYGDYKVYDVRKMIAKSEQEIGKATAKYFFYSNIMNFFKTEITLANGEIRKRPLIETNGETGEIVWDKGRDFATVRKVLSMPQVNIVKKTEVQTGGFSKESILPKRNSDKLIARKKDWDPKKYGGFDSPTVAYSVLVVAKVEKGKSKKLKSVKELLGITIMERSSFEKNPIDFLEAKGYKEVKKDLIIKLPKYSLFELENGRKRMLASAGELQKGNELALPSKYVNFLYLASHYEKLKGSPEDNEQKQLFVEQHKHYLDEIIEQISEFSKRVILADANLDKVLSAYNKHRDKPIREQAENIIHLFTLTNLGAPAAFKYFDTTIDRKRYTSTKEVLDATLIHQSITGLYETRIDLSQLGGDGGGGGGSGGGGSGGGGSGGGGSGGGGSGGGGSGGTLGIEDEYRLHETSTEPDVSLGSTWLSDFPQAWAETGGMGLAVRQAPLIIPLKATSTPVSIQQYPMSHEARLGIKPHIQRLLDQGILVPCQSPWNTPLLPVKKPGTNDYRPVQDLREVNKRVEDIHPTVPNPYNLLSGLPPSHQWYTVLDLKDAFFCLRLHPTSQPLFAFEWRDPGMGISGQLTWTRLPQGFKNSPTLFDEALHRDLADFRIQHPDLILLQYVDDILLAATSELDCQQGTRALLQTLGDLGYRASAKKAQICQKQVKYLGYLLREGQRWLTEARKETVMGQPVPKTPRQLREFLGTAGFCRLWIPGFAEMAAPLYPLTKTGTLFSWGPDQQKAYQEIKQALLTAPALGLPDLTKPFELFVDEKQGYAKGVLTQKLGPWRRPVAYLSKKLDPVAAGWPPCLRMVAAIAVLTKDAGKLTMGQPLVILAPHAVEALVKQPPDRWLSNARMTHYQAMLLDTDRVQFGPVVALNPATLLPLPEEGAPHDCLEILAETHGTRPDLTDQPIPDADHTWYTDGSSFLQEGQRKAGAAVTTETEVIWAGALPAGTSAQRAELIALTQALKMAEGKRLNVYTDSRYAFATAHIHGEIYRRRGLLTSEGREIKNKSEILALLKALFLPKRLSIIHCLGHQKGDSAEARGNRLADQAAREAAIKTPPDTSTLLAGKRTADGSEFEKRTADGSEFESPKKKAKVE

SEQ ID NO: 2067 - protein, 2093 aa, synthetic construct
MPAAKRVKLDGGDKKYSIGLDIGTNSVGWAVITDEYKVPSKKFKVLGNTDRHSIKKNLIGALLFDSGETAEATRLKRTARRRYTRRKNRICYLQEIFSNEMAKVDDSFFHRLEESFLVEEDKKHERHPIFGNIVDEVAYHEKYPTIYHLRKKLVDSTDKADLRLIYLALAHMIKFRGHFLIEGDLNPDNSDVDKLFIQLVQTYNQLFEENPINASGVDAKAILSARLSKSRRLENLIAQLPGEKKNGLFGNLIALSLGLTPNFKSNFDLAEDAKLQLSKDTYDDDLDNLLAQIGDQYADLFLAAKNLSDAILLSDILRVNTEITKAPLSASMIKRYDEHHQDLTLLKALVRQQLPEKYKEIFFDQSKNGYAGYIDGGASQEEFYKFIKPILEKMDGTEELLVKLNREDLLRKQRTFDNGSIPHQIHLGELHAILRRQEDFYPFLKDNREKIEKILTFRIPYYVGPLARGNSRFAWMTRKSEETITPWNFEEVVDKGASAQSFIERMTNFDKNLPNEKVLPKHSLLYEYFTVYNELTKVKYVTEGMRKPAFLSGEQKKAIVDLLFKTNRKVTVKQLKEDYFKKIECFDSVEISGVEDRFNASLGTYHDLLKIIKDKDFLDNEENEDILEDIVLTLTLFEDREMIEERLKTYAHLFDDKVMKQLKRRRYTGWGRLSRKLINGIRDKQSGKTILDFLKSDGFANRNFMQLIHDDSLTFKEDIQKAQVSGQGDSLHEHIANLAGSPAIKKGILQTVKVVDELVKVMGRHKPENIVIEMARENQTTQKGQKNSRERMKRIEEGIKELGSQILKEHPVENTQLQNEKLYLYYLQNGRDMYVDQELDINRLSDYDVDHIVPQSFLKDDSIDNKVLTRSDKARGKSDNVPSEEVVKKMKNYWRQLLNAKLITQRKFDNLTKAERGGLSELDKAGFIKRQLVETRQITKHVAQILDSRMNTKYDENDKLIREVKVITLKSKLVSDFRKDFQFYKVREINNYHHAHDAYLNAVVGTALIKKYPKLESEFVYGDYKVYDVRKMIAKSEQEIGKATAKYFFYSNIMNFFKTEITLANGEIRKRPLIETNGETGEIVWDKGRDFATVRKVLSMPQVNIVKKTEVQTGGFSKESILPKRNSDKLIARKKDWDPKKYGGFDSPTVAYSVLVVAKVEKGKSKKLKSVKELLGITIMERSSFEKNPIDFLEAKGYKEVKKDLIIKLPKYSLFELENGRKRMLASAGELQKGNELALPSKYVNFLYLASHYEKLKGSPEDNEQKQLFVEQHKHYLDEIIEQISEFSKRVILADANLDKVLSAYNKHRDKPIREQAENIIHLFTLTNLGAPAAFKYFDTTIDRKRYTSTKEVLDATLIHQSITGLYETRIDLSQLGGDGGEAAAKPAPGGTLGIEDEYRLHETSTEPDVSLGSTWLSDFPQAWAETGGMGLAVRQAPLIIPLKATSTPVSIQQYPMSHEARLGIKPHIQRLLDQGILVPCQSPWNTPLLPVKKPGTNDYRPVQDLREVNKRVEDIHPTVPNPYNLLSGLPPSHQWYTVLDLKDAFFCLRLHPTSQPLFAFEWRDPGMGISGQLTWTRLPQGFKNSPTLFDEALHRDLADFRIQHPDLILLQYVDDILLAATSELDCQQGTRALLQTLGDLGYRASAKKAQICQKQVKYLGYLLREGQRWLTEARKETVMGQPVPKTPRQLREFLGTAGFCRLWIPGFAEMAAPLYPLTKTGTLFSWGPDQQKAYQEIKQALLTAPALGLPDLTKPFELFVDEKQGYAKGVLTQKLGPWRRPVAYLSKKLDPVAAGWPPCLRMVAAIAVLTKDAGKLTMGQPLVILAPHAVEALVKQPPDRWLSNARMTHYQAMLLDTDRVQFGPVVALNPATLLPLPEEGAPHDCLEILAETHGTRPDLTDQPIPDADHTWYTDGSSFLQEGQRKAGAAVTTETEVIWAGALPAGTSAQRAELIALTQALKMAEGKRLNVYTDSRYAFATAHIHGEIYRRRGLLTSEGREIKNKSEILALLKALFLPKRLSIIHCLGHQKGDSAEARGNRLADQAAREAAIKTPPDTSTLLAGKRTADGSEFEKRTADGSEFESPKKKAKVE

SEQ ID NO: 2068 - protein, 2096 aa, synthetic construct
MPAAKRVKLDGGDKKYSIGLDIGTNSVGWAVITDEYKVPSKKFKVLGNTDRHSIKKNLIGALLFDSGETAEATRLKRTARRRYTRRKNRICYLQEIFSNEMAKVDDSFFHRLEESFLVEEDKKHERHPIFGNIVDEVAYHEKYPTIYHLRKKLVDSTDKADLRLIYLALAHMIKFRGHFLIEGDLNPDNSDVDKLFIQLVQTYNQLFEENPINASGVDAKAILSARLSKSRRLENLIAQLPGEKKNGLFGNLIALSLGLTPNFKSNFDLAEDAKLQLSKDTYDDDLDNLLAQIGDQYADLFLAAKNLSDAILLSDILRVNTEITKAPLSASMIKRYDEHHQDLTLLKALVRQQLPEKYKEIFFDQSKNGYAGYIDGGASQEEFYKFIKPILEKMDGTEELLVKLNREDLLRKQRTFDNGSIPHQIHLGELHAILRRQEDFYPFLKDNREKIEKILTFRIPYYVGPLARGNSRFAWMTRKSEETITPWNFEEVVDKGASAQSFIERMTNFDKNLPNEKVLPKHSLLYEYFTVYNELTKVKYVTEGMRKPAFLSGEQKKAIVDLLFKTNRKVTVKQLKEDYFKKIECFDSVEISGVEDRFNASLGTYHDLLKIIKDKDFLDNEENEDILEDIVLTLTLFEDREMIEERLKTYAHLFDDKVMKQLKRRRYTGWGRLSRKLINGIRDKQSGKTILDFLKSDGFANRNFMQLIHDDSLTFKEDIQKAQVSGQGDSLHEHIANLAGSPAIKKGILQTVKVVDELVKVMGRHKPENIVIEMARENQTTQKGQKNSRERMKRIEEGIKELGSQILKEHPVENTQLQNEKLYLYYLQNGRDMYVDQELDINRLSDYDVDHIVPQSFLKDDSIDNKVLTRSDKARGKSDNVPSEEVVKKMKNYWRQLLNAKLITQRKFDNLTKAERGGLSELDKAGFIKRQLVETRQITKHVAQILDSRMNTKYDENDKLIREVKVITLKSKLVSDFRKDFQFYKVREINNYHHAHDAYLNAVVGTALIKKYPKLESEFVYGDYKVYDVRKMIAKSEQEIGKATAKYFFYSNIMNFFKTEITLANGEIRKRPLIETNGETGEIVWDKGRDFATVRKVLSMPQVNIVKKTEVQTGGFSKESILPKRNSDKLIARKKDWDPKKYGGFDSPTVAYSVLVVAKVEKGKSKKLKSVKELLGITIMERSSFEKNPIDFLEAKGYKEVKKDLIIKLPKYSLFELENGRKRMLASAGELQKGNELALPSKYVNFLYLASHYEKLKGSPEDNEQKQLFVEQHKHYLDEIIEQISEFSKRVILADANLDKVLSAYNKHRDKPIREQAENIIHLFTLTNLGAPAAFKYFDTTIDRKRYTSTKEVLDATLIHQSITGLYETRIDLSQLGGDGGGGGGGSEAAAKGGTLGIEDEYRLHETSTEPDVSLGSTWLSDFPQAWAETGGMGLAVRQAPLIIPLKATSTPVSIQQYPMSHEARLGIKPHIQRLLDQGILVPCQSPWNTPLLPVKKPGTNDYRPVQDLREVNKRVEDIHPTVPNPYNLLSGLPPSHQWYTVLDLKDAFFCLRLHPTSQPLFAFEWRDPGMGISGQLTWTRLPQGFKNSPTLFDEALHRDLADFRIQHPDLILLQYVDDILLAATSELDCQQGTRALLQTLGDLGYRASAKKAQICQKQVKYLGYLLREGQRWLTEARKETVMGQPVPKTPRQLREFLGTAGFCRLWIPGFAEMAAPLYPLTKTGTLFSWGPDQQKAYQEIKQALLTAPALGLPDLTKPFELFVDEKQGYAKGVLTQKLGPWRRPVAYLSKKLDPVAAGWPPCLRMVAAIAVLTKDAGKLTMGQPLVILAPHAVEALVKQPPDRWLSNARMTHYQAMLLDTDRVQFGPVVALNPATLLPLPEEGAPHDCLEILAETHGTRPDLTDQPIPDADHTWYTDGSSFLQEGQRKAGAAVTTETEVIWAGALPAGTSAQRAELIALTQALKMAEGKRLNVYTDSRYAFATAHIHGEIYRRRGLLTSEGREIKNKSEILALLKALFLPKRLSIIHCLGHQKGDSAEARGNRLADQAAREAAIKTPPDTSTLLAGKRTADGSEFEKRTADGSEFESPKKKAKVE

SEQ ID NO: 2069 - protein, 2096 aa, synthetic construct
MPAAKRVKLDGGDKKYSIGLDIGTNSVGWAVITDEYKVPSKKFKVLGNTDRHSIKKNLIGALLFDSGETAEATRLKRTARRRYTRRKNRICYLQEIFSNEMAKVDDSFFHRLEESFLVEEDKKHERHPIFGNIVDEVAYHEKYPTIYHLRKKLVDSTDKADLRLIYLALAHMIKFRGHFLIEGDLNPDNSDVDKLFIQLVQTYNQLFEENPINASGVDAKAILSARLSKSRRLENLIAQLPGEKKNGLFGNLIALSLGLTPNFKSNFDLAEDAKLQLSKDTYDDDLDNLLAQIGDQYADLFLAAKNLSDAILLSDILRVNTEITKAPLSASMIKRYDEHHQDLTLLKALVRQQLPEKYKEIFFDQSKNGYAGYIDGGASQEEFYKFIKPILEKMDGTEELLVKLNREDLLRKQRTFDNGSIPHQIHLGELHAILRRQEDFYPFLKDNREKIEKILTFRIPYYVGPLARGNSRFAWMTRKSEETITPWNFEEVVDKGASAQSFIERMTNFDKNLPNEKVLPKHSLLYEYFTVYNELTKVKYVTEGMRKPAFLSGEQKKAIVDLLFKTNRKVTVKQLKEDYFKKIECFDSVEISGVEDRFNASLGTYHDLLKIIKDKDFLDNEENEDILEDIVLTLTLFEDREMIEERLKTYAHLFDDKVMKQLKRRRYTGWGRLSRKLINGIRDKQSGKTILDFLKSDGFANRNFMQLIHDDSLTFKEDIQKAQVSGQGDSLHEHIANLAGSPAIKKGILQTVKVVDELVKVMGRHKPENIVIEMARENQTTQKGQKNSRERMKRIEEGIKELGSQILKEHPVENTQLQNEKLYLYYLQNGRDMYVDQELDINRLSDYDVDHIVPQSFLKDDSIDNKVLTRSDKARGKSDNVPSEEVVKKMKNYWRQLLNAKLITQRKFDNLTKAERGGLSELDKAGFIKRQLVETRQITKHVAQILDSRMNTKYDENDKLIREVKVITLKSKLVSDFRKDFQFYKVREINNYHHAHDAYLNAVVGTALIKKYPKLESEFVYGDYKVYDVRKMIAKSEQEIGKATAKYFFYSNIMNFFKTEITLANGEIRKRPLIETNGETGEIVWDKGRDFATVRKVLSMPQVNIVKKTEVQTGGFSKESILPKRNSDKLIARKKDWDPKKYGGFDSPTVAYSVLVVAKVEKGKSKKLKSVKELLGITIMERSSFEKNPIDFLEAKGYKEVKKDLIIKLPKYSLFELENGRKRMLASAGELQKGNELALPSKYVNFLYLASHYEKLKGSPEDNEQKQLFVEQHKHYLDEIIEQISEFSKRVILADANLDKVLSAYNKHRDKPIREQAENIIHLFTLTNLGAPAAFKYFDTTIDRKRYTSTKEVLDATLIHQSITGLYETRIDLSQLGGDGGGGSEAAAKPAPGGTLGIEDEYRLHETSTEPDVSLGSTWLSDFPQAWAETGGMGLAVRQAPLIIPLKATSTPVSIQQYPMSHEARLGIKPHIQRLLDQGILVPCQSPWNTPLLPVKKPGTNDYRPVQDLREVNKRVEDIHPTVPNPYNLLSGLPPSHQWYTVLDLKDAFFCLRLHPTSQPLFAFEWRDPGMGISGQLTWTRLPQGFKNSPTLFDEALHRDLADFRIQHPDLILLQYVDDILLAATSELDCQQGTRALLQTLGDLGYRASAKKAQICQKQVKYLGYLLREGQRWLTEARKETVMGQPVPKTPRQLREFLGTAGFCRLWIPGFAEMAAPLYPLTKTGTLFSWGPDQQKAYQEIKQALLTAPALGLPDLTKPFELFVDEKQGYAKGVLTQKLGPWRRPVAYLSKKLDPVAAGWPPCLRMVAAIAVLTKDAGKLTMGQPLVILAPHAVEALVKQPPDRWLSNARMTHYQAMLLDTDRVQFGPVVALNPATLLPLPEEGAPHDCLEILAETHGTRPDLTDQPIPDADHTWYTDGSSFLQEGQRKAGAAVTTETEVIWAGALPAGTSAQRAELIALTQALKMAEGKRLNVYTDSRYAFATAHIHGEIYRRRGLLTSEGREIKNKSEILALLKALFLPKRLSIIHCLGHQKGDSAEARGNRLADQAAREAAIKTPPDTSTLLAGKRTADGSEFEKRTADGSEFESPKKKAKVE

SEQ ID NO: 2070 - protein, 2105 aa, synthetic construct
MPAAKRVKLDGGDKKYSIGLDIGTNSVGWAVITDEYKVPSKKFKVLGNTDRHSIKKNLIGALLFDSGETAEATRLKRTARRRYTRRKNRICYLQEIFSNEMAKVDDSFFHRLEESFLVEEDKKHERHPIFGNIVDEVAYHEKYPTIYHLRKKLVDSTDKADLRLIYLALAHMIKFRGHFLIEGDLNPDNSDVDKLFIQLVQTYNQLFEENPINASGVDAKAILSARLSKSRRLENLIAQLPGEKKNGLFGNLIALSLGLTPNFKSNFDLAEDAKLQLSKDTYDDDLDNLLAQIGDQYADLFLAAKNLSDAILLSDILRVNTEITKAPLSASMIKRYDEHHQDLTLLKALVRQQLPEKYKEIFFDQSKNGYAGYIDGGASQEEFYKFIKPILEKMDGTEELLVKLNREDLLRKQRTFDNGSIPHQIHLGELHAILRRQEDFYPFLKDNREKIEKILTFRIPYYVGPLARGNSRFAWMTRKSEETITPWNFEEVVDKGASAQSFIERMTNFDKNLPNEKVLPKHSLLYEYFTVYNELTKVKYVTEGMRKPAFLSGEQKKAIVDLLFKTNRKVTVKQLKEDYFKKIECFDSVEISGVEDRFNASLGTYHDLLKIIKDKDFLDNEENEDILEDIVLTLTLFEDREMIEERLKTYAHLFDDKVMKQLKRRRYTGWGRLSRKLINGIRDKQSGKTILDFLKSDGFANRNFMQLIHDDSLTFKEDIQKAQVSGQGDSLHEHIANLAGSPAIKKGILQTVKVVDELVKVMGRHKPENIVIEMARENQTTQKGQKNSRERMKRIEEGIKELGSQILKEHPVENTQLQNEKLYLYYLQNGRDMYVDQELDINRLSDYDVDHIVPQSFLKDDSIDNKVLTRSDKARGKSDNVPSEEVVKKMKNYWRQLLNAKLITQRKFDNLTKAERGGLSELDKAGFIKRQLVETRQITKHVAQILDSRMNTKYDENDKLIREVKVITLKSKLVSDFRKDFQFYKVREINNYHHAHDAYLNAVVGTALIKKYPKLESEFVYGDYKVYDVRKMIAKSEQEIGKATAKYFFYSNIMNFFKTEITLANGEIRKRPLIETNGETGEIVWDKGRDFATVRKVLSMPQVNIVKKTEVQTGGFSKESILPKRNSDKLIARKKDWDPKKYGGFDSPTVAYSVLVVAKVEKGKSKKLKSVKELLGITIMERSSFEKNPIDFLEAKGYKEVKKDLIIKLPKYSLFELENGRKRMLASAGELQKGNELALPSKYVNFLYLASHYEKLKGSPEDNEQKQLFVEQHKHYLDEIIEQISEFSKRVILADANLDKVLSAYNKHRDKPIREQAENIIHLFTLTNLGAPAAFKYFDTTIDRKRYTSTKEVLDATLIHQSITGLYETRIDLSQLGGDGGEAAAKEAAAKEAAAKEAAAKGGTLGIEDEYRLHETSTEPDVSLGSTWLSDFPQAWAETGGMGLAVRQAPLIIPLKATSTPVSIQQYPMSHEARLGIKPHIQRLLDQGILVPCQSPWNTPLLPVKKPGTNDYRPVQDLREVNKRVEDIHPTVPNPYNLLSGLPPSHQWYTVLDLKDAFFCLRLHPTSQPLFAFEWRDPGMGISGQLTWTRLPQGFKNSPTLFNEALHRDLADFRIQHPDLILLQYVDDILLAATSELDCQQGTRALLQTLGDLGYRASAKKAQICQKQVKYLGYLLREGQRWLTEARKETVMGQPVPKTPRQLREFLGTAGFCRLWIPGFAEMAAPLYPLTKPGTLFSWGPDQQKAYQEIKQALLTAPALGLPDLTKPFELFVDEKQGYAKGVLTQKLGPWRRPVAYLSKKLDPVAAGWPPCLRMVAAIAVLTKDAGKLTMGQPLVILAPHAVEALVKQPPDRWLSNARMTHYQAMLLDTDRVQFGPVVALNPATLLPLPEEGAPHDCLEILAETHGTRPDLTDQPIPDADHTWYTDGSSFLQEGQRKAGAAVTTETEVIWAGALPAGTSAQRAELIALTQALKMAEGKRLNVYTDSRYAFATAHIHGEIYRRRGWLTSEGREIKNKSEILALLKALFLPKRLSIIHCLGHQKGDSAEARGNRLADQAAREAAIKTPPDTSTLLAGKRTADGSEFEKRTADGSEFESPKKKAKVE

SEQ ID NO: 2071 - protein, 2096 aa, synthetic construct
MPAAKRVKLDGGDKKYSIGLDIGTNSVGWAVITDEYKVPSKKFKVLGNTDRHSIKKNLIGALLFDSGETAEATRLKRTARRRYTRRKNRICYLQEIFSNEMAKVDDSFFHRLEESFLVEEDKKHERHPIFGNIVDEVAYHEKYPTIYHLRKKLVDSTDKADLRLIYLALAHMIKFRGHFLIEGDLNPDNSDVDKLFIQLVQTYNQLFEENPINASGVDAKAILSARLSKSRRLENLIAQLPGEKKNGLFGNLIALSLGLTPNFKSNFDLAEDAKLQLSKDTYDDDLDNLLAQIGDQYADLFLAAKNLSDAILLSDILRVNTEITKAPLSASMIKRYDEHHQDLTLLKALVRQQLPEKYKEIFFDQSKNGYAGYIDGGASQEEFYKFIKPILEKMDGTEELLVKLNREDLLRKQRTFDNGSIPHQIHLGELHAILRRQEDFYPFLKDNREKIEKILTFRIPYYVGPLARGNSRFAWMTRKSEETITPWNFEEVVDKGASAQSFIERMTNFDKNLPNEKVLPKHSLLYEYFTVYNELTKVKYVTEGMRKPAFLSGEQKKAIVDLLFKTNRKVTVKQLKEDYFKKIECFDSVEISGVEDRFNASLGTYHDLLKIIKDKDFLDNEENEDILEDIVLTLTLFEDREMIEERLKTYAHLFDDKVMKQLKRRRYTGWGRLSRKLINGIRDKQSGKTILDFLKSDGFANRNFMQLIHDDSLTFKEDIQKAQVSGQGDSLHEHIANLAGSPAIKKGILQTVKVVDELVKVMGRHKPENIVIEMARENQTTQKGQKNSRERMKRIEEGIKELGSQILKEHPVENTQLQNEKLYLYYLQNGRDMYVDQELDINRLSDYDVDHIVPQSFLKDDSIDNKVLTRSDKARGKSDNVPSEEVVKKMKNYWRQLLNAKLITQRKFDNLTKAERGGLSELDKAGFIKRQLVETRQITKHVAQILDSRMNTKYDENDKLIREVKVITLKSKLVSDFRKDFQFYKVREINNYHHAHDAYLNAVVGTALIKKYPKLESEFVYGDYKVYDVRKMIAKSEQEIGKATAKYFFYSNIMNFFKTEITLANGEIRKRPLIETNGETGEIVWDKGRDFATVRKVLSMPQVNIVKKTEVQTGGFSKESILPKRNSDKLIARKKDWDPKKYGGFDSPTVAYSVLVVAKVEKGKSKKLKSVKELLGITIMERSSFEKNPIDFLEAKGYKEVKKDLIIKLPKYSLFELENGRKRMLASAGELQKGNELALPSKYVNFLYLASHYEKLKGSPEDNEQKQLFVEQHKHYLDEIIEQISEFSKRVILADANLDKVLSAYNKHRDKPIREQAENIIHLFTLTNLGAPAAFKYFDTTIDRKRYTSTKEVLDATLIHQSITGLYETRIDLSQLGGDGGGGSEAAAKPAPGGTLGIEDEYRLHETSTEPDVSLGSTWLSDFPQAWAETGGMGLAVRQAPLIIPLKATSTPVSIQQYPMSHEARLGIKPHIQRLLDQGILVPCQSPWNTPLLPVKKPGTNDYRPVQDLREVNKRVEDIHPTVPNPYNLLSGLPPSHQWYTVLDLKDAFFCLRLHPTSQPLFAFEWRDPGMGISGQLTWTRLPQGFKNSPTLFNEALHRDLADFRIQHPDLILLQYVDDILLAATSELDCQQGTRALLQTLGDLGYRASAKKAQICQKQVKYLGYLLREGQRWLTEARKETVMGQPVPKTPRQLREFLGTAGFCRLWIPGFAEMAAPLYPLTKPGTLFSWGPDQQKAYQEIKQALLTAPALGLPDLTKPFELFVDEKQGYAKGVLTQKLGPWRRPVAYLSKKLDPVAAGWPPCLRMVAAIAVLTKDAGKLTMGQPLVILAPHAVEALVKQPPDRWLSNARMTHYQAMLLDTDRVQFGPVVALNPATLLPLPEEGAPHDCLEILAETHGTRPDLTDQPIPDADHTWYTDGSSFLQEGQRKAGAAVTTETEVIWAGALPAGTSAQRAELIALTQALKMAEGKRLNVYTDSRYAFATAHIHGEIYRRRGWLTSEGREIKNKSEILALLKALFLPKRLSIIHCLGHQKGDSAEARGNRLADQAAREAAIKTPPDTSTLLAGKRTADGSEFEKRTADGSEFESPKKKAKVE

SEQ ID NO: 2072 - protein, 2105 aa, synthetic construct
MPAAKRVKLDGGDKKYSIGLDIGTNSVGWAVITDEYKVPSKKFKVLGNTDRHSIKKNLIGALLFDSGETAEATRLKRTARRRYTRRKNRICYLQEIFSNEMAKVDDSFFHRLEESFLVEEDKKHERHPIFGNIVDEVAYHEKYPTIYHLRKKLVDSTDKADLRLIYLALAHMIKFRGHFLIEGDLNPDNSDVDKLFIQLVQTYNQLFEENPINASGVDAKAILSARLSKSRRLENLIAQLPGEKKNGLFGNLIALSLGLTPNFKSNFDLAEDAKLQLSKDTYDDDLDNLLAQIGDQYADLFLAAKNLSDAILLSDILRVNTEITKAPLSASMIKRYDEHHQDLTLLKALVRQQLPEKYKEIFFDQSKNGYAGYIDGGASQEEFYKFIKPILEKMDGTEELLVKLNREDLLRKQRTFDNGSIPHQIHLGELHAILRRQEDFYPFLKDNREKIEKILTFRIPYYVGPLARGNSRFAWMTRKSEETITPWNFEEVVDKGASAQSFIERMTNFDKNLPNEKVLPKHSLLYEYFTVYNELTKVKYVTEGMRKPAFLSGEQKKAIVDLLFKTNRKVTVKQLKEDYFKKIECFDSVEISGVEDRFNASLGTYHDLLKIIKDKDFLDNEENEDILEDIVLTLTLFEDREMIEERLKTYAHLFDDKVMKQLKRRRYTGWGRLSRKLINGIRDKQSGKTILDFLKSDGFANRNFMQLIHDDSLTFKEDIQKAQVSGQGDSLHEHIANLAGSPAIKKGILQTVKVVDELVKVMGRHKPENIVIEMARENQTTQKGQKNSRERMKRIEEGIKELGSQILKEHPVENTQLQNEKLYLYYLQNGRDMYVDQELDINRLSDYDVDHIVPQSFLKDDSIDNKVLTRSDKARGKSDNVPSEEVVKKMKNYWRQLLNAKLITQRKFDNLTKAERGGLSELDKAGFIKRQLVETRQITKHVAQILDSRMNTKYDENDKLIREVKVITLKSKLVSDFRKDFQFYKVREINNYHHAHDAYLNAVVGTALIKKYPKLESEFVYGDYKVYDVRKMIAKSEQEIGKATAKYFFYSNIMNFFKTEITLANGEIRKRPLIETNGETGEIVWDKGRDFATVRKVLSMPQVNIVKKTEVQTGGFSKESILPKRNSDKLIARKKDWDPKKYGGFDSPTVAYSVLVVAKVEKGKSKKLKSVKELLGITIMERSSFEKNPIDFLEAKGYKEVKKDLIIKLPKYSLFELENGRKRMLASAGELQKGNELALPSKYVNFLYLASHYEKLKGSPEDNEQKQLFVEQHKHYLDEIIEQISEFSKRVILADANLDKVLSAYNKHRDKPIREQAENIIHLFTLTNLGAPAAFKYFDTTIDRKRYTSTKEVLDATLIHQSITGLYETRIDLSQLGGDGGGGGGSGGGGSGGGGSGGGGSGGTLGIEDEYRLHETSTEPDVSLGSTWLSDFPQAWAETGGMGLAVRQAPLIIPLKATSTPVSIQQYPMSHEARLGIKPHIQRLLDQGILVPCQSPWNTPLLPVKKPGTNDYRPVQDLREVNKRVEDIHPTVPNPYNLLSGLPPSHQWYTVLDLKDAFFCLRLHPTSQPLFAFEWRDPGMGISGQLTWTRLPQGFKNSPTLFNEALHRDLADFRIQHPDLILLQYVDDILLAATSELDCQQGTRALLQTLGDLGYRASAKKAQICQKQVKYLGYLLREGQRWLTEARKETVMGQPVPKTPRQLREFLGTAGFCRLWIPGFAEMAAPLYPLTKPGTLFSWGPDQQKAYQEIKQALLTAPALGLPDLTKPFELFVDEKQGYAKGVLTQKLGPWRRPVAYLSKKLDPVAAGWPPCLRMVAAIAVLTKDAGKLTMGQPLVILAPHAVEALVKQPPDRWLSNARMTHYQAMLLDTDRVQFGPVVALNPATLLPLPEEGAPHDCLEILAETHGTRPDLTDQPIPDADHTWYTDGSSFLQEGQRKAGAAVTTETEVIWAGALPAGTSAQRAELIALTQALKMAEGKRLNVYTDSRYAFATAHIHGEIYRRRGWLTSEGREIKNKSEILALLKALFLPKRLSIIHCLGHQKGDSAEARGNRLADQAAREAAIKTPPDTSTLLAGKRTADGSEFEKRTADGSEFESPKKKAKVE

SEQ ID NO: 2073 - protein, 2093 aa, synthetic construct
MPAAKRVKLDGGDKKYSIGLDIGTNSVGWAVITDEYKVPSKKFKVLGNTDRHSIKKNLIGALLFDSGETAEATRLKRTARRRYTRRKNRICYLQEIFSNEMAKVDDSFFHRLEESFLVEEDKKHERHPIFGNIVDEVAYHEKYPTIYHLRKKLVDSTDKADLRLIYLALAHMIKFRGHFLIEGDLNPDNSDVDKLFIQLVQTYNQLFEENPINASGVDAKAILSARLSKSRRLENLIAQLPGEKKNGLFGNLIALSLGLTPNFKSNFDLAEDAKLQLSKDTYDDDLDNLLAQIGDQYADLFLAAKNLSDAILLSDILRVNTEITKAPLSASMIKRYDEHHQDLTLLKALVRQQLPEKYKEIFFDQSKNGYAGYIDGGASQEEFYKFIKPILEKMDGTEELLVKLNREDLLRKQRTFDNGSIPHQIHLGELHAILRRQEDFYPFLKDNREKIEKILTFRIPYYVGPLARGNSRFAWMTRKSEETITPWNFEEVVDKGASAQSFIERMTNFDKNLPNEKVLPKHSLLYEYFTVYNELTKVKYVTEGMRKPAFLSGEQKKAIVDLLFKTNRKVTVKQLKEDYFKKIECFDSVEISGVEDRFNASLGTYHDLLKIIKDKDFLDNEENEDILEDIVLTLTLFEDREMIEERLKTYAHLFDDKVMKQLKRRRYTGWGRLSRKLINGIRDKQSGKTILDFLKSDGFANRNFMQLIHDDSLTFKEDIQKAQVSGQGDSLHEHIANLAGSPAIKKGILQTVKVVDELVKVMGRHKPENIVIEMARENQTTQKGQKNSRERMKRIEEGIKELGSQILKEHPVENTQLQNEKLYLYYLQNGRDMYVDQELDINRLSDYDVDHIVPQSFLKDDSIDNKVLTRSDKARGKSDNVPSEEVVKKMKNYWRQLLNAKLITQRKFDNLTKAERGGLSELDKAGFIKRQLVETRQITKHVAQILDSRMNTKYDENDKLIREVKVITLKSKLVSDFRKDFQFYKVREINNYHHAHDAYLNAVVGTALIKKYPKLESEFVYGDYKVYDVRKMIAKSEQEIGKATAKYFFYSNIMNFFKTEITLANGEIRKRPLIETNGETGEIVWDKGRDFATVRKVLSMPQVNIVKKTEVQTGGFSKESILPKRNSDKLIARKKDWDPKKYGGFDSPTVAYSVLVVAKVEKGKSKKLKSVKELLGITIMERSSFEKNPIDFLEAKGYKEVKKDLIIKLPKYSLFELENGRKRMLASAGELQKGNELALPSKYVNFLYLASHYEKLKGSPEDNEQKQLFVEQHKHYLDEIIEQISEFSKRVILADANLDKVLSAYNKHRDKPIREQAENIIHLFTLTNLGAPAAFKYFDTTIDRKRYTSTKEVLDATLIHQSITGLYETRIDLSQLGGDGGGSSEAAAKGGTLGIEDEYRLHETSTEPDVSLGSTWLSDFPQAWAETGGMGLAVRQAPLIIPLKATSTPVSIQQYPMSHEARLGIKPHIQRLLDQGILVPCQSPWNTPLLPVKKPGTNDYRPVQDLREVNKRVEDIHPTVPNPYNLLSGLPPSHQWYTVLDLKDAFFCLRLHPTSQPLFAFEWRDPGMGISGQLTWTRLPQGFKNSPTLFNEALHRDLADFRIQHPDLILLQYVDDILLAATSELDCQQGTRALLQTLGDLGYRASAKKAQICQKQVKYLGYLLREGQRWLTEARKETVMGQPVPKTPRQLREFLGTAGFCRLWIPGFAEMAAPLYPLTKPGTLFSWGPDQQKAYQEIKQALLTAPALGLPDLTKPFELFVDEKQGYAKGVLTQKLGPWRRPVAYLSKKLDPVAAGWPPCLRMVAAIAVLTKDAGKLTMGQPLVILAPHAVEALVKQPPDRWLSNARMTHYQAMLLDTDRVQFGPVVALNPATLLPLPEEGAPHDCLEILAETHGTRPDLTDQPIPDADHTWYTDGSSFLQEGQRKAGAAVTTETEVIWAGALPAGTSAQRAELIALTQALKMAEGKRLNVYTDSRYAFATAHIHGEIYRRRGWLTSEGREIKNKSEILALLKALFLPKRLSIIHCLGHQKGDSAEARGNRLADQAAREAAIKTPPDTSTLLAGKRTADGSEFEKRTADGSEFESPKKKAKVE

SEQ ID NO: 2074 - protein, 2096 aa, synthetic construct
MPAAKRVKLDGGDKKYSIGLDIGTNSVGWAVITDEYKVPSKKFKVLGNTDRHSIKKNLIGALLFDSGETAEATRLKRTARRRYTRRKNRICYLQEIFSNEMAKVDDSFFHRLEESFLVEEDKKHERHPIFGNIVDEVAYHEKYPTIYHLRKKLVDSTDKADLRLIYLALAHMIKFRGHFLIEGDLNPDNSDVDKLFIQLVQTYNQLFEENPINASGVDAKAILSARLSKSRRLENLIAQLPGEKKNGLFGNLIALSLGLTPNFKSNFDLAEDAKLQLSKDTYDDDLDNLLAQIGDQYADLFLAAKNLSDAILLSDILRVNTEITKAPLSASMIKRYDEHHQDLTLLKALVRQQLPEKYKEIFFDQSKNGYAGYIDGGASQEEFYKFIKPILEKMDGTEELLVKLNREDLLRKQRTFDNGSIPHQIHLGELHAILRRQEDFYPFLKDNREKIEKILTFRIPYYVGPLARGNSRFAWMTRKSEETITPWNFEEVVDKGASAQSFIERMTNFDKNLPNEKVLPKHSLLYEYFTVYNELTKVKYVTEGMRKPAFLSGEQKKAIVDLLFKTNRKVTVKQLKEDYFKKIECFDSVEISGVEDRFNASLGTYHDLLKIIKDKDFLDNEENEDILEDIVLTLTLFEDREMIEERLKTYAHLFDDKVMKQLKRRRYTGWGRLSRKLINGIRDKQSGKTILDFLKSDGFANRNFMQLIHDDSLTFKEDIQKAQVSGQGDSLHEHIANLAGSPAIKKGILQTVKVVDELVKVMGRHKPENIVIEMARENQTTQKGQKNSRERMKRIEEGIKELGSQILKEHPVENTQLQNEKLYLYYLQNGRDMYVDQELDINRLSDYDVDHIVPQSFLKDDSIDNKVLTRSDKARGKSDNVPSEEVVKKMKNYWRQLLNAKLITQRKFDNLTKAERGGLSELDKAGFIKRQLVETRQITKHVAQILDSRMNTKYDENDKLIREVKVITLKSKLVSDFRKDFQFYKVREINNYHHAHDAYLNAVVGTALIKKYPKLESEFVYGDYKVYDVRKMIAKSEQEIGKATAKYFFYSNIMNFFKTEITLANGEIRKRPLIETNGETGEIVWDKGRDFATVRKVLSMPQVNIVKKTEVQTGGFSKESILPKRNSDKLIARKKDWDPKKYGGFDSPTVAYSVLVVAKVEKGKSKKLKSVKELLGITIMERSSFEKNPIDFLEAKGYKEVKKDLIIKLPKYSLFELENGRKRMLASAGELQKGNELALPSKYVNFLYLASHYEKLKGSPEDNEQKQLFVEQHKHYLDEIIEQISEFSKRVILADANLDKVLSAYNKHRDKPIREQAENIIHLFTLTNLGAPAAFKYFDTTIDRKRYTSTKEVLDATLIHQSITGLYETRIDLSQLGGDGGGGSEAAAKGGGGGTLGIEDEYRLHETSTEPDVSLGSTWLSDFPQAWAETGGMGLAVRQAPLIIPLKATSTPVSIQQYPMSHEARLGIKPHIQRLLDQGILVPCQSPWNTPLLPVKKPGTNDYRPVQDLREVNKRVEDIHPTVPNPYNLLSGLPPSHQWYTVLDLKDAFFCLRLHPTSQPLFAFEWRDPGMGISGQLTWTRLPQGFKNSPTLFNEALHRDLADFRIQHPDLILLQYVDDILLAATSELDCQQGTRALLQTLGDLGYRASAKKAQICQKQVKYLGYLLREGQRWLTEARKETVMGQPVPKTPRQLREFLGTAGFCRLWIPGFAEMAAPLYPLTKPGTLFSWGPDQQKAYQEIKQALLTAPALGLPDLTKPFELFVDEKQGYAKGVLTQKLGPWRRPVAYLSKKLDPVAAGWPPCLRMVAAIAVLTKDAGKLTMGQPLVILAPHAVEALVKQPPDRWLSNARMTHYQAMLLDTDRVQFGPVVALNPATLLPLPEEGAPHDCLEILAETHGTRPDLTDQPIPDADHTWYTDGSSFLQEGQRKAGAAVTTETEVIWAGALPAGTSAQRAELIALTQALKMAEGKRLNVYTDSRYAFATAHIHGEIYRRRGWLTSEGREIKNKSEILALLKALFLPKRLSIIHCLGHQKGDSAEARGNRLADQAAREAAIKTPPDTSTLLAGKRTADGSEFEKRTADGSEFESPKKKAKVE

SEQ ID NO: 2075 - protein, 2096 aa, synthetic construct
MPAAKRVKLDGGDKKYSIGLDIGTNSVGWAVITDEYKVPSKKFKVLGNTDRHSIKKNLIGALLFDSGETAEATRLKRTARRRYTRRKNRICYLQEIFSNEMAKVDDSFFHRLEESFLVEEDKKHERHPIFGNIVDEVAYHEKYPTIYHLRKKLVDSTDKADLRLIYLALAHMIKFRGHFLIEGDLNPDNSDVDKLFIQLVQTYNQLFEENPINASGVDAKAILSARLSKSRRLENLIAQLPGEKKNGLFGNLIALSLGLTPNFKSNFDLAEDAKLQLSKDTYDDDLDNLLAQIGDQYADLFLAAKNLSDAILLSDILRVNTEITKAPLSASMIKRYDEHHQDLTLLKALVRQQLPEKYKEIFFDQSKNGYAGYIDGGASQEEFYKFIKPILEKMDGTEELLVKLNREDLLRKQRTFDNGSIPHQIHLGELHAILRRQEDFYPFLKDNREKIEKILTFRIPYYVGPLARGNSRFAWMTRKSEETITPWNFEEVVDKGASAQSFIERMTNFDKNLPNEKVLPKHSLLYEYFTVYNELTKVKYVTEGMRKPAFLSGEQKKAIVDLLFKTNRKVTVKQLKEDYFKKIECFDSVEISGVEDRFNASLGTYHDLLKIIKDKDFLDNEENEDILEDIVLTLTLFEDREMIEERLKTYAHLFDDKVMKQLKRRRYTGWGRLSRKLINGIRDKQSGKTILDFLKSDGFANRNFMQLIHDDSLTFKEDIQKAQVSGQGDSLHEHIANLAGSPAIKKGILQTVKVVDELVKVMGRHKPENIVIEMARENQTTQKGQKNSRERMKRIEEGIKELGSQILKEHPVENTQLQNEKLYLYYLQNGRDMYVDQELDINRLSDYDVDHIVPQSFLKDDSIDNKVLTRSDKARGKSDNVPSEEVVKKMKNYWRQLLNAKLITQRKFDNLTKAERGGLSELDKAGFIKRQLVETRQITKHVAQILDSRMNTKYDENDKLIREVKVITLKSKLVSDFRKDFQFYKVREINNYHHAHDAYLNAVVGTALIKKYPKLESEFVYGDYKVYDVRKMIAKSEQEIGKATAKYFFYSNIMNFFKTEITLANGEIRKRPLIETNGETGEIVWDKGRDFATVRKVLSMPQVNIVKKTEVQTGGFSKESILPKRNSDKLIARKKDWDPKKYGGFDSPTVAYSVLVVAKVEKGKSKKLKSVKELLGITIMERSSFEKNPIDFLEAKGYKEVKKDLIIKLPKYSLFELENGRKRMLASAGELQKGNELALPSKYVNFLYLASHYEKLKGSPEDNEQKQLFVEQHKHYLDEIIEQISEFSKRVILADANLDKVLSAYNKHRDKPIREQAENIIHLFTLTNLGAPAAFKYFDTTIDRKRYTSTKEVLDATLIHQSITGLYETRIDLSQLGGDGGGSSEAAAKGGGGGTLGIEDEYRLHETSTEPDVSLGSTWLSDFPQAWAETGGMGLAVRQAPLIIPLKATSTPVSIQQYPMSHEARLGIKPHIQRLLDQGILVPCQSPWNTPLLPVKKPGTNDYRPVQDLREVNKRVEDIHPTVPNPYNLLSGLPPSHQWYTVLDLKDAFFCLRLHPTSQPLFAFEWRDPGMGISGQLTWTRLPQGFKNSPTLFNEALHRDLADFRIQHPDLILLQYVDDILLAATSELDCQQGTRALLQTLGDLGYRASAKKAQICQKQVKYLGYLLREGQRWLTEARKETVMGQPVPKTPRQLREFLGTAGFCRLWIPGFAEMAAPLYPLTKPGTLFSWGPDQQKAYQEIKQALLTAPALGLPDLTKPFELFVDEKQGYAKGVLTQKLGPWRRPVAYLSKKLDPVAAGWPPCLRMVAAIAVLTKDAGKLTMGQPLVILAPHAVEALVKQPPDRWLSNARMTHYQAMLLDTDRVQFGPVVALNPATLLPLPEEGAPHDCLEILAETHGTRPDLTDQPIPDADHTWYTDGSSFLQEGQRKAGAAVTTETEVIWAGALPAGTSAQRAELIALTQALKMAEGKRLNVYTDSRYAFATAHIHGEIYRRRGWLTSEGREIKNKSEILALLKALFLPKRLSIIHCLGHQKGDSAEARGNRLADQAAREAAIKTPPDTSTLLAGKRTADGSEFEKRTADGSEFESPKKKAKVE

SEQ ID NO: 2076 - protein, 2096 aa, synthetic construct
MPAAKRVKLDGGDKKYSIGLDIGTNSVGWAVITDEYKVPSKKFKVLGNTDRHSIKKNLIGALLFDSGETAEATRLKRTARRRYTRRKNRICYLQEIFSNEMAKVDDSFFHRLEESFLVEEDKKHERHPIFGNIVDEVAYHEKYPTIYHLRKKLVDSTDKADLRLIYLALAHMIKFRGHFLIEGDLNPDNSDVDKLFIQLVQTYNQLFEENPINASGVDAKAILSARLSKSRRLENLIAQLPGEKKNGLFGNLIALSLGLTPNFKSNFDLAEDAKLQLSKDTYDDDLDNLLAQIGDQYADLFLAAKNLSDAILLSDILRVNTEITKAPLSASMIKRYDEHHQDLTLLKALVRQQLPEKYKEIFFDQSKNGYAGYIDGGASQEEFYKFIKPILEKMDGTEELLVKLNREDLLRKQRTFDNGSIPHQIHLGELHAILRRQEDFYPFLKDNREKIEKILTFRIPYYVGPLARGNSRFAWMTRKSEETITPWNFEEVVDKGASAQSFIERMTNFDKNLPNEKVLPKHSLLYEYFTVYNELTKVKYVTEGMRKPAFLSGEQKKAIVDLLFKTNRKVTVKQLKEDYFKKIECFDSVEISGVEDRFNASLGTYHDLLKIIKDKDFLDNEENEDILEDIVLTLTLFEDREMIEERLKTYAHLFDDKVMKQLKRRRYTGWGRLSRKLINGIRDKQSGKTILDFLKSDGFANRNFMQLIHDDSLTFKEDIQKAQVSGQGDSLHEHIANLAGSPAIKKGILQTVKVVDELVKVMGRHKPENIVIEMARENQTTQKGQKNSRERMKRIEEGIKELGSQILKEHPVENTQLQNEKLYLYYLQNGRDMYVDQELDINRLSDYDVDHIVPQSFLKDDSIDNKVLTRSDKARGKSDNVPSEEVVKKMKNYWRQLLNAKLITQRKFDNLTKAERGGLSELDKAGFIKRQLVETRQITKHVAQILDSRMNTKYDENDKLIREVKVITLKSKLVSDFRKDFQFYKVREINNYHHAHDAYLNAVVGTALIKKYPKLESEFVYGDYKVYDVRKMIAKSEQEIGKATAKYFFYSNIMNFFKTEITLANGEIRKRPLIETNGETGEIVWDKGRDFATVRKVLSMPQVNIVKKTEVQTGGFSKESILPKRNSDKLIARKKDWDPKKYGGFDSPTVAYSVLVVAKVEKGKSKKLKSVKELLGITIMERSSFEKNPIDFLEAKGYKEVKKDLIIKLPKYSLFELENGRKRMLASAGELQKGNELALPSKYVNFLYLASHYEKLKGSPEDNEQKQLFVEQHKHYLDEIIEQISEFSKRVILADANLDKVLSAYNKHRDKPIREQAENIIHLFTLTNLGAPAAFKYFDTTIDRKRYTSTKEVLDATLIHQSITGLYETRIDLSQLGGDGGGSSGGSEAAAKGGTLGIEDEYRLHETSTEPDVSLGSTWLSDFPQAWAETGGMGLAVRQAPLIIPLKATSTPVSIQQYPMSHEARLGIKPHIQRLLDQGILVPCQSPWNTPLLPVKKPGTNDYRPVQDLREVNKRVEDIHPTVPNPYNLLSGLPPSHQWYTVLDLKDAFFCLRLHPTSQPLFAFEWRDPGMGISGQLTWTRLPQGFKNSPTLFNEALHRDLADFRIQHPDLILLQYVDDILLAATSELDCQQGTRALLQTLGDLGYRASAKKAQICQKQVKYLGYLLREGQRWLTEARKETVMGQPVPKTPRQLREFLGTAGFCRLWIPGFAEMAAPLYPLTKPGTLFSWGPDQQKAYQEIKQALLTAPALGLPDLTKPFELFVDEKQGYAKGVLTQKLGPWRRPVAYLSKKLDPVAAGWPPCLRMVAAIAVLTKDAGKLTMGQPLVILAPHAVEALVKQPPDRWLSNARMTHYQAMLLDTDRVQFGPVVALNPATLLPLPEEGAPHDCLEILAETHGTRPDLTDQPIPDADHTWYTDGSSFLQEGQRKAGAAVTTETEVIWAGALPAGTSAQRAELIALTQALKMAEGKRLNVYTDSRYAFATAHIHGEIYRRRGWLTSEGREIKNKSEILALLKALFLPKRLSIIHCLGHQKGDSAEARGNRLADQAAREAAIKTPPDTSTLLAGKRTADGSEFEKRTADGSEFESPKKKAKVE

SEQ ID NO: 2077 - protein, 2090 aa, synthetic construct
MPAAKRVKLDGGDKKYSIGLDIGTNSVGWAVITDEYKVPSKKFKVLGNTDRHSIKKNLIGALLFDSGETAEATRLKRTARRRYTRRKNRICYLQEIFSNEMAKVDDSFFHRLEESFLVEEDKKHERHPIFGNIVDEVAYHEKYPTIYHLRKKLVDSTDKADLRLIYLALAHMIKFRGHFLIEGDLNPDNSDVDKLFIQLVQTYNQLFEENPINASGVDAKAILSARLSKSRRLENLIAQLPGEKKNGLFGNLIALSLGLTPNFKSNFDLAEDAKLQLSKDTYDDDLDNLLAQIGDQYADLFLAAKNLSDAILLSDILRVNTEITKAPLSASMIKRYDEHHQDLTLLKALVRQQLPEKYKEIFFDQSKNGYAGYIDGGASQEEFYKFIKPILEKMDGTEELLVKLNREDLLRKQRTFDNGSIPHQIHLGELHAILRRQEDFYPFLKDNREKIEKILTFRIPYYVGPLARGNSRFAWMTRKSEETITPWNFEEVVDKGASAQSFIERMTNFDKNLPNEKVLPKHSLLYEYFTVYNELTKVKYVTEGMRKPAFLSGEQKKAIVDLLFKTNRKVTVKQLKEDYFKKIECFDSVEISGVEDRFNASLGTYHDLLKIIKDKDFLDNEENEDILEDIVLTLTLFEDREMIEERLKTYAHLFDDKVMKQLKRRRYTGWGRLSRKLINGIRDKQSGKTILDFLKSDGFANRNFMQLIHDDSLTFKEDIQKAQVSGQGDSLHEHIANLAGSPAIKKGILQTVKVVDELVKVMGRHKPENIVIEMARENQTTQKGQKNSRERMKRIEEGIKELGSQILKEHPVENTQLQNEKLYLYYLQNGRDMYVDQELDINRLSDYDVDHIVPQSFLKDDSIDNKVLTRSDKARGKSDNVPSEEVVKKMKNYWRQLLNAKLITQRKFDNLTKAERGGLSELDKAGFIKRQLVETRQITKHVAQILDSRMNTKYDENDKLIREVKVITLKSKLVSDFRKDFQFYKVREINNYHHAHDAYLNAVVGTALIKKYPKLESEFVYGDYKVYDVRKMIAKSEQEIGKATAKYFFYSNIMNFFKTEITLANGEIRKRPLIETNGETGEIVWDKGRDFATVRKVLSMPQVNIVKKTEVQTGGFSKESILPKRNSDKLIARKKDWDPKKYGGFDSPTVAYSVLVVAKVEKGKSKKLKSVKELLGITIMERSSFEKNPIDFLEAKGYKEVKKDLIIKLPKYSLFELENGRKRMLASAGELQKGNELALPSKYVNFLYLASHYEKLKGSPEDNEQKQLFVEQHKHYLDEIIEQISEFSKRVILADANLDKVLSAYNKHRDKPIREQAENIIHLFTLTNLGAPAAFKYFDTTIDRKRYTSTKEVLDATLIHQSITGLYETRIDLSQLGGDGGPAPAPGGTLGIEDEYRLHETSTEPDVSLGSTWLSDFPQAWAETGGMGLAVRQAPLIIPLKATSTPVSIQQYPMSHEARLGIKPHIQRLLDQGILVPCQSPWNTPLLPVKKPGTNDYRPVQDLREVNKRVEDIHPTVPNPYNLLSGLPPSHQWYTVLDLKDAFFCLRLHPTSQPLFAFEWRDPGMGISGQLTWTRLPQGFKNSPTLFNEALHRDLADFRIQHPDLILLQYVDDILLAATSELDCQQGTRALLQTLGDLGYRASAKKAQICQKQVKYLGYLLREGQRWLTEARKETVMGQPVPKTPRQLREFLGTAGFCRLWIPGFAEMAAPLYPLTKPGTLFSWGPDQQKAYQEIKQALLTAPALGLPDLTKPFELFVDEKQGYAKGVLTQKLGPWRRPVAYLSKKLDPVAAGWPPCLRMVAAIAVLTKDAGKLTMGQPLVILAPHAVEALVKQPPDRWLSNARMTHYQAMLLDTDRVQFGPVVALNPATLLPLPEEGAPHDCLEILAETHGTRPDLTDQPIPDADHTWYTDGSSFLQEGQRKAGAAVTTETEVIWAGALPAGTSAQRAELIALTQALKMAEGKRLNVYTDSRYAFATAHIHGEIYRRRGWLTSEGREIKNKSEILALLKALFLPKRLSIIHCLGHQKGDSAEARGNRLADQAAREAAIKTPPDTSTLLAGKRTADGSEFEKRTADGSEFESPKKKAKVE

SEQ ID NO: 2078 - protein, 2091 aa, synthetic construct
MPAAKRVKLDGGDKKYSIGLDIGTNSVGWAVITDEYKVPSKKFKVLGNTDRHSIKKNLIGALLFDSGETAEATRLKRTARRRYTRRKNRICYLQEIFSNEMAKVDDSFFHRLEESFLVEEDKKHERHPIFGNIVDEVAYHEKYPTIYHLRKKLVDSTDKADLRLIYLALAHMIKFRGHFLIEGDLNPDNSDVDKLFIQLVQTYNQLFEENPINASGVDAKAILSARLSKSRRLENLIAQLPGEKKNGLFGNLIALSLGLTPNFKSNFDLAEDAKLQLSKDTYDDDLDNLLAQIGDQYADLFLAAKNLSDAILLSDILRVNTEITKAPLSASMIKRYDEHHQDLTLLKALVRQQLPEKYKEIFFDQSKNGYAGYIDGGASQEEFYKFIKPILEKMDGTEELLVKLNREDLLRKQRTFDNGSIPHQIHLGELHAILRRQEDFYPFLKDNREKIEKILTFRIPYYVGPLARGNSRFAWMTRKSEETITPWNFEEVVDKGASAQSFIERMTNFDKNLPNEKVLPKHSLLYEYFTVYNELTKVKYVTEGMRKPAFLSGEQKKAIVDLLFKTNRKVTVKQLKEDYFKKIECFDSVEISGVEDRFNASLGTYHDLLKIIKDKDFLDNEENEDILEDIVLTLTLFEDREMIEERLKTYAHLFDDKVMKQLKRRRYTGWGRLSRKLINGIRDKQSGKTILDFLKSDGFANRNFMQLIHDDSLTFKEDIQKAQVSGQGDSLHEHIANLAGSPAIKKGILQTVKVVDELVKVMGRHKPENIVIEMARENQTTQKGQKNSRERMKRIEEGIKELGSQILKEHPVENTQLQNEKLYLYYLQNGRDMYVDQELDINRLSDYDVDHIVPQSFLKDDSIDNKVLTRSDKARGKSDNVPSEEVVKKMKNYWRQLLNAKLITQRKFDNLTKAERGGLSELDKAGFIKRQLVETRQITKHVAQILDSRMNTKYDENDKLIREVKVITLKSKLVSDFRKDFQFYKVREINNYHHAHDAYLNAVVGTALIKKYPKLESEFVYGDYKVYDVRKMIAKSEQEIGKATAKYFFYSNIMNFFKTEITLANGEIRKRPLIETNGETGEIVWDKGRDFATVRKVLSMPQVNIVKKTEVQTGGFSKESILPKRNSDKLIARKKDWDPKKYGGFDSPTVAYSVLVVAKVEKGKSKKLKSVKELLGITIMERSSFEKNPIDFLEAKGYKEVKKDLIIKLPKYSLFELENGRKRMLASAGELQKGNELALPSKYVNFLYLASHYEKLKGSPEDNEQKQLFVEQHKHYLDEIIEQISEFSKRVILADANLDKVLSAYNKHRDKPIREQAENIIHLFTLTNLGAPAAFKYFDTTIDRKRYTSTKEVLDATLIHQSITGLYETRIDLSQLGGDGGPAPGGSGGTLGIEDEYRLHETSTEPDVSLGSTWLSDFPQAWAETGGMGLAVRQAPLIIPLKATSTPVSIQQYPMSHEARLGIKPHIQRLLDQGILVPCQSPWNTPLLPVKKPGTNDYRPVQDLREVNKRVEDIHPTVPNPYNLLSGLPPSHQWYTVLDLKDAFFCLRLHPTSQPLFAFEWRDPGMGISGQLTWTRLPQGFKNSPTLFNEALHRDLADFRIQHPDLILLQYVDDILLAATSELDCQQGTRALLQTLGDLGYRASAKKAQICQKQVKYLGYLLREGQRWLTEARKETVMGQPVPKTPRQLREFLGTAGFCRLWIPGFAEMAAPLYPLTKPGTLFSWGPDQQKAYQEIKQALLTAPALGLPDLTKPFELFVDEKQGYAKGVLTQKLGPWRRPVAYLSKKLDPVAAGWPPCLRMVAAIAVLTKDAGKLTMGQPLVILAPHAVEALVKQPPDRWLSNARMTHYQAMLLDTDRVQFGPVVALNPATLLPLPEEGAPHDCLEILAETHGTRPDLTDQPIPDADHTWYTDGSSFLQEGQRKAGAAVTTETEVIWAGALPAGTSAQRAELIALTQALKMAEGKRLNVYTDSRYAFATAHIHGEIYRRRGWLTSEGREIKNKSEILALLKALFLPKRLSIIHCLGHQKGDSAEARGNRLADQAAREAAIKTPPDTSTLLAGKRTADGSEFEKRTADGSEFESPKKKAKVE

SEQ ID NO: 2079 - protein, 2094 aa, synthetic construct
MPAAKRVKLDGGDKKYSIGLDIGTNSVGWAVITDEYKVPSKKFKVLGNTDRHSIKKNLIGALLFDSGETAEATRLKRTARRRYTRRKNRICYLQEIFSNEMAKVDDSFFHRLEESFLVEEDKKHERHPIFGNIVDEVAYHEKYPTIYHLRKKLVDSTDKADLRLIYLALAHMIKFRGHFLIEGDLNPDNSDVDKLFIQLVQTYNQLFEENPINASGVDAKAILSARLSKSRRLENLIAQLPGEKKNGLFGNLIALSLGLTPNFKSNFDLAEDAKLQLSKDTYDDDLDNLLAQIGDQYADLFLAAKNLSDAILLSDILRVNTEITKAPLSASMIKRYDEHHQDLTLLKALVRQQLPEKYKEIFFDQSKNGYAGYIDGGASQEEFYKFIKPILEKMDGTEELLVKLNREDLLRKQRTFDNGSIPHQIHLGELHAILRRQEDFYPFLKDNREKIEKILTFRIPYYVGPLARGNSRFAWMTRKSEETITPWNFEEVVDKGASAQSFIERMTNFDKNLPNEKVLPKHSLLYEYFTVYNELTKVKYVTEGMRKPAFLSGEQKKAIVDLLFKTNRKVTVKQLKEDYFKKIECFDSVEISGVEDRFNASLGTYHDLLKIIKDKDFLDNEENEDILEDIVLTLTLFEDREMIEERLKTYAHLFDDKVMKQLKRRRYTGWGRLSRKLINGIRDKQSGKTILDFLKSDGFANRNFMQLIHDDSLTFKEDIQKAQVSGQGDSLHEHIANLAGSPAIKKGILQTVKVVDELVKVMGRHKPENIVIEMARENQTTQKGQKNSRERMKRIEEGIKELGSQILKEHPVENTQLQNEKLYLYYLQNGRDMYVDQELDINRLSDYDVDHIVPQSFLKDDSIDNKVLTRSDKARGKSDNVPSEEVVKKMKNYWRQLLNAKLITQRKFDNLTKAERGGLSELDKAGFIKRQLVETRQITKHVAQILDSRMNTKYDENDKLIREVKVITLKSKLVSDFRKDFQFYKVREINNYHHAHDAYLNAVVGTALIKKYPKLESEFVYGDYKVYDVRKMIAKSEQEIGKATAKYFFYSNIMNFFKTEITLANGEIRKRPLIETNGETGEIVWDKGRDFATVRKVLSMPQVNIVKKTEVQTGGFSKESILPKRNSDKLIARKKDWDPKKYGGFDSPTVAYSVLVVAKVEKGKSKKLKSVKELLGITIMERSSFEKNPIDFLEAKGYKEVKKDLIIKLPKYSLFELENGRKRMLASAGELQKGNELALPSKYVNFLYLASHYEKLKGSPEDNEQKQLFVEQHKHYLDEIIEQISEFSKRVILADANLDKVLSAYNKHRDKPIREQAENIIHLFTLTNLGAPAAFKYFDTTIDRKRYTSTKEVLDATLIHQSITGLYETRIDLSQLGGDGGPAPGSSGGGGGTLGIEDEYRLHETSTEPDVSLGSTWLSDFPQAWAETGGMGLAVRQAPLIIPLKATSTPVSIQQYPMSHEARLGIKPHIQRLLDQGILVPCQSPWNTPLLPVKKPGTNDYRPVQDLREVNKRVEDIHPTVPNPYNLLSGLPPSHQWYTVLDLKDAFFCLRLHPTSQPLFAFEWRDPGMGISGQLTWTRLPQGFKNSPTLFNEALHRDLADFRIQHPDLILLQYVDDILLAATSELDCQQGTRALLQTLGDLGYRASAKKAQICQKQVKYLGYLLREGQRWLTEARKETVMGQPVPKTPRQLREFLGTAGFCRLWIPGFAEMAAPLYPLTKPGTLFSWGPDQQKAYQEIKQALLTAPALGLPDLTKPFELFVDEKQGYAKGVLTQKLGPWRRPVAYLSKKLDPVAAGWPPCLRMVAAIAVLTKDAGKLTMGQPLVILAPHAVEALVKQPPDRWLSNARMTHYQAMLLDTDRVQFGPVVALNPATLLPLPEEGAPHDCLEILAETHGTRPDLTDQPIPDADHTWYTDGSSFLQEGQRKAGAAVTTETEVIWAGALPAGTSAQRAELIALTQALKMAEGKRLNVYTDSRYAFATAHIHGEIYRRRGWLTSEGREIKNKSEILALLKALFLPKRLSIIHCLGHQKGDSAEARGNRLADQAAREAAIKTPPDTSTLLAGKRTADGSEFEKRTADGSEFESPKKKAKVE

SEQ ID NO: 2080 - protein, 2094 aa, synthetic construct
MPAAKRVKLDGGDKKYSIGLDIGTNSVGWAVITDEYKVPSKKFKVLGNTDRHSIKKNLIGALLFDSGETAEATRLKRTARRRYTRRKNRICYLQEIFSNEMAKVDDSFFHRLEESFLVEEDKKHERHPIFGNIVDEVAYHEKYPTIYHLRKKLVDSTDKADLRLIYLALAHMIKFRGHFLIEGDLNPDNSDVDKLFIQLVQTYNQLFEENPINASGVDAKAILSARLSKSRRLENLIAQLPGEKKNGLFGNLIALSLGLTPNFKSNFDLAEDAKLQLSKDTYDDDLDNLLAQIGDQYADLFLAAKNLSDAILLSDILRVNTEITKAPLSASMIKRYDEHHQDLTLLKALVRQQLPEKYKEIFFDQSKNGYAGYIDGGASQEEFYKFIKPILEKMDGTEELLVKLNREDLLRKQRTFDNGSIPHQIHLGELHAILRRQEDFYPFLKDNREKIEKILTFRIPYYVGPLARGNSRFAWMTRKSEETITPWNFEEVVDKGASAQSFIERMTNFDKNLPNEKVLPKHSLLYEYFTVYNELTKVKYVTEGMRKPAFLSGEQKKAIVDLLFKTNRKVTVKQLKEDYFKKIECFDSVEISGVEDRFNASLGTYHDLLKIIKDKDFLDNEENEDILEDIVLTLTLFEDREMIEERLKTYAHLFDDKVMKQLKRRRYTGWGRLSRKLINGIRDKQSGKTILDFLKSDGFANRNFMQLIHDDSLTFKEDIQKAQVSGQGDSLHEHIANLAGSPAIKKGILQTVKVVDELVKVMGRHKPENIVIEMARENQTTQKGQKNSRERMKRIEEGIKELGSQILKEHPVENTQLQNEKLYLYYLQNGRDMYVDQELDINRLSDYDVDHIVPQSFLKDDSIDNKVLTRSDKARGKSDNVPSEEVVKKMKNYWRQLLNAKLITQRKFDNLTKAERGGLSELDKAGFIKRQLVETRQITKHVAQILDSRMNTKYDENDKLIREVKVITLKSKLVSDFRKDFQFYKVREINNYHHAHDAYLNAVVGTALIKKYPKLESEFVYGDYKVYDVRKMIAKSEQEIGKATAKYFFYSNIMNFFKTEITLANGEIRKRPLIETNGETGEIVWDKGRDFATVRKVLSMPQVNIVKKTEVQTGGFSKESILPKRNSDKLIARKKDWDPKKYGGFDSPTVAYSVLVVAKVEKGKSKKLKSVKELLGITIMERSSFEKNPIDFLEAKGYKEVKKDLIIKLPKYSLFELENGRKRMLASAGELQKGNELALPSKYVNFLYLASHYEKLKGSPEDNEQKQLFVEQHKHYLDEIIEQISEFSKRVILADANLDKVLSAYNKHRDKPIREQAENIIHLFTLTNLGAPAAFKYFDTTIDRKRYTSTKEVLDATLIHQSITGLYETRIDLSQLGGDGGGSSPAPGGSGGTLGIEDEYRLHETSTEPDVSLGSTWLSDFPQAWAETGGMGLAVRQAPLIIPLKATSTPVSIQQYPMSHEARLGIKPHIQRLLDQGILVPCQSPWNTPLLPVKKPGTNDYRPVQDLREVNKRVEDIHPTVPNPYNLLSGLPPSHQWYTVLDLKDAFFCLRLHPTSQPLFAFEWRDPGMGISGQLTWTRLPQGFKNSPTLFNEALHRDLADFRIQHPDLILLQYVDDILLAATSELDCQQGTRALLQTLGDLGYRASAKKAQICQKQVKYLGYLLREGQRWLTEARKETVMGQPVPKTPRQLREFLGTAGFCRLWIPGFAEMAAPLYPLTKPGTLFSWGPDQQKAYQEIKQALLTAPALGLPDLTKPFELFVDEKQGYAKGVLTQKLGPWRRPVAYLSKKLDPVAAGWPPCLRMVAAIAVLTKDAGKLTMGQPLVILAPHAVEALVKQPPDRWLSNARMTHYQAMLLDTDRVQFGPVVALNPATLLPLPEEGAPHDCLEILAETHGTRPDLTDQPIPDADHTWYTDGSSFLQEGQRKAGAAVTTETEVIWAGALPAGTSAQRAELIALTQALKMAEGKRLNVYTDSRYAFATAHIHGEIYRRRGWLTSEGREIKNKSEILALLKALFLPKRLSIIHCLGHQKGDSAEARGNRLADQAAREAAIKTPPDTSTLLAGKRTADGSEFEKRTADGSEFESPKKKAKVE

SEQ ID NO: 2081 - protein, 2093 aa, synthetic construct
MPAAKRVKLDGGDKKYSIGLDIGTNSVGWAVITDEYKVPSKKFKVLGNTDRHSIKKNLIGALLFDSGETAEATRLKRTARRRYTRRKNRICYLQEIFSNEMAKVDDSFFHRLEESFLVEEDKKHERHPIFGNIVDEVAYHEKYPTIYHLRKKLVDSTDKADLRLIYLALAHMIKFRGHFLIEGDLNPDNSDVDKLFIQLVQTYNQLFEENPINASGVDAKAILSARLSKSRRLENLIAQLPGEKKNGLFGNLIALSLGLTPNFKSNFDLAEDAKLQLSKDTYDDDLDNLLAQIGDQYADLFLAAKNLSDAILLSDILRVNTEITKAPLSASMIKRYDEHHQDLTLLKALVRQQLPEKYKEIFFDQSKNGYAGYIDGGASQEEFYKFIKPILEKMDGTEELLVKLNREDLLRKQRTFDNGSIPHQIHLGELHAILRRQEDFYPFLKDNREKIEKILTFRIPYYVGPLARGNSRFAWMTRKSEETITPWNFEEVVDKGASAQSFIERMTNFDKNLPNEKVLPKHSLLYEYFTVYNELTKVKYVTEGMRKPAFLSGEQKKAIVDLLFKTNRKVTVKQLKEDYFKKIECFDSVEISGVEDRFNASLGTYHDLLKIIKDKDFLDNEENEDILEDIVLTLTLFEDREMIEERLKTYAHLFDDKVMKQLKRRRYTGWGRLSRKLINGIRDKQSGKTILDFLKSDGFANRNFMQLIHDDSLTFKEDIQKAQVSGQGDSLHEHIANLAGSPAIKKGILQTVKVVDELVKVMGRHKPENIVIEMARENQTTQKGQKNSRERMKRIEEGIKELGSQILKEHPVENTQLQNEKLYLYYLQNGRDMYVDQELDINRLSDYDVDHIVPQSFLKDDSIDNKVLTRSDKARGKSDNVPSEEVVKKMKNYWRQLLNAKLITQRKFDNLTKAERGGLSELDKAGFIKRQLVETRQITKHVAQILDSRMNTKYDENDKLIREVKVITLKSKLVSDFRKDFQFYKVREINNYHHAHDAYLNAVVGTALIKKYPKLESEFVYGDYKVYDVRKMIAKSEQEIGKATAKYFFYSNIMNFFKTEITLANGEIRKRPLIETNGETGEIVWDKGRDFATVRKVLSMPQVNIVKKTEVQTGGFSKESILPKRNSDKLIARKKDWDPKKYGGFDSPTVAYSVLVVAKVEKGKSKKLKSVKELLGITIMERSSFEKNPIDFLEAKGYKEVKKDLIIKLPKYSLFELENGRKRMLASAGELQKGNELALPSKYVNFLYLASHYEKLKGSPEDNEQKQLFVEQHKHYLDEIIEQISEFSKRVILADANLDKVLSAYNKHRDKPIREQAENIIHLFTLTNLGAPAAFKYFDTTIDRKRYTSTKEVLDATLIHQSITGLYETRIDLSQLGGDGGEAAAKGGGGGTLGIEDEYRLHETSTEPDVSLGSTWLSDFPQAWAETGGMGLAVRQAPLIIPLKATSTPVSIQQYPMSHEARLGIKPHIQRLLDQGILVPCQSPWNTPLLPVKKPGTNDYRPVQDLREVNKRVEDIHPTVPNPYNLLSGLPPSHQWYTVLDLKDAFFCLRLHPTSQPLFAFEWRDPGMGISGQLTWTRLPQGFKNSPTLFNEALHRDLADFRIQHPDLILLQYVDDILLAATSELDCQQGTRALLQTLGDLGYRASAKKAQICQKQVKYLGYLLREGQRWLTEARKETVMGQPVPKTPRQLREFLGTAGFCRLWIPGFAEMAAPLYPLTKPGTLFSWGPDQQKAYQEIKQALLTAPALGLPDLTKPFELFVDEKQGYAKGVLTQKLGPWRRPVAYLSKKLDPVAAGWPPCLRMVAAIAVLTKDAGKLTMGQPLVILAPHAVEALVKQPPDRWLSNARMTHYQAMLLDTDRVQFGPVVALNPATLLPLPEEGAPHDCLEILAETHGTRPDLTDQPIPDADHTWYTDGSSFLQEGQRKAGAAVTTETEVIWAGALPAGTSAQRAELIALTQALKMAEGKRLNVYTDSRYAFATAHIHGEIYRRRGWLTSEGREIKNKSEILALLKALFLPKRLSIIHCLGHQKGDSAEARGNRLADQAAREAAIKTPPDTSTLLAGKRTADGSEFEKRTADGSEFESPKKKAKVE

SEQ ID NO: 2082 - protein, 2096 aa, synthetic construct
MPAAKRVKLDGGDKKYSIGLDIGTNSVGWAVITDEYKVPSKKFKVLGNTDRHSIKKNLIGALLFDSGETAEATRLKRTARRRYTRRKNRICYLQEIFSNEMAKVDDSFFHRLEESFLVEEDKKHERHPIFGNIVDEVAYHEKYPTIYHLRKKLVDSTDKADLRLIYLALAHMIKFRGHFLIEGDLNPDNSDVDKLFIQLVQTYNQLFEENPINASGVDAKAILSARLSKSRRLENLIAQLPGEKKNGLFGNLIALSLGLTPNFKSNFDLAEDAKLQLSKDTYDDDLDNLLAQIGDQYADLFLAAKNLSDAILLSDILRVNTEITKAPLSASMIKRYDEHHQDLTLLKALVRQQLPEKYKEIFFDQSKNGYAGYIDGGASQEEFYKFIKPILEKMDGTEELLVKLNREDLLRKQRTFDNGSIPHQIHLGELHAILRRQEDFYPFLKDNREKIEKILTFRIPYYVGPLARGNSRFAWMTRKSEETITPWNFEEVVDKGASAQSFIERMTNFDKNLPNEKVLPKHSLLYEYFTVYNELTKVKYVTEGMRKPAFLSGEQKKAIVDLLFKTNRKVTVKQLKEDYFKKIECFDSVEISGVEDRFNASLGTYHDLLKIIKDKDFLDNEENEDILEDIVLTLTLFEDREMIEERLKTYAHLFDDKVMKQLKRRRYTGWGRLSRKLINGIRDKQSGKTILDFLKSDGFANRNFMQLIHDDSLTFKEDIQKAQVSGQGDSLHEHIANLAGSPAIKKGILQTVKVVDELVKVMGRHKPENIVIEMARENQTTQKGQKNSRERMKRIEEGIKELGSQILKEHPVENTQLQNEKLYLYYLQNGRDMYVDQELDINRLSDYDVDHIVPQSFLKDDSIDNKVLTRSDKARGKSDNVPSEEVVKKMKNYWRQLLNAKLITQRKFDNLTKAERGGLSELDKAGFIKRQLVETRQITKHVAQILDSRMNTKYDENDKLIREVKVITLKSKLVSDFRKDFQFYKVREINNYHHAHDAYLNAVVGTALIKKYPKLESEFVYGDYKVYDVRKMIAKSEQEIGKATAKYFFYSNIMNFFKTEITLANGEIRKRPLIETNGETGEIVWDKGRDFATVRKVLSMPQVNIVKKTEVQTGGFSKESILPKRNSDKLIARKKDWDPKKYGGFDSPTVAYSVLVVAKVEKGKSKKLKSVKELLGITIMERSSFEKNPIDFLEAKGYKEVKKDLIIKLPKYSLFELENGRKRMLASAGELQKGNELALPSKYVNFLYLASHYEKLKGSPEDNEQKQLFVEQHKHYLDEIIEQISEFSKRVILADANLDKVLSAYNKHRDKPIREQAENIIHLFTLTNLGAPAAFKYFDTTIDRKRYTSTKEVLDATLIHQSITGLYETRIDLSQLGGDGGGGGGGSEAAAKGGTLGIEDEYRLHETSTEPDVSLGSTWLSDFPQAWAETGGMGLAVRQAPLIIPLKATSTPVSIQQYPMSHEARLGIKPHIQRLLDQGILVPCQSPWNTPLLPVKKPGTNDYRPVQDLREVNKRVEDIHPTVPNPYNLLSGLPPSHQWYTVLDLKDAFFCLRLHPTSQPLFAFEWRDPGMGISGQLTWTRLPQGFKNSPTLFNEALHRDLADFRIQHPDLILLQYVDDILLAATSELDCQQGTRALLQTLGDLGYRASAKKAQICQKQVKYLGYLLREGQRWLTEARKETVMGQPVPKTPRQLREFLGTAGFCRLWIPGFAEMAAPLYPLTKPGTLFSWGPDQQKAYQEIKQALLTAPALGLPDLTKPFELFVDEKQGYAKGVLTQKLGPWRRPVAYLSKKLDPVAAGWPPCLRMVAAIAVLTKDAGKLTMGQPLVILAPHAVEALVKQPPDRWLSNARMTHYQAMLLDTDRVQFGPVVALNPATLLPLPEEGAPHDCLEILAETHGTRPDLTDQPIPDADHTWYTDGSSFLQEGQRKAGAAVTTETEVIWAGALPAGTSAQRAELIALTQALKMAEGKRLNVYTDSRYAFATAHIHGEIYRRRGWLTSEGREIKNKSEILALLKALFLPKRLSIIHCLGHQKGDSAEARGNRLADQAAREAAIKTPPDTSTLLAGKRTADGSEFEKRTADGSEFESPKKKAKVE

SEQ ID NO: 2083 - protein, 2091 aa, synthetic construct
MPAAKRVKLDGGDKKYSIGLDIGTNSVGWAVITDEYKVPSKKFKVLGNTDRHSIKKNLIGALLFDSGETAEATRLKRTARRRYTRRKNRICYLQEIFSNEMAKVDDSFFHRLEESFLVEEDKKHERHPIFGNIVDEVAYHEKYPTIYHLRKKLVDSTDKADLRLIYLALAHMIKFRGHFLIEGDLNPDNSDVDKLFIQLVQTYNQLFEENPINASGVDAKAILSARLSKSRRLENLIAQLPGEKKNGLFGNLIALSLGLTPNFKSNFDLAEDAKLQLSKDTYDDDLDNLLAQIGDQYADLFLAAKNLSDAILLSDILRVNTEITKAPLSASMIKRYDEHHQDLTLLKALVRQQLPEKYKEIFFDQSKNGYAGYIDGGASQEEFYKFIKPILEKMDGTEELLVKLNREDLLRKQRTFDNGSIPHQIHLGELHAILRRQEDFYPFLKDNREKIEKILTFRIPYYVGPLARGNSRFAWMTRKSEETITPWNFEEVVDKGASAQSFIERMTNFDKNLPNEKVLPKHSLLYEYFTVYNELTKVKYVTEGMRKPAFLSGEQKKAIVDLLFKTNRKVTVKQLKEDYFKKIECFDSVEISGVEDRFNASLGTYHDLLKIIKDKDFLDNEENEDILEDIVLTLTLFEDREMIEERLKTYAHLFDDKVMKQLKRRRYTGWGRLSRKLINGIRDKQSGKTILDFLKSDGFANRNFMQLIHDDSLTFKEDIQKAQVSGQGDSLHEHIANLAGSPAIKKGILQTVKVVDELVKVMGRHKPENIVIEMARENQTTQKGQKNSRERMKRIEEGIKELGSQILKEHPVENTQLQNEKLYLYYLQNGRDMYVDQELDINRLSDYDVDHIVPQSFLKDDSIDNKVLTRSDKARGKSDNVPSEEVVKKMKNYWRQLLNAKLITQRKFDNLTKAERGGLSELDKAGFIKRQLVETRQITKHVAQILDSRMNTKYDENDKLIREVKVITLKSKLVSDFRKDFQFYKVREINNYHHAHDAYLNAVVGTALIKKYPKLESEFVYGDYKVYDVRKMIAKSEQEIGKATAKYFFYSNIMNFFKTEITLANGEIRKRPLIETNGETGEIVWDKGRDFATVRKVLSMPQVNIVKKTEVQTGGFSKESILPKRNSDKLIARKKDWDPKKYGGFDSPTVAYSVLVVAKVEKGKSKKLKSVKELLGITIMERSSFEKNPIDFLEAKGYKEVKKDLIIKLPKYSLFELENGRKRMLASAGELQKGNELALPSKYVNFLYLASHYEKLKGSPEDNEQKQLFVEQHKHYLDEIIEQISEFSKRVILADANLDKVLSAYNKHRDKPIREQAENIIHLFTLTNLGAPAAFKYFDTTIDRKRYTSTKEVLDATLIHQSITGLYETRIDLSQLGGDGGGGSPAPGGTLGIEDEYRLHETSTEPDVSLGSTWLSDFPQAWAETGGMGLAVRQAPLIIPLKATSTPVSIQQYPMSHEARLGIKPHIQRLLDQGILVPCQSPWNTPLLPVKKPGTNDYRPVQDLREVNKRVEDIHPTVPNPYNLLSGLPPSHQWYTVLDLKDAFFCLRLHPTSQPLFAFEWRDPGMGISGQLTWTRLPQGFKNSPTLFNEALHRDLADFRIQHPDLILLQYVDDILLAATSELDCQQGTRALLQTLGDLGYRASAKKAQICQKQVKYLGYLLREGQRWLTEARKETVMGQPVPKTPRQLREFLGTAGFCRLWIPGFAEMAAPLYPLTKPGTLFSWGPDQQKAYQEIKQALLTAPALGLPDLTKPFELFVDEKQGYAKGVLTQKLGPWRRPVAYLSKKLDPVAAGWPPCLRMVAAIAVLTKDAGKLTMGQPLVILAPHAVEALVKQPPDRWLSNARMTHYQAMLLDTDRVQFGPVVALNPATLLPLPEEGAPHDCLEILAETHGTRPDLTDQPIPDADHTWYTDGSSFLQEGQRKAGAAVTTETEVIWAGALPAGTSAQRAELIALTQALKMAEGKRLNVYTDSRYAFATAHIHGEIYRRRGWLTSEGREIKNKSEILALLKALFLPKRLSIIHCLGHQKGDSAEARGNRLADQAAREAAIKTPPDTSTLLAGKRTADGSEFEKRTADGSEFESPKKKAKVE

SEQ ID NO: 2084 - protein, 2110 aa, synthetic construct
MPAAKRVKLDGGDKKYSIGLDIGTNSVGWAVITDEYKVPSKKFKVLGNTDRHSIKKNLIGALLFDSGETAEATRLKRTARRRYTRRKNRICYLQEIFSNEMAKVDDSFFHRLEESFLVEEDKKHERHPIFGNIVDEVAYHEKYPTIYHLRKKLVDSTDKADLRLIYLALAHMIKFRGHFLIEGDLNPDNSDVDKLFIQLVQTYNQLFEENPINASGVDAKAILSARLSKSRRLENLIAQLPGEKKNGLFGNLIALSLGLTPNFKSNFDLAEDAKLQLSKDTYDDDLDNLLAQIGDQYADLFLAAKNLSDAILLSDILRVNTEITKAPLSASMIKRYDEHHQDLTLLKALVRQQLPEKYKEIFFDQSKNGYAGYIDGGASQEEFYKFIKPILEKMDGTEELLVKLNREDLLRKQRTFDNGSIPHQIHLGELHAILRRQEDFYPFLKDNREKIEKILTFRIPYYVGPLARGNSRFAWMTRKSEETITPWNFEEVVDKGASAQSFIERMTNFDKNLPNEKVLPKHSLLYEYFTVYNELTKVKYVTEGMRKPAFLSGEQKKAIVDLLFKTNRKVTVKQLKEDYFKKIECFDSVEISGVEDRFNASLGTYHDLLKIIKDKDFLDNEENEDILEDIVLTLTLFEDREMIEERLKTYAHLFDDKVMKQLKRRRYTGWGRLSRKLINGIRDKQSGKTILDFLKSDGFANRNFMQLIHDDSLTFKEDIQKAQVSGQGDSLHEHIANLAGSPAIKKGILQTVKVVDELVKVMGRHKPENIVIEMARENQTTQKGQKNSRERMKRIEEGIKELGSQILKEHPVENTQLQNEKLYLYYLQNGRDMYVDQELDINRLSDYDVDHIVPQSFLKDDSIDNKVLTRSDKARGKSDNVPSEEVVKKMKNYWRQLLNAKLITQRKFDNLTKAERGGLSELDKAGFIKRQLVETRQITKHVAQILDSRMNTKYDENDKLIREVKVITLKSKLVSDFRKDFQFYKVREINNYHHAHDAYLNAVVGTALIKKYPKLESEFVYGDYKVYDVRKMIAKSEQEIGKATAKYFFYSNIMNFFKTEITLANGEIRKRPLIETNGETGEIVWDKGRDFATVRKVLSMPQVNIVKKTEVQTGGFSKESILPKRNSDKLIARKKDWDPKKYGGFDSPTVAYSVLVVAKVEKGKSKKLKSVKELLGITIMERSSFEKNPIDFLEAKGYKEVKKDLIIKLPKYSLFELENGRKRMLASAGELQKGNELALPSKYVNFLYLASHYEKLKGSPEDNEQKQLFVEQHKHYLDEIIEQISEFSKRVILADANLDKVLSAYNKHRDKPIREQAENIIHLFTLTNLGAPAAFKYFDTTIDRKRYTSTKEVLDATLIHQSITGLYETRIDLSQLGGDGGGGGGSGGGGSGGGGSGGGGSGGGGSGGLGIEDEYRLHETSTEPDVSLGSTWLSDFPQAWAETGGMGLAVRQAPLIIPLKATSTPVSIQQYPMSHEARLGIKPHIQRLLDQGILVPCQSPWNTPLLPVKKPGTNDYRPVQDLREVNKRVEDIHPTVPNPYNLLSGLPPSHQWYTVLDLKDAFFCLRLHPTSQPLFAFEWRDPGMGISGQLTWTRLPQGFKNSPTLFNEALHRDLADFRIQHPDLILLQYVDDILLAATSELDCQQGTRALLQTLGDLGYRASAKKAQICQKQVKYLGYLLREGQRWLTEARKETVMGQPVPKTPRQLREFLGKAGFCRLFIPGFAEMAAPLYPLTKPGTLFSWGPDQQKAYQEIKQALLTAPALGLPDLTKPFELFVDEKQGYAKGVLTQKLGPWRRPVAYLSKKLDPVAAGWPPCLRMVAAIAVLTKDAGKLTMGQPLVILAPHAVEALVKQPPDRWLSNARMTHYQAMLLDTDRVQFGPVVALNPATLLPLPEEGAPHDCLEILAETHGTRPDLTDQPIPDADHTWYTDGSSFLQEGQRKAGAAVTTETEVIWAGALPAGTSAQRAELIALTQALKMAEGKRLNVYTDSRYAFATAHIHGEIYRRRGWLTSEGREIKNKSEILALLKALFLPKRLSIIHCLGHQKGDSAEARGNRLADQAAREAAIKTPPDTSTLLIAGKRTADGSEFEKRTADGSEFESPKKKAKVE

SEQ ID NO: 2085 - protein, 2105 aa, synthetic construct
MPAAKRVKLDGGDKKYSIGLDIGTNSVGWAVITDEYKVPSKKFKVLGNTDRHSIKKNLIGALLFDSGETAEATRLKRTARRRYTRRKNRICYLQEIFSNEMAKVDDSFFHRLEESFLVEEDKKHERHPIFGNIVDEVAYHEKYPTIYHLRKKLVDSTDKADLRLIYLALAHMIKFRGHFLIEGDLNPDNSDVDKLFIQLVQTYNQLFEENPINASGVDAKAILSARLSKSRRLENLIAQLPGEKKNGLFGNLIALSLGLTPNFKSNFDLAEDAKLQLSKDTYDDDLDNLLAQIGDQYADLFLAAKNLSDAILLSDILRVNTEITKAPLSASMIKRYDEHHQDLTLLKALVRQQLPEKYKEIFFDQSKNGYAGYIDGGASQEEFYKFIKPILEKMDGTEELLVKLNREDLLRKQRTFDNGSIPHQIHLGELHAILRRQEDFYPFLKDNREKIEKILTFRIPYYVGPLARGNSRFAWMTRKSEETITPWNFEEVVDKGASAQSFIERMTNFDKNLPNEKVLPKHSLLYEYFTVYNELTKVKYVTEGMRKPAFLSGEQKKAIVDLLFKTNRKVTVKQLKEDYFKKIECFDSVEISGVEDRFNASLGTYHDLLKIIKDKDFLDNEENEDILEDIVLTLTLFEDREMIEERLKTYAHLFDDKVMKQLKRRRYTGWGRLSRKLINGIRDKQSGKTILDFLKSDGFANRNFMQLIHDDSLTFKEDIQKAQVSGQGDSLHEHIANLAGSPAIKKGILQTVKVVDELVKVMGRHKPENIVIEMARENQTTQKGQKNSRERMKRIEEGIKELGSQILKEHPVENTQLQNEKLYLYYLQNGRDMYVDQELDINRLSDYDVDHIVPQSFLKDDSIDNKVLTRSDKARGKSDNVPSEEVVKKMKNYWRQLLNAKLITQRKFDNLTKAERGGLSELDKAGFIKRQLVETRQITKHVAQILDSRMNTKYDENDKLIREVKVITLKSKLVSDFRKDFQFYKVREINNYHHAHDAYLNAVVGTALIKKYPKLESEFVYGDYKVYDVRKMIAKSEQEIGKATAKYFFYSNIMNFFKTEITLANGEIRKRPLIETNGETGEIVWDKGRDFATVRKVLSMPQVNIVKKTEVQTGGFSKESILPKRNSDKLIARKKDWDPKKYGGFDSPTVAYSVLVVAKVEKGKSKKLKSVKELLGITIMERSSFEKNPIDFLEAKGYKEVKKDLIIKLPKYSLFELENGRKRMLASAGELQKGNELALPSKYVNFLYLASHYEKLKGSPEDNEQKQLFVEQHKHYLDEIIEQISEFSKRVILADANLDKVLSAYNKHRDKPIREQAENIIHLFTLTNLGAPAAFKYFDTTIDRKRYTSTKEVLDATLIHQSITGLYETRIDLSQLGGDGGGGGGSGGGGSGGGGSGGGGSGGLGIEDEYRLHETSTEPDVSLGSTWLSDFPQAWAETGGMGLAVRQAPLIIPLKATSTPVSIQQYPMSHEARLGIKPHIQRLLDQGILVPCQSPWNTPLLPVKKPGTNDYRPVQDLREVNKRVEDIHPTVPNPYNLLSGLPPSHQWYTVLDLKDAFFCLRLHPTSQPLFAFEWRDPGMGISGQLTWTRLPQGFKNSPTLFNEALHRDLADFRIQHPDLILLQYVDDILLAATSELDCQQGTRALLQTLGDLGYRASAKKAQICQKQVKYLGYLLREGQRWLTEARKETVMGQPVPKTPRQLREFLGKAGFCRLFIPGFAEMAAPLYPLTKPGTLFSWGPDQQKAYQEIKQALLTAPALGLPDLTKPFELFVDEKQGYAKGVLTQKLGPWRRPVAYLSKKLDPVAAGWPPCLRMVAAIAVLTKDAGKLTMGQPLVILAPHAVEALVKQPPDRWLSNARMTHYQAMLLDTDRVQFGPVVALNPATLLPLPEEGAPHDCLEILAETHGTRPDLTDQPIPDADHTWYTDGSSFLQEGQRKAGAAVTTETEVIWAGALPAGTSAQRAELIALTQALKMAEGKRLNVYTDSRYAFATAHIHGEIYRRRGWLTSEGREIKNKSEILALLKALFLPKRLSIIHCLGHQKGDSAEARGNRLADQAAREAAIKTPPDTSTLLIAGKRTADGSEFEKRTADGSEFESPKKKAKVE

SEQ ID NO: 2086 - protein, 2110 aa, synthetic construct
MPAAKRVKLDGGDKKYSIGLDIGTNSVGWAVITDEYKVPSKKFKVLGNTDRHSIKKNLIGALLFDSGETAEATRLKRTARRRYTRRKNRICYLQEIFSNEMAKVDDSFFHRLEESFLVEEDKKHERHPIFGNIVDEVAYHEKYPTIYHLRKKLVDSTDKADLRLIYLALAHMIKFRGHFLIEGDLNPDNSDVDKLFIQLVQTYNQLFEENPINASGVDAKAILSARLSKSRRLENLIAQLPGEKKNGLFGNLIALSLGLTPNFKSNFDLAEDAKLQLSKDTYDDDLDNLLAQIGDQYADLFLAAKNLSDAILLSDILRVNTEITKAPLSASMIKRYDEHHQDLTLLKALVRQQLPEKYKEIFFDQSKNGYAGYIDGGASQEEFYKFIKPILEKMDGTEELLVKLNREDLLRKQRTFDNGSIPHQIHLGELHAILRRQEDFYPFLKDNREKIEKILTFRIPYYVGPLARGNSRFAWMTRKSEETITPWNFEEVVDKGASAQSFIERMTNFDKNLPNEKVLPKHSLLYEYFTVYNELTKVKYVTEGMRKPAFLSGEQKKAIVDLLFKTNRKVTVKQLKEDYFKKIECFDSVEISGVEDRFNASLGTYHDLLKIIKDKDFLDNEENEDILEDIVLTLTLFEDREMIEERLKTYAHLFDDKVMKQLKRRRYTGWGRLSRKLINGIRDKQSGKTILDFLKSDGFANRNFMQLIHDDSLTFKEDIQKAQVSGQGDSLHEHIANLAGSPAIKKGILQTVKVVDELVKVMGRHKPENIVIEMARENQTTQKGQKNSRERMKRIEEGIKELGSQILKEHPVENTQLQNEKLYLYYLQNGRDMYVDQELDINRLSDYDVDHIVPQSFLKDDSIDNKVLTRSDKARGKSDNVPSEEVVKKMKNYWRQLLNAKLITQRKFDNLTKAERGGLSELDKAGFIKRQLVETRQITKHVAQILDSRMNTKYDENDKLIREVKVITLKSKLVSDFRKDFQFYKVREINNYHHAHDAYLNAVVGTALIKKYPKLESEFVYGDYKVYDVRKMIAKSEQEIGKATAKYFFYSNIMNFFKTEITLANGEIRKRPLIETNGETGEIVWDKGRDFATVRKVLSMPQVNIVKKTEVQTGGFSKESILPKRNSDKLIARKKDWDPKKYGGFDSPTVAYSVLVVAKVEKGKSKKLKSVKELLGITIMERSSFEKNPIDFLEAKGYKEVKKDLIIKLPKYSLFELENGRKRMLASAGELQKGNELALPSKYVNFLYLASHYEKLKGSPEDNEQKQLFVEQHKHYLDEIIEQISEFSKRVILADANLDKVLSAYNKHRDKPIREQAENIIHLFTLTNLGAPAAFKYFDTTIDRKRYTSTKEVLDATLIHQSITGLYETRIDLSQLGGDGGEAAAKEAAAKEAAAKEAAAKEAAAKGGLGIEDEYRLHETSTEPDVSLGSTWLSDFPQAWAETGGMGLAVRQAPLIIPLKATSTPVSIQQYPMSHEARLGIKPHIQRLLDQGILVPCQSPWNTPLLPVKKPGTNDYRPVQDLREVNKRVEDIHPTVPNPYNLLSGLPPSHQWYTVLDLKDAFFCLRLHPTSQPLFAFEWRDPGMGISGQLTWTRLPQGFKNSPTLFNEALHRDLADFRIQHPDLILLQYVDDILLAATSELDCQQGTRALLQTLGDLGYRASAKKAQICQKQVKYLGYLLREGQRWLTEARKETVMGQPVPKTPRQLREFLGKAGFCRLFIPGFAEMAAPLYPLTKPGTLFSWGPDQQKAYQEIKQALLTAPALGLPDLTKPFELFVDEKQGYAKGVLTQKLGPWRRPVAYLSKKLDPVAAGWPPCLRMVAAIAVLTKDAGKLTMGQPLVILAPHAVEALVKQPPDRWLSNARMTHYQAMLLDTDRVQFGPVVALNPATLLPLPEEGAPHDCLEILAETHGTRPDLTDQPIPDADHTWYTDGSSFLQEGQRKAGAAVTTETEVIWAGALPAGTSAQRAELIALTQALKMAEGKRLNVYTDSRYAFATAHIHGEIYRRRGWLTSEGREIKNKSEILALLKALFLPKRLSIIHCLGHQKGDSAEARGNRLADQAAREAAIKTPPDTSTLLIAGKRTADGSEFEKRTADGSEFESPKKKAKVE

SEQ ID NO: 2087 - protein, 2098 aa, synthetic construct
MPAAKRVKLDGGDKKYSIGLDIGTNSVGWAVITDEYKVPSKKFKVLGNTDRHSIKKNLIGALLFDSGETAEATRLKRTARRRYTRRKNRICYLQEIFSNEMAKVDDSFFHRLEESFLVEEDKKHERHPIFGNIVDEVAYHEKYPTIYHLRKKLVDSTDKADLRLIYLALAHMIKFRGHFLIEGDLNPDNSDVDKLFIQLVQTYNQLFEENPINASGVDAKAILSARLSKSRRLENLIAQLPGEKKNGLFGNLIALSLGLTPNFKSNFDLAEDAKLQLSKDTYDDDLDNLLAQIGDQYADLFLAAKNLSDAILLSDILRVNTEITKAPLSASMIKRYDEHHQDLTLLKALVRQQLPEKYKEIFFDQSKNGYAGYIDGGASQEEFYKFIKPILEKMDGTEELLVKLNREDLLRKQRTFDNGSIPHQIHLGELHAILRRQEDFYPFLKDNREKIEKILTFRIPYYVGPLARGNSRFAWMTRKSEETITPWNFEEVVDKGASAQSFIERMTNFDKNLPNEKVLPKHSLLYEYFTVYNELTKVKYVTEGMRKPAFLSGEQKKAIVDLLFKTNRKVTVKQLKEDYFKKIECFDSVEISGVEDRFNASLGTYHDLLKIIKDKDFLDNEENEDILEDIVLTLTLFEDREMIEERLKTYAHLFDDKVMKQLKRRRYTGWGRLSRKLINGIRDKQSGKTILDFLKSDGFANRNFMQLIHDDSLTFKEDIQKAQVSGQGDSLHEHIANLAGSPAIKKGILQTVKVVDELVKVMGRHKPENIVIEMARENQTTQKGQKNSRERMKRIEEGIKELGSQILKEHPVENTQLQNEKLYLYYLQNGRDMYVDQELDINRLSDYDVDHIVPQSFLKDDSIDNKVLTRSDKARGKSDNVPSEEVVKKMKNYWRQLLNAKLITQRKFDNLTKAERGGLSELDKAGFIKRQLVETRQITKHVAQILDSRMNTKYDENDKLIREVKVITLKSKLVSDFRKDFQFYKVREINNYHHAHDAYLNAVVGTALIKKYPKLESEFVYGDYKVYDVRKMIAKSEQEIGKATAKYFFYSNIMNFFKTEITLANGEIRKRPLIETNGETGEIVWDKGRDFATVRKVLSMPQVNIVKKTEVQTGGFSKESILPKRNSDKLIARKKDWDPKKYGGFDSPTVAYSVLVVAKVEKGKSKKLKSVKELLGITIMERSSFEKNPIDFLEAKGYKEVKKDLIIKLPKYSLFELENGRKRMLASAGELQKGNELALPSKYVNFLYLASHYEKLKGSPEDNEQKQLFVEQHKHYLDEIIEQISEFSKRVILADANLDKVLSAYNKHRDKPIREQAENIIHLFTLTNLGAPAAFKYFDTTIDRKRYTSTKEVLDATLIHQSITGLYETRIDLSQLGGDGGPAPAPAPAPAPAPGGLGIEDEYRLHETSTEPDVSLGSTWLSDFPQAWAETGGMGLAVRQAPLIIPLKATSTPVSIQQYPMSHEARLGIKPHIQRLLDQGILVPCQSPWNTPLLPVKKPGTNDYRPVQDLREVNKRVEDIHPTVPNPYNLLSGLPPSHQWYTVLDLKDAFFCLRLHPTSQPLFAFEWRDPGMGISGQLTWTRLPQGFKNSPTLFNEALHRDLADFRIQHPDLILLQYVDDILLAATSELDCQQGTRALLQTLGDLGYRASAKKAQICQKQVKYLGYLLREGQRWLTEARKETVMGQPVPKTPRQLREFLGKAGFCRLFIPGFAEMAAPLYPLTKPGTLFSWGPDQQKAYQEIKQALLTAPALGLPDLTKPFELFVDEKQGYAKGVLTQKLGPWRRPVAYLSKKLDPVAAGWPPCLRMVAAIAVLTKDAGKLTMGQPLVILAPHAVEALVKQPPDRWLSNARMTHYQAMLLDTDRVQFGPVVALNPATLLPLPEEGAPHDCLEILAETHGTRPDLTDQPIPDADHTWYTDGSSFLQEGQRKAGAAVTTETEVIWAGALPAGTSAQRAELIALTQALKMAEGKRLNVYTDSRYAFATAHIHGEIYRRRGWLTSEGREIKNKSEILALLKALFLPKRLSIIHCLGHQKGDSAEARGNRLADQAAREAAIKTPPDTSTLLIAGKRTADGSEFEKRTADGSEFESPKKKAKVE

SEQ ID NO: 2088 - protein, 2131 aa, synthetic construct
MPAAKRVKLDGGDKKYSIGLDIGTNSVGWAVITDEYKVPSKKFKVLGNTDRHSIKKNLIGALLFDSGETAEATRLKRTARRRYTRRKNRICYLQEIFSNEMAKVDDSFFHRLEESFLVEEDKKHERHPIFGNIVDEVAYHEKYPTIYHLRKKLVDSTDKADLRLIYLALAHMIKFRGHFLIEGDLNPDNSDVDKLFIQLVQTYNQLFEENPINASGVDAKAILSARLSKSRRLENLIAQLPGEKKNGLFGNLIALSLGLTPNFKSNFDLAEDAKLQLSKDTYDDDLDNLLAQIGDQYADLFLAAKNLSDAILLSDILRVNTEITKAPLSASMIKRYDEHHQDLTLLKALVRQQLPEKYKEIFFDQSKNGYAGYIDGGASQEEFYKFIKPILEKMDGTEELLVKLNREDLLRKQRTFDNGSIPHQIHLGELHAILRRQEDFYPFLKDNREKIEKILTFRIPYYVGPLARGNSRFAWMTRKSEETITPWNFEEVVDKGASAQSFIERMTNFDKNLPNEKVLPKHSLLYEYFTVYNELTKVKYVTEGMRKPAFLSGEQKKAIVDLLFKTNRKVTVKQLKEDYFKKIECFDSVEISGVEDRFNASLGTYHDLLKIIKDKDFLDNEENEDILEDIVLTLTLFEDREMIEERLKTYAHLFDDKVMKQLKRRRYTGWGRLSRKLINGIRDKQSGKTILDFLKSDGFANRNFMQLIHDDSLTFKEDIQKAQVSGQGDSLHEHIANLAGSPAIKKGILQTVKVVDELVKVMGRHKPENIVIEMARENQTTQKGQKNSRERMKRIEEGIKELGSQILKEHPVENTQLQNEKLYLYYLQNGRDMYVDQELDINRLSDYDVDHIVPQSFLKDDSIDNKVLTRSDKARGKSDNVPSEEVVKKMKNYWRQLLNAKLITQRKFDNLTKAERGGLSELDKAGFIKRQLVETRQITKHVAQILDSRMNTKYDENDKLIREVKVITLKSKLVSDFRKDFQFYKVREINNYHHAHDAYLNAVVGTALIKKYPKLESEFVYGDYKVYDVRKMIAKSEQEIGKATAKYFFYSNIMNFFKTEITLANGEIRKRPLIETNGETGEIVWDKGRDFATVRKVLSMPQVNIVKKTEVQTGGFSKESILPKRNSDKLIARKKDWDPKKYGGFDSPTVAYSVLVVAKVEKGKSKKLKSVKELLGITIMERSSFEKNPIDFLEAKGYKEVKKDLIIKLPKYSLFELENGRKRMLASAGELQKGNELALPSKYVNFLYLASHYEKLKGSPEDNEQKQLFVEQHKHYLDEIIEQISEFSKRVILADANLDKVLSAYNKHRDKPIREQAENIIHLFTLTNLGAPAAFKYFDTTIDRKRYTSTKEVLDATLIHQSITGLYETRIDLSQLGGDGGAEAAAKEAAAKEAAAKEAAAKALEAEAAAKEAAAKEAAAKEAAAKAGGLGIEDEYRLHETSTEPDVSLGSTWLSDFPQAWAETGGMGLAVRQAPLIIPLKATSTPVSIQQYPMSHEARLGIKPHIQRLLDQGILVPCQSPWNTPLLPVKKPGTNDYRPVQDLREVNKRVEDIHPTVPNPYNLLSGLPPSHQWYTVLDLKDAFFCLRLHPTSQPLFAFEWRDPGMGISGQLTWTRLPQGFKNSPTLFNEALHRDLADFRIQHPDLILLQYVDDILLAATSELDCQQGTRALLQTLGDLGYRASAKKAQICQKQVKYLGYLLREGQRWLTEARKETVMGQPVPKTPRQLREFLGKAGFCRLFIPGFAEMAAPLYPLTKPGTLFSWGPDQQKAYQEIKQALLTAPALGLPDLTKPFELFVDEKQGYAKGVLTQKLGPWRRPVAYLSKKLDPVAAGWPPCLRMVAAIAVLTKDAGKLTMGQPLVILAPHAVEALVKQPPDRWLSNARMTHYQAMLLDTDRVQFGPVVALNPATLLPLPEEGAPHDCLEILAETHGTRPDLTDQPIPDADHTWYTDGSSFLQEGQRKAGAAVTTETEVIWAGALPAGTSAQRAELIALTQALKMAEGKRLNVYTDSRYAFATAHIHGEIYRRRGWLTSEGREIKNKSEILALLKALFLPKRLSIIHCLGHQKGDSAEARGNRLADQAAREAAIKTPPDTSTLLIAGKRTADGSEFEKRTADGSEFESPKKKAKVE

SEQ ID NO: 2089 - protein, 2096 aa, synthetic construct; identical to SEQ ID NO: 2050

SEQ ID NO: 2090 - protein, 2100 aa, synthetic construct; identical to SEQ ID NO: 2049

SEQ ID NO: 2091 - protein, 2094 aa, synthetic construct
MPAAKRVKLDGGDKKYSIGLDIGTNSVGWAVITDEYKVPSKKFKVLGNTDRHSIKKNLIGALLFDSGETAEATRLKRTARRRYTRRKNRICYLQEIFSNEMAKVDDSFFHRLEESFLVEEDKKHERHPIFGNIVDEVAYHEKYPTIYHLRKKLVDSTDKADLRLIYLALAHMIKFRGHFLIEGDLNPDNSDVDKLFIQLVQTYNQLFEENPINASGVDAKAILSARLSKSRRLENLIAQLPGEKKNGLFGNLIALSLGLTPNFKSNFDLAEDAKLQLSKDTYDDDLDNLLAQIGDQYADLFLAAKNLSDAILLSDILRVNTEITKAPLSASMIKRYDEHHQDLTLLKALVRQQLPEKYKEIFFDQSKNGYAGYIDGGASQEEFYKFIKPILEKMDGTEELLVKLNREDLLRKQRTFDNGSIPHQIHLGELHAILRRQEDFYPFLKDNREKIEKILTFRIPYYVGPLARGNSRFAWMTRKSEETITPWNFEEVVDKGASAQSFIERMTNFDKNLPNEKVLPKHSLLYEYFTVYNELTKVKYVTEGMRKPAFLSGEQKKAIVDLLFKTNRKVTVKQLKEDYFKKIECFDSVEISGVEDRFNASLGTYHDLLKIIKDKDFLDNEENEDILEDIVLTLTLFEDREMIEERLKTYAHLFDDKVMKQLKRRRYTGWGRLSRKLINGIRDKQSGKTILDFLKSDGFANRNFMQLIHDDSLTFKEDIQKAQVSGQGDSLHEHIANLAGSPAIKKGILQTVKVVDELVKVMGRHKPENIVIEMARENQTTQKGQKNSRERMKRIEEGIKELGSQILKEHPVENTQLQNEKLYLYYLQNGRDMYVDQELDINRLSDYDVDHIVPQSFLKDDSIDNKVLTRSDKARGKSDNVPSEEVVKKMKNYWRQLLNAKLITQRKFDNLTKAERGGLSELDKAGFIKRQLVETRQITKHVAQILDSRMNTKYDENDKLIREVKVITLKSKLVSDFRKDFQFYKVREINNYHHAHDAYLNAVVGTALIKKYPKLESEFVYGDYKVYDVRKMIAKSEQEIGKATAKYFFYSNIMNFFKTEITLANGEIRKRPLIETNGETGEIVWDKGRDFATVRKVLSMPQVNIVKKTEVQTGGFSKESILPKRNSDKLIARKKDWDPKKYGGFDSPTVAYSVLVVAKVEKGKSKKLKSVKELLGITIMERSSFEKNPIDFLEAKGYKEVKKDLIIKLPKYSLFELENGRKRMLASAGELQKGNELALPSKYVNFLYLASHYEKLKGSPEDNEQKQLFVEQHKHYLDEIIEQISEFSKRVILADANLDKVLSAYNKHRDKPIREQAENIIHLFTLTNLGAPAAFKYFDTTIDRKRYTSTKEVLDATLIHQSITGLYETRIDLSQLGGDGGPAPGSSGGGGGLGIEDEYRLHETSTEPDVSLGSTWLSDFPQAWAETGGMGLAVRQAPLIIPLKATSTPVSIQQYPMSHEARLGIKPHIQRLLDQGILVPCQSPWNTPLLPVKKPGTNDYRPVQDLREVNKRVEDIHPTVPNPYNLLSGLPPSHQWYTVLDLKDAFFCLRLHPTSQPLFAFEWRDPGMGISGQLTWTRLPQGFKNSPTLFNEALHRDLADFRIQHPDLILLQYVDDILLAATSELDCQQGTRALLQTLGDLGYRASAKKAQICQKQVKYLGYLLREGQRWLTEARKETVMGQPVPKTPRQLREFLGKAGFCRLFIPGFAEMAAPLYPLTKPGTLFSWGPDQQKAYQEIKQALLTAPALGLPDLTKPFELFVDEKQGYAKGVLTQKLGPWRRPVAYLSKKLDPVAAGWPPCLRMVAAIAVLTKDAGKLTMGQPLVILAPHAVEALVKQPPDRWLSNARMTHYQAMLLDTDRVQFGPVVALNPATLLPLPEEGAPHDCLEILAETHGTRPDLTDQPIPDADHTWYTDGSSFLQEGQRKAGAAVTTETEVIWAGALPAGTSAQRAELIALTQALKMAEGKRLNVYTDSRYAFATAHIHGEIYRRRGWLTSEGREIKNKSEILALLKALFLPKRLSIIHCLGHQKGDSAEARGNRLADQAAREAAIKTPPDTSTLLIAGKRTADGSEFEKRTADGSEFESPKKKAKVE

SEQ ID NO: 2092 - protein, 2105 aa, synthetic construct
MPAAKRVKLDGGDKKYSIGLDIGTNSVGWAVITDEYKVPSKKFKVLGNTDRHSIKKNLIGALLFDSGETAEATRLKRTARRRYTRRKNRICYLQEIFSNEMAKVDDSFFHRLEESFLVEEDKKHERHPIFGNIVDEVAYHEKYPTIYHLRKKLVDSTDKADLRLIYLALAHMIKFRGHFLIEGDLNPDNSDVDKLFIQLVQTYNQLFEENPINASGVDAKAILSARLSKSRRLENLIAQLPGEKKNGLFGNLIALSLGLTPNFKSNFDLAEDAKLQLSKDTYDDDLDNLLAQIGDQYADLFLAAKNLSDAILLSDILRVNTEITKAPLSASMIKRYDEHHQDLTLLKALVRQQLPEKYKEIFFDQSKNGYAGYIDGGASQEEFYKFIKPILEKMDGTEELLVKLNREDLLRKQRTFDNGSIPHQIHLGELHAILRRQEDFYPFLKDNREKIEKILTFRIPYYVGPLARGNSRFAWMTRKSEETITPWNFEEVVDKGASAQSFIERMTNFDKNLPNEKVLPKHSLLYEYFTVYNELTKVKYVTEGMRKPAFLSGEQKKAIVDLLFKTNRKVTVKQLKEDYFKKIECFDSVEISGVEDRFNASLGTYHDLLKIIKDKDFLDNEENEDILEDIVLTLTLFEDREMIEERLKTYAHLFDDKVMKQLKRRRYTGWGRLSRKLINGIRDKQSGKTILDFLKSDGFANRNFMQLIHDDSLTFKEDIQKAQVSGQGDSLHEHIANLAGSPAIKKGILQTVKVVDELVKVMGRHKPENIVIEMARENQTTQKGQKNSRERMKRIEEGIKELGSQILKEHPVENTQLQNEKLYLYYLQNGRDMYVDQELDINRLSDYDVDHIVPQSFLKDDSIDNKVLTRSDKARGKSDNVPSEEVVKKMKNYWRQLLNAKLITQRKFDNLTKAERGGLSELDKAGFIKRQLVETRQITKHVAQILDSRMNTKYDENDKLIREVKVITLKSKLVSDFRKDFQFYKVREINNYHHAHDAYLNAVVGTALIKKYPKLESEFVYGDYKVYDVRKMIAKSEQEIGKATAKYFFYSNIMNFFKTEITLANGEIRKRPLIETNGETGEIVWDKGRDFATVRKVLSMPQVNIVKKTEVQTGGFSKESILPKRNSDKLIARKKDWDPKKYGGFDSPTVAYSVLVVAKVEKGKSKKLKSVKELLGITIMERSSFEKNPIDFLEAKGYKEVKKDLIIKLPKYSLFELENGRKRMLASAGELQKGNELALPSKYVNFLYLASHYEKLKGSPEDNEQKQLFVEQHKHYLDEIIEQISEFSKRVILADANLDKVLSAYNKHRDKPIREQAENIIHLFTLTNLGAPAAFKYFDTTIDRKRYTSTKEVLDATLIHQSITGLYETRIDLSQLGGDGGEAAAKEAAAKEAAAKEAAAKGGLGIEDEYRLHETSTEPDVSLGSTWLSDFPQAWAETGGMGLAVRQAPLIIPLKATSTPVSIQQYPMSHEARLGIKPHIQRLLDQGILVPCQSPWNTPLLPVKKPGTNDYRPVQDLREVNKRVEDIHPTVPNPYNLLSGLPPSHQWYTVLDLKDAFFCLRLHPTSQPLFAFEWRDPGMGISGQLTWTRLPQGFKNSPTLFNEALHRDLADFRIQHPDLILLQYVDDILLAATSELDCQQGTRALLQTLGDLGYRASAKKAQICQKQVKYLGYLLREGQRWLTEARKETVMGQPVPKTPRQLREFLGKAGFCRLFIPGFAEMAAPLYPLTKPGTLFSWGPDQQKAYQEIKQALLTAPALGLPDLTKPFELFVDEKQGYAKGVLTQKLGPWRRPVAYLSKKLDPVAAGWPPCLRMVAAIAVLTKDAGKLTMGQPLVILAPHAVEALVKQPPDRWLSNARMTHYQAMLLDTDRVQFGPVVALNPATLLPLPEEGAPHDCLEILAETHGTRPDLTDQPIPDADHTWYTDGSSFLQEGQRKAGAAVTTETEVIWAGALPAGTSAQRAELIALTQALKMAEGKRLNVYTDSRYAFATAHIHGEIYRRRGWLTSEGREIKNKSEILALLKALFLPKRLSIIHCLGHQKGDSAEARGNRLADQAAREAAIKTPPDTSTLLIAGKRTADGSEFEKRTADGSEFESPKKKAKVE

SEQ ID NO: 2093 - protein, 2096 aa, synthetic construct; identical to SEQ ID NO: 2048

SEQ ID NO: 2094 - protein, 2115 aa, synthetic construct
MPAAKRVKLDGGDKKYSIGLDIGTNSVGWAVITDEYKVPSKKFKVLGNTDRHSIKKNLIGALLFDSGETAEATRLKRTARRRYTRRKNRICYLQEIFSNEMAKVDDSFFHRLEESFLVEEDKKHERHPIFGNIVDEVAYHEKYPTIYHLRKKLVDSTDKADLRLIYLALAHMIKFRGHFLIEGDLNPDNSDVDKLFIQLVQTYNQLFEENPINASGVDAKAILSARLSKSRRLENLIAQLPGEKKNGLFGNLIALSLGLTPNFKSNFDLAEDAKLQLSKDTYDDDLDNLLAQIGDQYADLFLAAKNLSDAILLSDILRVNTEITKAPLSASMIKRYDEHHQDLTLLKALVRQQLPEKYKEIFFDQSKNGYAGYIDGGASQEEFYKFIKPILEKMDGTEELLVKLNREDLLRKQRTFDNGSIPHQIHLGELHAILRRQEDFYPFLKDNREKIEKILTFRIPYYVGPLARGNSRFAWMTRKSEETITPWNFEEVVDKGASAQSFIERMTNFDKNLPNEKVLPKHSLLYEYFTVYNELTKVKYVTEGMRKPAFLSGEQKKAIVDLLFKTNRKVTVKQLKEDYFKKIECFDSVEISGVEDRFNASLGTYHDLLKIIKDKDFLDNEENEDILEDIVLTLTLFEDREMIEERLKTYAHLFDDKVMKQLKRRRYTGWGRLSRKLINGIRDKQSGKTILDFLKSDGFANRNFMQLIHDDSLTFKEDIQKAQVSGQGDSLHEHIANLAGSPAIKKGILQTVKVVDELVKVMGRHKPENIVIEMARENQTTQKGQKNSRERMKRIEEGIKELGSQILKEHPVENTQLQNEKLYLYYLQNGRDMYVDQELDINRLSDYDVDHIVPQSFLKDDSIDNKVLTRSDKARGKSDNVPSEEVVKKMKNYWRQLLNAKLITQRKFDNLTKAERGGLSELDKAGFIKRQLVETRQITKHVAQILDSRMNTKYDENDKLIREVKVITLKSKLVSDFRKDFQFYKVREINNYHHAHDAYLNAVVGTALIKKYPKLESEFVYGDYKVYDVRKMIAKSEQEIGKATAKYFFYSNIMNFFKTEITLANGEIRKRPLIETNGETGEIVWDKGRDFATVRKVLSMPQVNIVKKTEVQTGGFSKESILPKRNSDKLIARKKDWDPKKYGGFDSPTVAYSVLVVAKVEKGKSKKLKSVKELLGITIMERSSFEKNPIDFLEAKGYKEVKKDLIIKLPKYSLFELENGRKRMLASAGELQKGNELALPSKYVNFLYLASHYEKLKGSPEDNEQKQLFVEQHKHYLDEIIEQISEFSKRVILADANLDKVLSAYNKHRDKPIREQAENIIHLFTLTNLGAPAAFKYFDTTIDRKRYTSTKEVLDATLIHQSITGLYETRIDLSQLGGDGGGGGGSGGGGSGGGGSGGGGSGGGGSGGGGSGGLGIEDEYRLHETSTEPDVSLGSTWLSDFPQAWAETGGMGLAVRQAPLIIPLKATSTPVSIQQYPMSHEARLGIKPHIQRLLDQGILVPCQSPWNTPLLPVKKPGTNDYRPVQDLREVNKRVEDIHPTVPNPYNLLSGLPPSHQWYTVLDLKDAFFCLRLHPTSQPLFAFEWRDPGMGISGQLTWTRLPQGFKNSPTLFNEALHRDLADFRIQHPDLILLQYVDDILLAATSELDCQQGTRALLQTLGDLGYRASAKKAQICQKQVKYLGYLLREGQRWLTEARKETVMGQPVPKTPRQLREFLGKAGFCRLFIPGFAEMAAPLYPLTKPGTLFSWGPDQQKAYQEIKQALLTAPALGLPDLTKPFELFVDEKQGYAKGVLTQKLGPWRRPVAYLSKKLDPVAAGWPPCLRMVAAIAVLTKDAGKLTMGQPLVILAPHAVEALVKQPPDRWLSNARMTHYQAMLLDTDRVQFGPVVALNPATLLPLPEEGAPHDCLEILAETHGTRPDLTDQPIPDADHTWYTDGSSFLQEGQRKAGAAVTTETEVIWAGALPAGTSAQRAELIALTQALKMAEGKRLNVYTDSRYAFATAHIHGEIYRRRGWLTSEGREIKNKSEILALLKALFLPKRLSIIHCLGHQKGDSAEARGNRLADQAAREAAIKTPPDTSTLLIAGKRTADGSEFEKRTADGSEFESPKKKAKVE

SEQ ID NO: 2095 - protein, 2096 aa, synthetic construct
MPAAKRVKLDGGDKKYSIGLDIGTNSVGWAVITDEYKVPSKKFKVLGNTDRHSIKKNLIGALLFDSGETAEATRLKRTARRRYTRRKNRICYLQEIFSNEMAKVDDSFFHRLEESFLVEEDKKHERHPIFGNIVDEVAYHEKYPTIYHLRKKLVDSTDKADLRLIYLALAHMIKFRGHFLIEGDLNPDNSDVDKLFIQLVQTYNQLFEENPINASGVDAKAILSARLSKSRRLENLIAQLPGEKKNGLFGNLIALSLGLTPNFKSNFDLAEDAKLQLSKDTYDDDLDNLLAQIGDQYADLFLAAKNLSDAILLSDILRVNTEITKAPLSASMIKRYDEHHQDLTLLKALVRQQLPEKYKEIFFDQSKNGYAGYIDGGASQEEFYKFIKPILEKMDGTEELLVKLNREDLLRKQRTFDNGSIPHQIHLGELHAILRRQEDFYPFLKDNREKIEKILTFRIPYYVGPLARGNSRFAWMTRKSEETITPWNFEEVVDKGASAQSFIERMTNFDKNLPNEKVLPKHSLLYEYFTVYNELTKVKYVTEGMRKPAFLSGEQKKAIVDLLFKTNRKVTVKQLKEDYFKKIECFDSVEISGVEDRFNASLGTYHDLLKIIKDKDFLDNEENEDILEDIVLTLTLFEDREMIEERLKTYAHLFDDKVMKQLKRRRYTGWGRLSRKLINGIRDKQSGKTILDFLKSDGFANRNFMQLIHDDSLTFKEDIQKAQVSGQGDSLHEHIANLAGSPAIKKGILQTVKVVDELVKVMGRHKPENIVIEMARENQTTQKGQKNSRERMKRIEEGIKELGSQILKEHPVENTQLQNEKLYLYYLQNGRDMYVDQELDINRLSDYDVDHIVPQSFLKDDSIDNKVLTRSDKARGKSDNVPSEEVVKKMKNYWRQLLNAKLITQRKFDNLTKAERGGLSELDKAGFIKRQLVETRQITKHVAQILDSRMNTKYDENDKLIREVKVITLKSKLVSDFRKDFQFYKVREINNYHHAHDAYLNAVVGTALIKKYPKLESEFVYGDYKVYDVRKMIAKSEQEIGKATAKYFFYSNIMNFFKTEITLANGEIRKRPLIETNGETGEIVWDKGRDFATVRKVLSMPQVNIVKKTEVQTGGFSKESILPKRNSDKLIARKKDWDPKKYGGFDSPTVAYSVLVVAKVEKGKSKKLKSVKELLGITIMERSSFEKNPIDFLEAKGYKEVKKDLIIKLPKYSLFELENGRKRMLASAGELQKGNELALPSKYVNFLYLASHYEKLKGSPEDNEQKQLFVEQHKHYLDEIIEQISEFSKRVILADANLDKVLSAYNKHRDKPIREQAENIIHLFTLTNLGAPAAFKYFDTTIDRKRYTSTKEVLDATLIHQSITGLYETRIDLSQLGGDGGPAPEAAAKGSSGGLGIEDEYRLHETSTEPDVSLGSTWLSDFPQAWAETGGMGLAVRQAPLIIPLKATSTPVSIQQYPMSHEARLGIKPHIQRLLDQGILVPCQSPWNTPLLPVKKPGTNDYRPVQDLREVNKRVEDIHPTVPNPYNLLSGLPPSHQWYTVLDLKDAFFCLRLHPTSQPLFAFEWRDPGMGISGQLTWTRLPQGFKNSPTLFNEALHRDLADFRIQHPDLILLQYVDDILLAATSELDCQQGTRALLQTLGDLGYRASAKKAQICQKQVKYLGYLLREGQRWLTEARKETVMGQPVPKTPRQLREFLGKAGFCRLFIPGFAEMAAPLYPLTKPGTLFSWGPDQQKAYQEIKQALLTAPALGLPDLTKPFELFVDEKQGYAKGVLTQKLGPWRRPVAYLSKKLDPVAAGWPPCLRMVAAIAVLTKDAGKLTMGQPLVILAPHAVEALVKQPPDRWLSNARMTHYQAMLLDTDRVQFGPVVALNPATLLPLPEEGAPHDCLEILAETHGTRPDLTDQPIPDADHTWYTDGSSFLQEGQRKAGAAVTTETEVIWAGALPAGTSAQRAELIALTQALKMAEGKRLNVYTDSRYAFATAHIHGEIYRRRGWLTSEGREIKNKSEILALLKALFLPKRLSIIHCLGHQKGDSAEARGNRLADQAAREAAIKTPPDTSTLLIAGKRTADGSEFEKRTADGSEFESPKKKAKVE

SEQ ID NO: 2096 - protein, 2090 aa, synthetic construct
MPAAKRVKLDGGDKKYSIGLDIGTNSVGWAVITDEYKVPSKKFKVLGNTDRHSIKKNLIGALLFDSGETAEATRLKRTARRRYTRRKNRICYLQEIFSNEMAKVDDSFFHRLEESFLVEEDKKHERHPIFGNIVDEVAYHEKYPTIYHLRKKLVDSTDKADLRLIYLALAHMIKFRGHFLIEGDLNPDNSDVDKLFIQLVQTYNQLFEENPINASGVDAKAILSARLSKSRRLENLIAQLPGEKKNGLFGNLIALSLGLTPNFKSNFDLAEDAKLQLSKDTYDDDLDNLLAQIGDQYADLFLAAKNLSDAILLSDILRVNTEITKAPLSASMIKRYDEHHQDLTLLKALVRQQLPEKYKEIFFDQSKNGYAGYIDGGASQEEFYKFIKPILEKMDGTEELLVKLNREDLLRKQRTFDNGSIPHQIHLGELHAILRRQEDFYPFLKDNREKIEKILTFRIPYYVGPLARGNSRFAWMTRKSEETITPWNFEEVVDKGASAQSFIERMTNFDKNLPNEKVLPKHSLLYEYFTVYNELTKVKYVTEGMRKPAFLSGEQKKAIVDLLFKTNRKVTVKQLKEDYFKKIECFDSVEISGVEDRFNASLGTYHDLLKIIKDKDFLDNEENEDILEDIVLTLTLFEDREMIEERLKTYAHLFDDKVMKQLKRRRYTGWGRLSRKLINGIRDKQSGKTILDFLKSDGFANRNFMQLIHDDSLTFKEDIQKAQVSGQGDSLHEHIANLAGSPAIKKGILQTVKVVDELVKVMGRHKPENIVIEMARENQTTQKGQKNSRERMKRIEEGIKELGSQILKEHPVENTQLQNEKLYLYYLQNGRDMYVDQELDINRLSDYDVDHIVPQSFLKDDSIDNKVLTRSDKARGKSDNVPSEEVVKKMKNYWRQLLNAKLITQRKFDNLTKAERGGLSELDKAGFIKRQLVETRQITKHVAQILDSRMNTKYDENDKLIREVKVITLKSKLVSDFRKDFQFYKVREINNYHHAHDAYLNAVVGTALIKKYPKLESEFVYGDYKVYDVRKMIAKSEQEIGKATAKYFFYSNIMNFFKTEITLANGEIRKRPLIETNGETGEIVWDKGRDFATVRKVLSMPQVNIVKKTEVQTGGFSKESILPKRNSDKLIARKKDWDPKKYGGFDSPTVAYSVLVVAKVEKGKSKKLKSVKELLGITIMERSSFEKNPIDFLEAKGYKEVKKDLIIKLPKYSLFELENGRKRMLASAGELQKGNELALPSKYVNFLYLASHYEKLKGSPEDNEQKQLFVEQHKHYLDEIIEQISEFSKRVILADANLDKVLSAYNKHRDKPIREQAENIIHLFTLTNLGAPAAFKYFDTTIDRKRYTSTKEVLDATLIHQSITGLYETRIDLSQLGGDGGEAAAKGGLGIEDEYRLHETSTEPDVSLGSTWLSDFPQAWAETGGMGLAVRQAPLIIPLKATSTPVSIQQYPMSHEARLGIKPHIQRLLDQGILVPCQSPWNTPLLPVKKPGTNDYRPVQDLREVNKRVEDIHPTVPNPYNLLSGLPPSHQWYTVLDLKDAFFCLRLHPTSQPLFAFEWRDPGMGISGQLTWTRLPQGFKNSPTLFNEALHRDLADFRIQHPDLILLQYVDDILLAATSELDCQQGTRALLQTLGDLGYRASAKKAQICQKQVKYLGYLLREGQRWLTEARKETVMGQPVPKTPRQLREFLGKAGFCRLFIPGFAEMAAPLYPLTKPGTLFSWGPDQQKAYQEIKQALLTAPALGLPDLTKPFELFVDEKQGYAKGVLTQKLGPWRRPVAYLSKKLDPVAAGWPPCLRMVAAIAVLTKDAGKLTMGQPLVILAPHAVEALVKQPPDRWLSNARMTHYQAMLLDTDRVQFGPVVALNPATLLPLPEEGAPHDCLEILAETHGTRPDLTDQPIPDADHTWYTDGSSFLQEGQRKAGAAVTTETEVIWAGALPAGTSAQRAELIALTQALKMAEGKRLNVYTDSRYAFATAHIHGEIYRRRGWLTSEGREIKNKSEILALLKALFLPKRLSIIHCLGHQKGDSAEARGNRLADQAAREAAIKTPPDTSTLLIAGKRTADGSEFEKRTADGSEFESPKKKAKVE

SEQ ID NO: 2097 - protein, 2096 aa, synthetic construct
MPAAKRVKLDGGDKKYSIGLDIGTNSVGWAVITDEYKVPSKKFKVLGNTDRHSIKKNLIGALLFDSGETAEATRLKRTARRRYTRRKNRICYLQEIFSNEMAKVDDSFFHRLEESFLVEEDKKHERHPIFGNIVDEVAYHEKYPTIYHLRKKLVDSTDKADLRLIYLALAHMIKFRGHFLIEGDLNPDNSDVDKLFIQLVQTYNQLFEENPINASGVDAKAILSARLSKSRRLENLIAQLPGEKKNGLFGNLIALSLGLTPNFKSNFDLAEDAKLQLSKDTYDDDLDNLLAQIGDQYADLFLAAKNLSDAILLSDILRVNTEITKAPLSASMIKRYDEHHQDLTLLKALVRQQLPEKYKEIFFDQSKNGYAGYIDGGASQEEFYKFIKPILEKMDGTEELLVKLNREDLLRKQRTFDNGSIPHQIHLGELHAILRRQEDFYPFLKDNREKIEKILTFRIPYYVGPLARGNSRFAWMTRKSEETITPWNFEEVVDKGASAQSFIERMTNFDKNLPNEKVLPKHSLLYEYFTVYNELTKVKYVTEGMRKPAFLSGEQKKAIVDLLFKTNRKVTVKQLKEDYFKKIECFDSVEISGVEDRFNASLGTYHDLLKIIKDKDFLDNEENEDILEDIVLTLTLFEDREMIEERLKTYAHLFDDKVMKQLKRRRYTGWGRLSRKLINGIRDKQSGKTILDFLKSDGFANRNFMQLIHDDSLTFKEDIQKAQVSGQGDSLHEHIANLAGSPAIKKGILQTVKVVDELVKVMGRHKPENIVIEMARENQTTQKGQKNSRERMKRIEEGIKELGSQILKEHPVENTQLQNEKLYLYYLQNGRDMYVDQELDINRLSDYDVDHIVPQSFLKDDSIDNKVLTRSDKARGKSDNVPSEEVVKKMKNYWRQLLNAKLITQRKFDNLTKAERGGLSELDKAGFIKRQLVETRQITKHVAQILDSRMNTKYDENDKLIREVKVITLKSKLVSDFRKDFQFYKVREINNYHHAHDAYLNAVVGTALIKKYPKLESEFVYGDYKVYDVRKMIAKSEQEIGKATAKYFFYSNIMNFFKTEITLANGEIRKRPLIETNGETGEIVWDKGRDFATVRKVLSMPQVNIVKKTEVQTGGFSKESILPKRNSDKLIARKKDWDPKKYGGFDSPTVAYSVLVVAKVEKGKSKKLKSVKELLGITIMERSSFEKNPIDFLEAKGYKEVKKDLIIKLPKYSLFELENGRKRMLASAGELQKGNELALPSKYVNFLYLASHYEKLKGSPEDNEQKQLFVEQHKHYLDEIIEQISEFSKRVILADANLDKVLSAYNKHRDKPIREQAENIIHLFTLTNLGAPAAFKYFDTTIDRKRYTSTKEVLDATLIHQSITGLYETRIDLSQLGGDGGPAPEAAAKGGSGGLGIEDEYRLHETSTEPDVSLGSTWLSDFPQAWAETGGMGLAVRQAPLIIPLKATSTPVSIQQYPMSHEARLGIKPHIQRLLDQGILVPCQSPWNTPLLPVKKPGTNDYRPVQDLREVNKRVEDIHPTVPNPYNLLSGLPPSHQWYTVLDLKDAFFCLRLHPTSQPLFAFEWRDPGMGISGQLTWTRLPQGFKNSPTLFNEALHRDLADFRIQHPDLILLQYVDDILLAATSELDCQQGTRALLQTLGDLGYRASAKKAQICQKQVKYLGYLLREGQRWLTEARKETVMGQPVPKTPRQLREFLGKAGFCRLFIPGFAEMAAPLYPLTKPGTLFSWGPDQQKAYQEIKQALLTAPALGLPDLTKPFELFVDEKQGYAKGVLTQKLGPWRRPVAYLSKKLDPVAAGWPPCLRMVAAIAVLTKDAGKLTMGQPLVILAPHAVEALVKQPPDRWLSNARMTHYQAMLLDTDRVQFGPVVALNPATLLPLPEEGAPHDCLEILAETHGTRPDLTDQPIPDADHTWYTDGSSFLQEGQRKAGAAVTTETEVIWAGALPAGTSAQRAELIALTQALKMAEGKRLNVYTDSRYAFATAHIHGEIYRRRGWLTSEGREIKNKSEILALLKALFLPKRLSIIHCLGHQKGDSAEARGNRLADQAAREAAIKTPPDTSTLLIAGKRTADGSEFEKRTADGSEFESPKKKAKVE

SEQ ID NO: 2098 - protein, 2115 aa, synthetic construct
MPAAKRVKLDGGDKKYSIGLDIGTNSVGWAVITDEYKVPSKKFKVLGNTDRHSIKKNLIGALLFDSGETAEATRLKRTARRRYTRRKNRICYLQEIFSNEMAKVDDSFFHRLEESFLVEEDKKHERHPIFGNIVDEVAYHEKYPTIYHLRKKLVDSTDKADLRLIYLALAHMIKFRGHFLIEGDLNPDNSDVDKLFIQLVQTYNQLFEENPINASGVDAKAILSARLSKSRRLENLIAQLPGEKKNGLFGNLIALSLGLTPNFKSNFDLAEDAKLQLSKDTYDDDLDNLLAQIGDQYADLFLAAKNLSDAILLSDILRVNTEITKAPLSASMIKRYDEHHQDLTLLKALVRQQLPEKYKEIFFDQSKNGYAGYIDGGASQEEFYKFIKPILEKMDGTEELLVKLNREDLLRKQRTFDNGSIPHQIHLGELHAILRRQEDFYPFLKDNREKIEKILTFRIPYYVGPLARGNSRFAWMTRKSEETITPWNFEEVVDKGASAQSFIERMTNFDKNLPNEKVLPKHSLLYEYFTVYNELTKVKYVTEGMRKPAFLSGEQKKAIVDLLFKTNRKVTVKQLKEDYFKKIECFDSVEISGVEDRFNASLGTYHDLLKIIKDKDFLDNEENEDILEDIVLTLTLFEDREMIEERLKTYAHLFDDKVMKQLKRRRYTGWGRLSRKLINGIRDKQSGKTILDFLKSDGFANRNFMQLIHDDSLTFKEDIQKAQVSGQGDSLHEHIANLAGSPAIKKGILQTVKVVDELVKVMGRHKPENIVIEMARENQTTQKGQKNSRERMKRIEEGIKELGSQILKEHPVENTQLQNEKLYLYYLQNGRDMYVDQELDINRLSDYDVDHIVPQSFLKDDSIDNKVLTRSDKARGKSDNVPSEEVVKKMKNYWRQLLNAKLITQRKFDNLTKAERGGLSELDKAGFIKRQLVETRQITKHVAQILDSRMNTKYDENDKLIREVKVITLKSKLVSDFRKDFQFYKVREINNYHHAHDAYLNAVVGTALIKKYPKLESEFVYGDYKVYDVRKMIAKSEQEIGKATAKYFFYSNIMNFFKTEITLANGEIRKRPLIETNGETGEIVWDKGRDFATVRKVLSMPQVNIVKKTEVQTGGFSKESILPKRNSDKLIARKKDWDPKKYGGFDSPTVAYSVLVVAKVEKGKSKKLKSVKELLGITIMERSSFEKNPIDFLEAKGYKEVKKDLIIKLPKYSLFELENGRKRMLASAGELQKGNELALPSKYVNFLYLASHYEKLKGSPEDNEQKQLFVEQHKHYLDEIIEQISEFSKRVILADANLDKVLSAYNKHRDKPIREQAENIIHLFTLTNLGAPAAFKYFDTTIDRKRYTSTKEVLDATLIHQSITGLYETRIDLSQLGGDGGEAAAKEAAAKEAAAKEAAAKEAAAKEAAAKGGLGIEDEYRLHETSTEPDVSLGSTWLSDFPQAWAETGGMGLAVRQAPLIIPLKATSTPVSIQQYPMSHEARLGIKPHIQRLLDQGILVPCQSPWNTPLLPVKKPGTNDYRPVQDLREVNKRVEDIHPTVPNPYNLLSGLPPSHQWYTVLDLKDAFFCLRLHPTSQPLFAFEWRDPGMGISGQLTWTRLPQGFKNSPTLFNEALHRDLADFRIQHPDLILLQYVDDILLAATSELDCQQGTRALLQTLGDLGYRASAKKAQICQKQVKYLGYLLREGQRWLTEARKETVMGQPVPKTPRQLREFLGKAGFCRLFIPGFAEMAAPLYPLTKPGTLFSWGPDQQKAYQEIKQALLTAPALGLPDLTKPFELFVDEKQGYAKGVLTQKLGPWRRPVAYLSKKLDPVAAGWPPCLRMVAAIAVLTKDAGKLTMGQPLVILAPHAVEALVKQPPDRWLSNARMTHYQAMLLDTDRVQFGPVVALNPATLLPLPEEGAPHDCLEILAETHGTRPDLTDQPIPDADHTWYTDGSSFLQEGQRKAGAAVTTETEVIWAGALPAGTSAQRAELIALTQALKMAEGKRLNVYTDSRYAFATAHIHGEIYRRRGWLTSEGREIKNKSEILALLKALFLPKRLSIIHCLGHQKGDSAEARGNRLADQAAREAAIKTPPDTSTLLIAGKRTADGSEFEKRTADGSEFESPKKKAKVE

SEQ ID NO: 2099 - protein, 2096 aa, synthetic construct
MPAAKRVKLDGGDKKYSIGLDIGTNSVGWAVITDEYKVPSKKFKVLGNTDRHSIKKNLIGALLFDSGETAEATRLKRTARRRYTRRKNRICYLQEIFSNEMAKVDDSFFHRLEESFLVEEDKKHERHPIFGNIVDEVAYHEKYPTIYHLRKKLVDSTDKADLRLIYLALAHMIKFRGHFLIEGDLNPDNSDVDKLFIQLVQTYNQLFEENPINASGVDAKAILSARLSKSRRLENLIAQLPGEKKNGLFGNLIALSLGLTPNFKSNFDLAEDAKLQLSKDTYDDDLDNLLAQIGDQYADLFLAAKNLSDAILLSDILRVNTEITKAPLSASMIKRYDEHHQDLTLLKALVRQQLPEKYKEIFFDQSKNGYAGYIDGGASQEEFYKFIKPILEKMDGTEELLVKLNREDLLRKQRTFDNGSIPHQIHLGELHAILRRQEDFYPFLKDNREKIEKILTFRIPYYVGPLARGNSRFAWMTRKSEETITPWNFEEVVDKGASAQSFIERMTNFDKNLPNEKVLPKHSLLYEYFTVYNELTKVKYVTEGMRKPAFLSGEQKKAIVDLLFKTNRKVTVKQLKEDYFKKIECFDSVEISGVEDRFNASLGTYHDLLKIIKDKDFLDNEENEDILEDIVLTLTLFEDREMIEERLKTYAHLFDDKVMKQLKRRRYTGWGRLSRKLINGIRDKQSGKTILDFLKSDGFANRNFMQLIHDDSLTFKEDIQKAQVSGQGDSLHEHIANLAGSPAIKKGILQTVKVVDELVKVMGRHKPENIVIEMARENQTTQKGQKNSRERMKRIEEGIKELGSQILKEHPVENTQLQNEKLYLYYLQNGRDMYVDQELDINRLSDYDVDHIVPQSFLKDDSIDNKVLTRSDKARGKSDNVPSEEVVKKMKNYWRQLLNAKLITQRKFDNLTKAERGGLSELDKAGFIKRQLVETRQITKHVAQILDSRMNTKYDENDKLIREVKVITLKSKLVSDFRKDFQFYKVREINNYHHAHDAYLNAVVGTALIKKYPKLESEFVYGDYKVYDVRKMIAKSEQEIGKATAKYFFYSNIMNFFKTEITLANGEIRKRPLIETNGETGEIVWDKGRDFATVRKVLSMPQVNIVKKTEVQTGGFSKESILPKRNSDKLIARKKDWDPKKYGGFDSPTVAYSVLVVAKVEKGKSKKLKSVKELLGITIMERSSFEKNPIDFLEAKGYKEVKKDLIIKLPKYSLFELENGRKRMLASAGELQKGNELALPSKYVNFLYLASHYEKLKGSPEDNEQKQLFVEQHKHYLDEIIEQISEFSKRVILADANLDKVLSAYNKHRDKPIREQAENIIHLFTLTNLGAPAAFKYFDTTIDRKRYTSTKEVLDATLIHQSITGLYETRIDLSQLGGDGGEAAAKPAPGGSGGLGIEDEYRLHETSTEPDVSLGSTWLSDFPQAWAETGGMGLAVRQAPLIIPLKATSTPVSIQQYPMSHEARLGIKPHIQRLLDQGILVPCQSPWNTPLLPVKKPGTNDYRPVQDLREVNKRVEDIHPTVPNPYNLLSGLPPSHQWYTVLDLKDAFFCLRLHPTSQPLFAFEWRDPGMGISGQLTWTRLPQGFKNSPTLFNEALHRDLADFRIQHPDLILLQYVDDILLAATSELDCQQGTRALLQTLGDLGYRASAKKAQICQKQVKYLGYLLREGQRWLTEARKETVMGQPVPKTPRQLREFLGKAGFCRLFIPGFAEMAAPLYPLTKPGTLFSWGPDQQKAYQEIKQALLTAPALGLPDLTKPFELFVDEKQGYAKGVLTQKLGPWRRPVAYLSKKLDPVAAGWPPCLRMVAAIAVLTKDAGKLTMGQPLVILAPHAVEALVKQPPDRWLSNARMTHYQAMLLDTDRVQFGPVVALNPATLLPLPEEGAPHDCLEILAETHGTRPDLTDQPIPDADHTWYTDGSSFLQEGQRKAGAAVTTETEVIWAGALPAGTSAQRAELIALTQALKMAEGKRLNVYTDSRYAFATAHIHGEIYRRRGWLTSEGREIKNKSEILALLKALFLPKRLSIIHCLGHQKGDSAEARGNRLADQAAREAAIKTPPDTSTLLIAGKRTADGSEFEKRTADGSEFESPKKKAKVE

SEQ ID NO: 2100 - protein, 2096 aa, synthetic construct
MPAAKRVKLDGGDKKYSIGLDIGTNSVGWAVITDEYKVPSKKFKVLGNTDRHSIKKNLIGALLFDSGETAEATRLKRTARRRYTRRKNRICYLQEIFSNEMAKVDDSFFHRLEESFLVEEDKKHERHPIFGNIVDEVAYHEKYPTIYHLRKKLVDSTDKADLRLIYLALAHMIKFRGHFLIEGDLNPDNSDVDKLFIQLVQTYNQLFEENPINASGVDAKAILSARLSKSRRLENLIAQLPGEKKNGLFGNLIALSLGLTPNFKSNFDLAEDAKLQLSKDTYDDDLDNLLAQIGDQYADLFLAAKNLSDAILLSDILRVNTEITKAPLSASMIKRYDEHHQDLTLLKALVRQQLPEKYKEIFFDQSKNGYAGYIDGGASQEEFYKFIKPILEKMDGTEELLVKLNREDLLRKQRTFDNGSIPHQIHLGELHAILRRQEDFYPFLKDNREKIEKILTFRIPYYVGPLARGNSRFAWMTRKSEETITPWNFEEVVDKGASAQSFIERMTNFDKNLPNEKVLPKHSLLYEYFTVYNELTKVKYVTEGMRKPAFLSGEQKKAIVDLLFKTNRKVTVKQLKEDYFKKIECFDSVEISGVEDRFNASLGTYHDLLKIIKDKDFLDNEENEDILEDIVLTLTLFEDREMIEERLKTYAHLFDDKVMKQLKRRRYTGWGRLSRKLINGIRDKQSGKTILDFLKSDGFANRNFMQLIHDDSLTFKEDIQKAQVSGQGDSLHEHIANLAGSPAIKKGILQTVKVVDELVKVMGRHKPENIVIEMARENQTTQKGQKNSRERMKRIEEGIKELGSQILKEHPVENTQLQNEKLYLYYLQNGRDMYVDQELDINRLSDYDVDHIVPQSFLKDDSIDNKVLTRSDKARGKSDNVPSEEVVKKMKNYWRQLLNAKLITQRKFDNLTKAERGGLSELDKAGFIKRQLVETRQITKHVAQILDSRMNTKYDENDKLIREVKVITLKSKLVSDFRKDFQFYKVREINNYHHAHDAYLNAVVGTALIKKYPKLESEFVYGDYKVYDVRKMIAKSEQEIGKATAKYFFYSNIMNFFKTEITLANGEIRKRPLIETNGETGEIVWDKGRDFATVRKVLSMPQVNIVKKTEVQTGGFSKESILPKRNSDKLIARKKDWDPKKYGGFDSPTVAYSVLVVAKVEKGKSKKLKSVKELLGITIMERSSFEKNPIDFLEAKGYKEVKKDLIIKLPKYSLFELENGRKRMLASAGELQKGNELALPSKYVNFLYLASHYEKLKGSPEDNEQKQLFVEQHKHYLDEIIEQISEFSKRVILADANLDKVLSAYNKHRDKPIREQAENIIHLFTLTNLGAPAAFKYFDTTIDRKRYTSTKEVLDATLIHQSITGLYETRIDLSQLGGDGGGGSGSSEAAAKGGLGIEDEYRLHETSTEPDVSLGSTWLSDFPQAWAETGGMGLAVRQAPLIIPLKATSTPVSIQQYPMSHEARLGIKPHIQRLLDQGILVPCQSPWNTPLLPVKKPGTNDYRPVQDLREVNKRVEDIHPTVPNPYNLLSGLPPSHQWYTVLDLKDAFFCLRLHPTSQPLFAFEWRDPGMGISGQLTWTRLPQGFKNSPTLFNEALHRDLADFRIQHPDLILLQYVDDILLAATSELDCQQGTRALLQTLGDLGYRASAKKAQICQKQVKYLGYLLREGQRWLTEARKETVMGQPVPKTPRQLREFLGKAGFCRLFIPGFAEMAAPLYPLTKPGTLFSWGPDQQKAYQEIKQALLTAPALGLPDLTKPFELFVDEKQGYAKGVLTQKLGPWRRPVAYLSKKLDPVAAGWPPCLRMVAAIAVLTKDAGKLTMGQPLVILAPHAVEALVKQPPDRWLSNARMTHYQAMLLDTDRVQFGPVVALNPATLLPLPEEGAPHDCLEILAETHGTRPDLTDQPIPDADHTWYTDGSSFLQEGQRKAGAAVTTETEVIWAGALPAGTSAQRAELIALTQALKMAEGKRLNVYTDSRYAFATAHIHGEIYRRRGWLTSEGREIKNKSEILALLKALFLPKRLSIIHCLGHQKGDSAEARGNRLADQAAREAAIKTPPDTSTLLIAGKRTADGSEFEKRTADGSEFESPKKKAKVE

SEQ ID NO: 2101 - protein, 2094 aa, synthetic construct
MPAAKRVKLDGGDKKYSIGLDIGTNSVGWAVITDEYKVPSKKFKVLGNTDRHSIKKNLIGALLFDSGETAEATRLKRTARRRYTRRKNRICYLQEIFSNEMAKVDDSFFHRLEESFLVEEDKKHERHPIFGNIVDEVAYHEKYPTIYHLRKKLVDSTDKADLRLIYLALAHMIKFRGHFLIEGDLNPDNSDVDKLFIQLVQTYNQLFEENPINASGVDAKAILSARLSKSRRLENLIAQLPGEKKNGLFGNLIALSLGLTPNFKSNFDLAEDAKLQLSKDTYDDDLDNLLAQIGDQYADLFLAAKNLSDAILLSDILRVNTEITKAPLSASMIKRYDEHHQDLTLLKALVRQQLPEKYKEIFFDQSKNGYAGYIDGGASQEEFYKFIKPILEKMDGTEELLVKLNREDLLRKQRTFDNGSIPHQIHLGELHAILRRQEDFYPFLKDNREKIEKILTFRIPYYVGPLARGNSRFAWMTRKSEETITPWNFEEVVDKGASAQSFIERMTNFDKNLPNEKVLPKHSLLYEYFTVYNELTKVKYVTEGMRKPAFLSGEQKKAIVDLLFKTNRKVTVKQLKEDYFKKIECFDSVEISGVEDRFNASLGTYHDLLKIIKDKDFLDNEENEDILEDIVLTLTLFEDREMIEERLKTYAHLFDDKVMKQLKRRRYTGWGRLSRKLINGIRDKQSGKTILDFLKSDGFANRNFMQLIHDDSLTFKEDIQKAQVSGQGDSLHEHIANLAGSPAIKKGILQTVKVVDELVKVMGRHKPENIVIEMARENQTTQKGQKNSRERMKRIEEGIKELGSQILKEHPVENTQLQNEKLYLYYLQNGRDMYVDQELDINRLSDYDVDHIVPQSFLKDDSIDNKVLTRSDKARGKSDNVPSEEVVKKMKNYWRQLLNAKLITQRKFDNLTKAERGGLSELDKAGFIKRQLVETRQITKHVAQILDSRMNTKYDENDKLIREVKVITLKSKLVSDFRKDFQFYKVREINNYHHAHDAYLNAVVGTALIKKYPKLESEFVYGDYKVYDVRKMIAKSEQEIGKATAKYFFYSNIMNFFKTEITLANGEIRKRPLIETNGETGEIVWDKGRDFATVRKVLSMPQVNIVKKTEVQTGGFSKESILPKRNSDKLIARKKDWDPKKYGGFDSPTVAYSVLVVAKVEKGKSKKLKSVKELLGITIMERSSFEKNPIDFLEAKGYKEVKKDLIIKLPKYSLFELENGRKRMLASAGELQKGNELALPSKYVNFLYLASHYEKLKGSPEDNEQKQLFVEQHKHYLDEIIEQISEFSKRVILADANLDKVLSAYNKHRDKPIREQAENIIHLFTLTNLGAPAAFKYFDTTIDRKRYTSTKEVLDATLIHQSITGLYETRIDLSQLGGDGGPAPGGGGSSGGLGIEDEYRLHETSTEPDVSLGSTWLSDFPQAWAETGGMGLAVRQAPLIIPLKATSTPVSIQQYPMSHEARLGIKPHIQRLLDQGILVPCQSPWNTPLLPVKKPGTNDYRPVQDLREVNKRVEDIHPTVPNPYNLLSGLPPSHQWYTVLDLKDAFFCLRLHPTSQPLFAFEWRDPGMGISGQLTWTRLPQGFKNSPTLFNEALHRDLADFRIQHPDLILLQYVDDILLAATSELDCQQGTRALLQTLGDLGYRASAKKAQICQKQVKYLGYLLREGQRWLTEARKETVMGQPVPKTPRQLREFLGKAGFCRLFIPGFAEMAAPLYPLTKPGTLFSWGPDQQKAYQEIKQALLTAPALGLPDLTKPFELFVDEKQGYAKGVLTQKLGPWRRPVAYLSKKLDPVAAGWPPCLRMVAAIAVLTKDAGKLTMGQPLVILAPHAVEALVKQPPDRWLSNARMTHYQAMLLDTDRVQFGPVVALNPATLLPLPEEGAPHDCLEILAETHGTRPDLTDQPIPDADHTWYTDGSSFLQEGQRKAGAAVTTETEVIWAGALPAGTSAQRAELIALTQALKMAEGKRLNVYTDSRYAFATAHIHGEIYRRRGWLTSEGREIKNKSEILALLKALFLPKRLSIIHCLGHQKGDSAEARGNRLADQAAREAAIKTPPDTSTLLIAGKRTADGSEFEKRTADGSEFESPKKKAKVE

SEQ ID NO: 2102 - protein, 2096 aa, synthetic construct
MPAAKRVKLDGGDKKYSIGLDIGTNSVGWAVITDEYKVPSKKFKVLGNTDRHSIKKNLIGALLFDSGETAEATRLKRTARRRYTRRKNRICYLQEIFSNEMAKVDDSFFHRLEESFLVEEDKKHERHPIFGNIVDEVAYHEKYPTIYHLRKKLVDSTDKADLRLIYLALAHMIKFRGHFLIEGDLNPDNSDVDKLFIQLVQTYNQLFEENPINASGVDAKAILSARLSKSRRLENLIAQLPGEKKNGLFGNLIALSLGLTPNFKSNFDLAEDAKLQLSKDTYDDDLDNLLAQIGDQYADLFLAAKNLSDAILLSDILRVNTEITKAPLSASMIKRYDEHHQDLTLLKALVRQQLPEKYKEIFFDQSKNGYAGYIDGGASQEEFYKFIKPILEKMDGTEELLVKLNREDLLRKQRTFDNGSIPHQIHLGELHAILRRQEDFYPFLKDNREKIEKILTFRIPYYVGPLARGNSRFAWMTRKSEETITPWNFEEVVDKGASAQSFIERMTNFDKNLPNEKVLPKHSLLYEYFTVYNELTKVKYVTEGMRKPAFLSGEQKKAIVDLLFKTNRKVTVKQLKEDYFKKIECFDSVEISGVEDRFNASLGTYHDLLKIIKDKDFLDNEENEDILEDIVLTLTLFEDREMIEERLKTYAHLFDDKVMKQLKRRRYTGWGRLSRKLINGIRDKQSGKTILDFLKSDGFANRNFMQLIHDDSLTFKEDIQKAQVSGQGDSLHEHIANLAGSPAIKKGILQTVKVVDELVKVMGRHKPENIVIEMARENQTTQKGQKNSRERMKRIEEGIKELGSQILKEHPVENTQLQNEKLYLYYLQNGRDMYVDQELDINRLSDYDVDHIVPQSFLKDDSIDNKVLTRSDKARGKSDNVPSEEVVKKMKNYWRQLLNAKLITQRKFDNLTKAERGGLSELDKAGFIKRQLVETRQITKHVAQILDSRMNTKYDENDKLIREVKVITLKSKLVSDFRKDFQFYKVREINNYHHAHDAYLNAVVGTALIKKYPKLESEFVYGDYKVYDVRKMIAKSEQEIGKATAKYFFYSNIMNFFKTEITLANGEIRKRPLIETNGETGEIVWDKGRDFATVRKVLSMPQVNIVKKTEVQTGGFSKESILPKRNSDKLIARKKDWDPKKYGGFDSPTVAYSVLVVAKVEKGKSKKLKSVKELLGITIMERSSFEKNPIDFLEAKGYKEVKKDLIIKLPKYSLFELENGRKRMLASAGELQKGNELALPSKYVNFLYLASHYEKLKGSPEDNEQKQLFVEQHKHYLDEIIEQISEFSKRVILADANLDKVLSAYNKHRDKPIREQAENIIHLFTLTNLGAPAAFKYFDTTIDRKRYTSTKEVLDATLIHQSITGLYETRIDLSQLGGDGGGGSEAAAKGGGGGLGIEDEYRLHETSTEPDVSLGSTWLSDFPQAWAETGGMGLAVRQAPLIIPLKATSTPVSIQQYPMSHEARLGIKPHIQRLLDQGILVPCQSPWNTPLLPVKKPGTNDYRPVQDLREVNKRVEDIHPTVPNPYNLLSGLPPSHQWYTVLDLKDAFFCLRLHPTSQPLFAFEWRDPGMGISGQLTWTRLPQGFKNSPTLFNEALHRDLADFRIQHPDLILLQYVDDILLAATSELDCQQGTRALLQTLGDLGYRASAKKAQICQKQVKYLGYLLREGQRWLTEARKETVMGQPVPKTPRQLREFLGKAGFCRLFIPGFAEMAAPLYPLTKPGTLFSWGPDQQKAYQEIKQALLTAPALGLPDLTKPFELFVDEKQGYAKGVLTQKLGPWRRPVAYLSKKLDPVAAGWPPCLRMVAAIAVLTKDAGKLTMGQPLVILAPHAVEALVKQPPDRWLSNARMTHYQAMLLDTDRVQFGPVVALNPATLLPLPEEGAPHDCLEILAETHGTRPDLTDQPIPDADHTWYTDGSSFLQEGQRKAGAAVTTETEVIWAGALPAGTSAQRAELIALTQALKMAEGKRLNVYTDSRYAFATAHIHGEIYRRRGWLTSEGREIKNKSEILALLKALFLPKRLSIIHCLGHQKGDSAEARGNRLADQAAREAAIKTPPDTSTLLIAGKRTADGSEFEKRTADGSEFESPKKKAKVE

SEQ ID NO: 2103 - protein, 2088 aa, synthetic construct
MPAAKRVKLDGGDKKYSIGLDIGTNSVGWAVITDEYKVPSKKFKVLGNTDRHSIKKNLIGALLFDSGETAEATRLKRTARRRYTRRKNRICYLQEIFSNEMAKVDDSFFHRLEESFLVEEDKKHERHPIFGNIVDEVAYHEKYPTIYHLRKKLVDSTDKADLRLIYLALAHMIKFRGHFLIEGDLNPDNSDVDKLFIQLVQTYNQLFEENPINASGVDAKAILSARLSKSRRLENLIAQLPGEKKNGLFGNLIALSLGLTPNFKSNFDLAEDAKLQLSKDTYDDDLDNLLAQIGDQYADLFLAAKNLSDAILLSDILRVNTEITKAPLSASMIKRYDEHHQDLTLLKALVRQQLPEKYKEIFFDQSKNGYAGYIDGGASQEEFYKFIKPILEKMDGTEELLVKLNREDLLRKQRTFDNGSIPHQIHLGELHAILRRQEDFYPFLKDNREKIEKILTFRIPYYVGPLARGNSRFAWMTRKSEETITPWNFEEVVDKGASAQSFIERMTNFDKNLPNEKVLPKHSLLYEYFTVYNELTKVKYVTEGMRKPAFLSGEQKKAIVDLLFKTNRKVTVKQLKEDYFKKIECFDSVEISGVEDRFNASLGTYHDLLKIIKDKDFLDNEENEDILEDIVLTLTLFEDREMIEERLKTYAHLFDDKVMKQLKRRRYTGWGRLSRKLINGIRDKQSGKTILDFLKSDGFANRNFMQLIHDDSLTFKEDIQKAQVSGQGDSLHEHIANLAGSPAIKKGILQTVKVVDELVKVMGRHKPENIVIEMARENQTTQKGQKNSRERMKRIEEGIKELGSQILKEHPVENTQLQNEKLYLYYLQNGRDMYVDQELDINRLSDYDVDHIVPQSFLKDDSIDNKVLTRSDKARGKSDNVPSEEVVKKMKNYWRQLLNAKLITQRKFDNLTKAERGGLSELDKAGFIKRQLVETRQITKHVAQILDSRMNTKYDENDKLIREVKVITLKSKLVSDFRKDFQFYKVREINNYHHAHDAYLNAVVGTALIKKYPKLESEFVYGDYKVYDVRKMIAKSEQEIGKATAKYFFYSNIMNFFKTEITLANGEIRKRPLIETNGETGEIVWDKGRDFATVRKVLSMPQVNIVKKTEVQTGGFSKESILPKRNSDKLIARKKDWDPKKYGGFDSPTVAYSVLVVAKVEKGKSKKLKSVKELLGITIMERSSFEKNPIDFLEAKGYKEVKKDLIIKLPKYSLFELENGRKRMLASAGELQKGNELALPSKYVNFLYLASHYEKLKGSPEDNEQKQLFVEQHKHYLDEIIEQISEFSKRVILADANLDKVLSAYNKHRDKPIREQAENIIHLFTLTNLGAPAAFKYFDTTIDRKRYTSTKEVLDATLIHQSITGLYETRIDLSQLGGDGGPAPGGLGIEDEYRLHETSTEPDVSLGSTWLSDFPQAWAETGGMGLAVRQAPLIIPLKATSTPVSIQQYPMSHEARLGIKPHIQRLLDQGILVPCQSPWNTPLLPVKKPGTNDYRPVQDLREVNKRVEDIHPTVPNPYNLLSGLPPSHQWYTVLDLKDAFFCLRLHPTSQPLFAFEWRDPGMGISGQLTWTRLPQGFKNSPTLFNEALHRDLADFRIQHPDLILLQYVDDILLAATSELDCQQGTRALLQTLGDLGYRASAKKAQICQKQVKYLGYLLREGQRWLTEARKETVMGQPVPKTPRQLREFLGKAGFCRLFIPGFAEMAAPLYPLTKPGTLFSWGPDQQKAYQEIKQALLTAPALGLPDLTKPFELFVDEKQGYAKGVLTQKLGPWRRPVAYLSKKLDPVAAGWPPCLRMVAAIAVLTKDAGKLTMGQPLVILAPHAVEALVKQPPDRWLSNARMTHYQAMLLDTDRVQFGPVVALNPATLLPLPEEGAPHDCLEILAETHGTRPDLTDQPIPDADHTWYTDGSSFLQEGQRKAGAAVTTETEVIWAGALPAGTSAQRAELIALTQALKMAEGKRLNVYTDSRYAFATAHIHGEIYRRRGWLTSEGREIKNKSEILALLKALFLPKRLSIIHCLGHQKGDSAEARGNRLADQAAREAAIKTPPDTSTLLIAGKRTADGSEFEKRTADGSEFESPKKKAKVE

SEQ ID NO: 2104 - protein, 2093 aa, synthetic construct
MPAAKRVKLDGGDKKYSIGLDIGTNSVGWAVITDEYKVPSKKFKVLGNTDRHSIKKNLIGALLFDSGETAEATRLKRTARRRYTRRKNRICYLQEIFSNEMAKVDDSFFHRLEESFLVEEDKKHERHPIFGNIVDEVAYHEKYPTIYHLRKKLVDSTDKADLRLIYLALAHMIKFRGHFLIEGDLNPDNSDVDKLFIQLVQTYNQLFEENPINASGVDAKAILSARLSKSRRLENLIAQLPGEKKNGLFGNLIALSLGLTPNFKSNFDLAEDAKLQLSKDTYDDDLDNLLAQIGDQYADLFLAAKNLSDAILLSDILRVNTEITKAPLSASMIKRYDEHHQDLTLLKALVRQQLPEKYKEIFFDQSKNGYAGYIDGGASQEEFYKFIKPILEKMDGTEELLVKLNREDLLRKQRTFDNGSIPHQIHLGELHAILRRQEDFYPFLKDNREKIEKILTFRIPYYVGPLARGNSRFAWMTRKSEETITPWNFEEVVDKGASAQSFIERMTNFDKNLPNEKVLPKHSLLYEYFTVYNELTKVKYVTEGMRKPAFLSGEQKKAIVDLLFKTNRKVTVKQLKEDYFKKIECFDSVEISGVEDRFNASLGTYHDLLKIIKDKDFLDNEENEDILEDIVLTLTLFEDREMIEERLKTYAHLFDDKVMKQLKRRRYTGWGRLSRKLINGIRDKQSGKTILDFLKSDGFANRNFMQLIHDDSLTFKEDIQKAQVSGQGDSLHEHIANLAGSPAIKKGILQTVKVVDELVKVMGRHKPENIVIEMARENQTTQKGQKNSRERMKRIEEGIKELGSQILKEHPVENTQLQNEKLYLYYLQNGRDMYVDQELDINRLSDYDVDHIVPQSFLKDDSIDNKVLTRSDKARGKSDNVPSEEVVKKMKNYWRQLLNAKLITQRKFDNLTKAERGGLSELDKAGFIKRQLVETRQITKHVAQILDSRMNTKYDENDKLIREVKVITLKSKLVSDFRKDFQFYKVREINNYHHAHDAYLNAVVGTALIKKYPKLESEFVYGDYKVYDVRKMIAKSEQEIGKATAKYFFYSNIMNFFKTEITLANGEIRKRPLIETNGETGEIVWDKGRDFATVRKVLSMPQVNIVKKTEVQTGGFSKESILPKRNSDKLIARKKDWDPKKYGGFDSPTVAYSVLVVAKVEKGKSKKLKSVKELLGITIMERSSFEKNPIDFLEAKGYKEVKKDLIIKLPKYSLFELENGRKRMLASAGELQKGNELALPSKYVNFLYLASHYEKLKGSPEDNEQKQLFVEQHKHYLDEIIEQISEFSKRVILADANLDKVLSAYNKHRDKPIREQAENIIHLFTLTNLGAPAAFKYFDTTIDRKRYTSTKEVLDATLIHQSITGLYETRIDLSQLGGDGGEAAAKGGSGGLGIEDEYRLHETSTEPDVSLGSTWLSDFPQAWAETGGMGLAVRQAPLIIPLKATSTPVSIQQYPMSHEARLGIKPHIQRLLDQGILVPCQSPWNTPLLPVKKPGTNDYRPVQDLREVNKRVEDIHPTVPNPYNLLSGLPPSHQWYTVLDLKDAFFCLRLHPTSQPLFAFEWRDPGMGISGQLTWTRLPQGFKNSPTLFNEALHRDLADFRIQHPDLILLQYVDDILLAATSELDCQQGTRALLQTLGDLGYRASAKKAQICQKQVKYLGYLLREGQRWLTEARKETVMGQPVPKTPRQLREFLGKAGFCRLFIPGFAEMAAPLYPLTKPGTLFSWGPDQQKAYQEIKQALLTAPALGLPDLTKPFELFVDEKQGYAKGVLTQKLGPWRRPVAYLSKKLDPVAAGWPPCLRMVAAIAVLTKDAGKLTMGQPLVILAPHAVEALVKQPPDRWLSNARMTHYQAMLLDTDRVQFGPVVALNPATLLPLPEEGAPHDCLEILAETHGTRPDLTDQPIPDADHTWYTDGSSFLQEGQRKAGAAVTTETEVIWAGALPAGTSAQRAELIALTQALKMAEGKRLNVYTDSRYAFATAHIHGEIYRRRGWLTSEGREIKNKSEILALLKALFLPKRLSIIHCLGHQKGDSAEARGNRLADQAAREAAIKTPPDTSTLLIAGKRTADGSEFEKRTADGSEFESPKKKAKVE

SEQ ID NO: 2105 - protein, 2093 aa, synthetic construct
MPAAKRVKLDGGDKKYSIGLDIGTNSVGWAVITDEYKVPSKKFKVLGNTDRHSIKKNLIGALLFDSGETAEATRLKRTARRRYTRRKNRICYLQEIFSNEMAKVDDSFFHRLEESFLVEEDKKHERHPIFGNIVDEVAYHEKYPTIYHLRKKLVDSTDKADLRLIYLALAHMIKFRGHFLIEGDLNPDNSDVDKLFIQLVQTYNQLFEENPINASGVDAKAILSARLSKSRRLENLIAQLPGEKKNGLFGNLIALSLGLTPNFKSNFDLAEDAKLQLSKDTYDDDLDNLLAQIGDQYADLFLAAKNLSDAILLSDILRVNTEITKAPLSASMIKRYDEHHQDLTLLKALVRQQLPEKYKEIFFDQSKNGYAGYIDGGASQEEFYKFIKPILEKMDGTEELLVKLNREDLLRKQRTFDNGSIPHQIHLGELHAILRRQEDFYPFLKDNREKIEKILTFRIPYYVGPLARGNSRFAWMTRKSEETITPWNFEEVVDKGASAQSFIERMTNFDKNLPNEKVLPKHSLLYEYFTVYNELTKVKYVTEGMRKPAFLSGEQKKAIVDLLFKTNRKVTVKQLKEDYFKKIECFDSVEISGVEDRFNASLGTYHDLLKIIKDKDFLDNEENEDILEDIVLTLTLFEDREMIEERLKTYAHLFDDKVMKQLKRRRYTGWGRLSRKLINGIRDKQSGKTILDFLKSDGFANRNFMQLIHDDSLTFKEDIQKAQVSGQGDSLHEHIANLAGSPAIKKGILQTVKVVDELVKVMGRHKPENIVIEMARENQTTQKGQKNSRERMKRIEEGIKELGSQILKEHPVENTQLQNEKLYLYYLQNGRDMYVDQELDINRLSDYDVDHIVPQSFLKDDSIDNKVLTRSDKARGKSDNVPSEEVVKKMKNYWRQLLNAKLITQRKFDNLTKAERGGLSELDKAGFIKRQLVETRQITKHVAQILDSRMNTKYDENDKLIREVKVITLKSKLVSDFRKDFQFYKVREINNYHHAHDAYLNAVVGTALIKKYPKLESEFVYGDYKVYDVRKMIAKSEQEIGKATAKYFFYSNIMNFFKTEITLANGEIRKRPLIETNGETGEIVWDKGRDFATVRKVLSMPQVNIVKKTEVQTGGFSKESILPKRNSDKLIARKKDWDPKKYGGFDSPTVAYSVLVVAKVEKGKSKKLKSVKELLGITIMERSSFEKNPIDFLEAKGYKEVKKDLIIKLPKYSLFELENGRKRMLASAGELQKGNELALPSKYVNFLYLASHYEKLKGSPEDNEQKQLFVEQHKHYLDEIIEQISEFSKRVILADANLDKVLSAYNKHRDKPIREQAENIIHLFTLTNLGAPAAFKYFDTTIDRKRYTSTKEVLDATLIHQSITGLYETRIDLSQLGGDGGGGSEAAAKGGLGIEDEYRLHETSTEPDVSLGSTWLSDFPQAWAETGGMGLAVRQAPLIIPLKATSTPVSIQQYPMSHEARLGIKPHIQRLLDQGILVPCQSPWNTPLLPVKKPGTNDYRPVQDLREVNKRVEDIHPTVPNPYNLLSGLPPSHQWYTVLDLKDAFFCLRLHPTSQPLFAFEWRDPGMGISGQLTWTRLPQGFKNSPTLFNEALHRDLADFRIQHPDLILLQYVDDILLAATSELDCQQGTRALLQTLGDLGYRASAKKAQICQKQVKYLGYLLREGQRWLTEARKETVMGQPVPKTPRQLREFLGKAGFCRLFIPGFAEMAAPLYPLTKPGTLFSWGPDQQKAYQEIKQALLTAPALGLPDLTKPFELFVDEKQGYAKGVLTQKLGPWRRPVAYLSKKLDPVAAGWPPCLRMVAAIAVLTKDAGKLTMGQPLVILAPHAVEALVKQPPDRWLSNARMTHYQAMLLDTDRVQFGPVVALNPATLLPLPEEGAPHDCLEILAETHGTRPDLTDQPIPDADHTWYTDGSSFLQEGQRKAGAAVTTETEVIWAGALPAGTSAQRAELIALTQALKMAEGKRLNVYTDSRYAFATAHIHGEIYRRRGWLTSEGREIKNKSEILALLKALFLPKRLSIIHCLGHQKGDSAEARGNRLADQAAREAAIKTPPDTSTLLIAGKRTADGSEFEKRTADGSEFESPKKKAKVE

SEQ ID NO: 2106 - protein, 2100 aa, synthetic construct
MPAAKRVKLDGGDKKYSIGLDIGTNSVGWAVITDEYKVPSKKFKVLGNTDRHSIKKNLIGALLFDSGETAEATRLKRTARRRYTRRKNRICYLQEIFSNEMAKVDDSFFHRLEESFLVEEDKKHERHPIFGNIVDEVAYHEKYPTIYHLRKKLVDSTDKADLRLIYLALAHMIKFRGHFLIEGDLNPDNSDVDKLFIQLVQTYNQLFEENPINASGVDAKAILSARLSKSRRLENLIAQLPGEKKNGLFGNLIALSLGLTPNFKSNFDLAEDAKLQLSKDTYDDDLDNLLAQIGDQYADLFLAAKNLSDAILLSDILRVNTEITKAPLSASMIKRYDEHHQDLTLLKALVRQQLPEKYKEIFFDQSKNGYAGYIDGGASQEEFYKFIKPILEKMDGTEELLVKLNREDLLRKQRTFDNGSIPHQIHLGELHAILRRQEDFYPFLKDNREKIEKILTFRIPYYVGPLARGNSRFAWMTRKSEETITPWNFEEVVDKGASAQSFIERMTNFDKNLPNEKVLPKHSLLYEYFTVYNELTKVKYVTEGMRKPAFLSGEQKKAIVDLLFKTNRKVTVKQLKEDYFKKIECFDSVEISGVEDRFNASLGTYHDLLKIIKDKDFLDNEENEDILEDIVLTLTLFEDREMIEERLKTYAHLFDDKVMKQLKRRRYTGWGRLSRKLINGIRDKQSGKTILDFLKSDGFANRNFMQLIHDDSLTFKEDIQKAQVSGQGDSLHEHIANLAGSPAIKKGILQTVKVVDELVKVMGRHKPENIVIEMARENQTTQKGQKNSRERMKRIEEGIKELGSQILKEHPVENTQLQNEKLYLYYLQNGRDMYVDQELDINRLSDYDVDHIVPQSFLKDDSIDNKVLTRSDKARGKSDNVPSEEVVKKMKNYWRQLLNAKLITQRKFDNLTKAERGGLSELDKAGFIKRQLVETRQITKHVAQILDSRMNTKYDENDKLIREVKVITLKSKLVSDFRKDFQFYKVREINNYHHAHDAYLNAVVGTALIKKYPKLESEFVYGDYKVYDVRKMIAKSEQEIGKATAKYFFYSNIMNFFKTEITLANGEIRKRPLIETNGETGEIVWDKGRDFATVRKVLSMPQVNIVKKTEVQTGGFSKESILPKRNSDKLIARKKDWDPKKYGGFDSPTVAYSVLVVAKVEKGKSKKLKSVKELLGITIMERSSFEKNPIDFLEAKGYKEVKKDLIIKLPKYSLFELENGRKRMLASAGELQKGNELALPSKYVNFLYLASHYEKLKGSPEDNEQKQLFVEQHKHYLDEIIEQISEFSKRVILADANLDKVLSAYNKHRDKPIREQAENIIHLFTLTNLGAPAAFKYFDTTIDRKRYTSTKEVLDATLIHQSITGLYETRIDLSQLGGDGGGGGGSEAAAKGGGGSGGLGIEDEYRLHETSTEPDVSLGSTWLSDFPQAWAETGGMGLAVRQAPLIIPLKATSTPVSIQQYPMSHEARLGIKPHIQRLLDQGILVPCQSPWNTPLLPVKKPGTNDYRPVQDLREVNKRVEDIHPTVPNPYNLLSGLPPSHQWYTVLDLKDAFFCLRLHPTSQPLFAFEWRDPGMGISGQLTWTRLPQGFKNSPTLFNEALHRDLADFRIQHPDLILLQYVDDILLAATSELDCQQGTRALLQTLGDLGYRASAKKAQICQKQVKYLGYLLREGQRWLTEARKETVMGQPVPKTPRQLREFLGKAGFCRLFIPGFAEMAAPLYPLTKPGTLFSWGPDQQKAYQEIKQALLTAPALGLPDLTKPFELFVDEKQGYAKGVLTQKLGPWRRPVAYLSKKLDPVAAGWPPCLRMVAAIAVLTKDAGKLTMGQPLVILAPHAVEALVKQPPDRWLSNARMTHYQAMLLDTDRVQFGPVVALNPATLLPLPEEGAPHDCLEILAETHGTRPDLTDQPIPDADHTWYTDGSSFLQEGQRKAGAAVTTETEVIWAGALPAGTSAQRAELIALTQALKMAEGKRLNVYTDSRYAFATAHIHGEIYRRRGWLTSEGREIKNKSEILALLKALFLPKRLSIIHCLGHQKGDSAEARGNRLADQAAREAAIKTPPDTSTLLIAGKRTADGSEFEKRTADGSEFESPKKKAKVE

SEQ ID NO: 2107 - protein, 2094 aa, synthetic construct
MPAAKRVKLDGGDKKYSIGLDIGTNSVGWAVITDEYKVPSKKFKVLGNTDRHSIKKNLIGALLFDSGETAEATRLKRTARRRYTRRKNRICYLQEIFSNEMAKVDDSFFHRLEESFLVEEDKKHERHPIFGNIVDEVAYHEKYPTIYHLRKKLVDSTDKADLRLIYLALAHMIKFRGHFLIEGDLNPDNSDVDKLFIQLVQTYNQLFEENPINASGVDAKAILSARLSKSRRLENLIAQLPGEKKNGLFGNLIALSLGLTPNFKSNFDLAEDAKLQLSKDTYDDDLDNLLAQIGDQYADLFLAAKNLSDAILLSDILRVNTEITKAPLSASMIKRYDEHHQDLTLLKALVRQQLPEKYKEIFFDQSKNGYAGYIDGGASQEEFYKFIKPILEKMDGTEELLVKLNREDLLRKQRTFDNGSIPHQIHLGELHAILRRQEDFYPFLKDNREKIEKILTFRIPYYVGPLARGNSRFAWMTRKSEETITPWNFEEVVDKGASAQSFIERMTNFDKNLPNEKVLPKHSLLYEYFTVYNELTKVKYVTEGMRKPAFLSGEQKKAIVDLLFKTNRKVTVKQLKEDYFKKIECFDSVEISGVEDRFNASLGTYHDLLKIIKDKDFLDNEENEDILEDIVLTLTLFEDREMIEERLKTYAHLFDDKVMKQLKRRRYTGWGRLSRKLINGIRDKQSGKTILDFLKSDGFANRNFMQLIHDDSLTFKEDIQKAQVSGQGDSLHEHIANLAGSPAIKKGILQTVKVVDELVKVMGRHKPENIVIEMARENQTTQKGQKNSRERMKRIEEGIKELGSQILKEHPVENTQLQNEKLYLYYLQNGRDMYVDQELDINRLSDYDVDHIVPQSFLKDDSIDNKVLTRSDKARGKSDNVPSEEVVKKMKNYWRQLLNAKLITQRKFDNLTKAERGGLSELDKAGFIKRQLVETRQITKHVAQILDSRMNTKYDENDKLIREVKVITLKSKLVSDFRKDFQFYKVREINNYHHAHDAYLNAVVGTALIKKYPKLESEFVYGDYKVYDVRKMIAKSEQEIGKATAKYFFYSNIMNFFKTEITLANGEIRKRPLIETNGETGEIVWDKGRDFATVRKVLSMPQVNIVKKTEVQTGGFSKESILPKRNSDKLIARKKDWDPKKYGGFDSPTVAYSVLVVAKVEKGKSKKLKSVKELLGITIMERSSFEKNPIDFLEAKGYKEVKKDLIIKLPKYSLFELENGRKRMLASAGELQKGNELALPSKYVNFLYLASHYEKLKGSPEDNEQKQLFVEQHKHYLDEIIEQISEFSKRVILADANLDKVLSAYNKHRDKPIREQAENIIHLFTLTNLGAPAAFKYFDTTIDRKRYTSTKEVLDATLIHQSITGLYETRIDLSQLGGDGGGGGGSSGGSGGLGIEDEYRLHETSTEPDVSLGSTWLSDFPQAWAETGGMGLAVRQAPLIIPLKATSTPVSIQQYPMSHEARLGIKPHIQRLLDQGILVPCQSPWNTPLLPVKKPGTNDYRPVQDLREVNKRVEDIHPTVPNPYNLLSGLPPSHQWYTVLDLKDAFFCLRLHPTSQPLFAFEWRDPGMGISGQLTWTRLPQGFKNSPTLFNEALHRDLADFRIQHPDLILLQYVDDILLAATSELDCQQGTRALLQTLGDLGYRASAKKAQICQKQVKYLGYLLREGQRWLTEARKETVMGQPVPKTPRQLREFLGKAGFCRLFIPGFAEMAAPLYPLTKPGTLFSWGPDQQKAYQEIKQALLTAPALGLPDLTKPFELFVDEKQGYAKGVLTQKLGPWRRPVAYLSKKLDPVAAGWPPCLRMVAAIAVLTKDAGKLTMGQPLVILAPHAVEALVKQPPDRWLSNARMTHYQAMLLDTDRVQFGPVVALNPATLLPLPEEGAPHDCLEILAETHGTRPDLTDQPIPDADHTWYTDGSSFLQEGQRKAGAAVTTETEVIWAGALPAGTSAQRAELIALTQALKMAEGKRLNVYTDSRYAFATAHIHGEIYRRRGWLTSEGREIKNKSEILALLKALFLPKRLSIIHCLGHQKGDSAEARGNRLADQAAREAAIKTPPDTSTLLIAGKRTADGSEFEKRTADGSEFESPKKKAKVE

SEQ ID NO: 2108 - protein, 2096 aa, synthetic construct
MPAAKRVKLDGGDKKYSIGLDIGTNSVGWAVITDEYKVPSKKFKVLGNTDRHSIKKNLIGALLFDSGETAEATRLKRTARRRYTRRKNRICYLQEIFSNEMAKVDDSFFHRLEESFLVEEDKKHERHPIFGNIVDEVAYHEKYPTIYHLRKKLVDSTDKADLRLIYLALAHMIKFRGHFLIEGDLNPDNSDVDKLFIQLVQTYNQLFEENPINASGVDAKAILSARLSKSRRLENLIAQLPGEKKNGLFGNLIALSLGLTPNFKSNFDLAEDAKLQLSKDTYDDDLDNLLAQIGDQYADLFLAAKNLSDAILLSDILRVNTEITKAPLSASMIKRYDEHHQDLTLLKALVRQQLPEKYKEIFFDQSKNGYAGYIDGGASQEEFYKFIKPILEKMDGTEELLVKLNREDLLRKQRTFDNGSIPHQIHLGELHAILRRQEDFYPFLKDNREKIEKILTFRIPYYVGPLARGNSRFAWMTRKSEETITPWNFEEVVDKGASAQSFIERMTNFDKNLPNEKVLPKHSLLYEYFTVYNELTKVKYVTEGMRKPAFLSGEQKKAIVDLLFKTNRKVTVKQLKEDYFKKIECFDSVEISGVEDRFNASLGTYHDLLKIIKDKDFLDNEENEDILEDIVLTLTLFEDREMIEERLKTYAHLFDDKVMKQLKRRRYTGWGRLSRKLINGIRDKQSGKTILDFLKSDGFANRNFMQLIHDDSLTFKEDIQKAQVSGQGDSLHEHIANLAGSPAIKKGILQTVKVVDELVKVMGRHKPENIVIEMARENQTTQKGQKNSRERMKRIEEGIKELGSQILKEHPVENTQLQNEKLYLYYLQNGRDMYVDQELDINRLSDYDVDHIVPQSFLKDDSIDNKVLTRSDKARGKSDNVPSEEVVKKMKNYWRQLLNAKLITQRKFDNLTKAERGGLSELDKAGFIKRQLVETRQITKHVAQILDSRMNTKYDENDKLIREVKVITLKSKLVSDFRKDFQFYKVREINNYHHAHDAYLNAVVGTALIKKYPKLESEFVYGDYKVYDVRKMIAKSEQEIGKATAKYFFYSNIMNFFKTEITLANGEIRKRPLIETNGETGEIVWDKGRDFATVRKVLSMPQVNIVKKTEVQTGGFSKESILPKRNSDKLIARKKDWDPKKYGGFDSPTVAYSVLVVAKVEKGKSKKLKSVKELLGITIMERSSFEKNPIDFLEAKGYKEVKKDLIIKLPKYSLFELENGRKRMLASAGELQKGNELALPSKYVNFLYLASHYEKLKGSPEDNEQKQLFVEQHKHYLDEIIEQISEFSKRVILADANLDKVLSAYNKHRDKPIREQAENIIHLFTLTNLGAPAAFKYFDTTIDRKRYTSTKEVLDATLIHQSITGLYETRIDLSQLGGDGGGSSGGGEAAAKGGLGIEDEYRLHETSTEPDVSLGSTWLSDFPQAWAETGGMGLAVRQAPLIIPLKATSTPVSIQQYPMSHEARLGIKPHIQRLLDQGILVPCQSPWNTPLLPVKKPGTNDYRPVQDLREVNKRVEDIHPTVPNPYNLLSGLPPSHQWYTVLDLKDAFFCLRLHPTSQPLFAFEWRDPGMGISGQLTWTRLPQGFKNSPTLFNEALHRDLADFRIQHPDLILLQYVDDILLAATSELDCQQGTRALLQTLGDLGYRASAKKAQICQKQVKYLGYLLREGQRWLTEARKETVMGQPVPKTPRQLREFLGKAGFCRLFIPGFAEMAAPLYPLTKPGTLFSWGPDQQKAYQEIKQALLTAPALGLPDLTKPFELFVDEKQGYAKGVLTQKLGPWRRPVAYLSKKLDPVAAGWPPCLRMVAAIAVLTKDAGKLTMGQPLVILAPHAVEALVKQPPDRWLSNARMTHYQAMLLDTDRVQFGPVVALNPATLLPLPEEGAPHDCLEILAETHGTRPDLTDQPIPDADHTWYTDGSSFLQEGQRKAGAAVTTETEVIWAGALPAGTSAQRAELIALTQALKMAEGKRLNVYTDSRYAFATAHIHGEIYRRRGWLTSEGREIKNKSEILALLKALFLPKRLSIIHCLGHQKGDSAEARGNRLADQAAREAAIKTPPDTSTLLIAGKRTADGSEFEKRTADGSEFESPKKKAKVE

SEQ ID NO: 2109 - protein, 2096 aa, synthetic construct
MPAAKRVKLDGGDKKYSIGLDIGTNSVGWAVITDEYKVPSKKFKVLGNTDRHSIKKNLIGALLFDSGETAEATRLKRTARRRYTRRKNRICYLQEIFSNEMAKVDDSFFHRLEESFLVEEDKKHERHPIFGNIVDEVAYHEKYPTIYHLRKKLVDSTDKADLRLIYLALAHMIKFRGHFLIEGDLNPDNSDVDKLFIQLVQTYNQLFEENPINASGVDAKAILSARLSKSRRLENLIAQLPGEKKNGLFGNLIALSLGLTPNFKSNFDLAEDAKLQLSKDTYDDDLDNLLAQIGDQYADLFLAAKNLSDAILLSDILRVNTEITKAPLSASMIKRYDEHHQDLTLLKALVRQQLPEKYKEIFFDQSKNGYAGYIDGGASQEEFYKFIKPILEKMDGTEELLVKLNREDLLRKQRTFDNGSIPHQIHLGELHAILRRQEDFYPFLKDNREKIEKILTFRIPYYVGPLARGNSRFAWMTRKSEETITPWNFEEVVDKGASAQSFIERMTNFDKNLPNEKVLPKHSLLYEYFTVYNELTKVKYVTEGMRKPAFLSGEQKKAIVDLLFKTNRKVTVKQLKEDYFKKIECFDSVEISGVEDRFNASLGTYHDLLKIIKDKDFLDNEENEDILEDIVLTLTLFEDREMIEERLKTYAHLFDDKVMKQLKRRRYTGWGRLSRKLINGIRDKQSGKTILDFLKSDGFANRNFMQLIHDDSLTFKEDIQKAQVSGQGDSLHEHIANLAGSPAIKKGILQTVKVVDELVKVMGRHKPENIVIEMARENQTTQKGQKNSRERMKRIEEGIKELGSQILKEHPVENTQLQNEKLYLYYLQNGRDMYVDQELDINRLSDYDVDHIVPQSFLKDDSIDNKVLTRSDKARGKSDNVPSEEVVKKMKNYWRQLLNAKLITQRKFDNLTKAERGGLSELDKAGFIKRQLVETRQITKHVAQILDSRMNTKYDENDKLIREVKVITLKSKLVSDFRKDFQFYKVREINNYHHAHDAYLNAVVGTALIKKYPKLESEFVYGDYKVYDVRKMIAKSEQEIGKATAKYFFYSNIMNFFKTEITLANGEIRKRPLIETNGETGEIVWDKGRDFATVRKVLSMPQVNIVKKTEVQTGGFSKESILPKRNSDKLIARKKDWDPKKYGGFDSPTVAYSVLVVAKVEKGKSKKLKSVKELLGITIMERSSFEKNPIDFLEAKGYKEVKKDLIIKLPKYSLFELENGRKRMLASAGELQKGNELALPSKYVNFLYLASHYEKLKGSPEDNEQKQLFVEQHKHYLDEIIEQISEFSKRVILADANLDKVLSAYNKHRDKPIREQAENIIHLFTLTNLGAPAAFKYFDTTIDRKRYTSTKEVLDATLIHQSITGLYETRIDLSQLGGDGGGSSEAAAKPAPGGLGIEDEYRLHETSTEPDVSLGSTWLSDFPQAWAETGGMGLAVRQAPLIIPLKATSTPVSIQQYPMSHEARLGIKPHIQRLLDQGILVPCQSPWNTPLLPVKKPGTNDYRPVQDLREVNKRVEDIHPTVPNPYNLLSGLPPSHQWYTVLDLKDAFFCLRLHPTSQPLFAFEWRDPGMGISGQLTWTRLPQGFKNSPTLFNEALHRDLADFRIQHPDLILLQYVDDILLAATSELDCQQGTRALLQTLGDLGYRASAKKAQICQKQVKYLGYLLREGQRWLTEARKETVMGQPVPKTPRQLREFLGKAGFCRLFIPGFAEMAAPLYPLTKPGTLFSWGPDQQKAYQEIKQALLTAPALGLPDLTKPFELFVDEKQGYAKGVLTQKLGPWRRPVAYLSKKLDPVAAGWPPCLRMVAAIAVLTKDAGKLTMGQPLVILAPHAVEALVKQPPDRWLSNARMTHYQAMLLDTDRVQFGPVVALNPATLLPLPEEGAPHDCLEILAETHGTRPDLTDQPIPDADHTWYTDGSSFLQEGQRKAGAAVTTETEVIWAGALPAGTSAQRAELIALTQALKMAEGKRLNVYTDSRYAFATAHIHGEIYRRRGWLTSEGREIKNKSEILALLKALFLPKRLSIIHCLGHQKGDSAEARGNRLADQAAREAAIKTPPDTSTLLIAGKRTADGSEFEKRTADGSEFESPKKKAKVE

SEQ ID NO: 2110 - protein, 2092 aa, synthetic construct
MPAAKRVKLDGGDKKYSIGLDIGTNSVGWAVITDEYKVPSKKFKVLGNTDRHSIKKNLIGALLFDSGETAEATRLKRTARRRYTRRKNRICYLQEIFSNEMAKVDDSFFHRLEESFLVEEDKKHERHPIFGNIVDEVAYHEKYPTIYHLRKKLVDSTDKADLRLIYLALAHMIKFRGHFLIEGDLNPDNSDVDKLFIQLVQTYNQLFEENPINASGVDAKAILSARLSKSRRLENLIAQLPGEKKNGLFGNLIALSLGLTPNFKSNFDLAEDAKLQLSKDTYDDDLDNLLAQIGDQYADLFLAAKNLSDAILLSDILRVNTEITKAPLSASMIKRYDEHHQDLTLLKALVRQQLPEKYKEIFFDQSKNGYAGYIDGGASQEEFYKFIKPILEKMDGTEELLVKLNREDLLRKQRTFDNGSIPHQIHLGELHAILRRQEDFYPFLKDNREKIEKILTFRIPYYVGPLARGNSRFAWMTRKSEETITPWNFEEVVDKGASAQSFIERMTNFDKNLPNEKVLPKHSLLYEYFTVYNELTKVKYVTEGMRKPAFLSGEQKKAIVDLLFKTNRKVTVKQLKEDYFKKIECFDSVEISGVEDRFNASLGTYHDLLKIIKDKDFLDNEENEDILEDIVLTLTLFEDREMIEERLKTYAHLFDDKVMKQLKRRRYTGWGRLSRKLINGIRDKQSGKTILDFLKSDGFANRNFMQLIHDDSLTFKEDIQKAQVSGQGDSLHEHIANLAGSPAIKKGILQTVKVVDELVKVMGRHKPENIVIEMARENQTTQKGQKNSRERMKRIEEGIKELGSQILKEHPVENTQLQNEKLYLYYLQNGRDMYVDQELDINRLSDYDVDHIVPQSFLKDDSIDNKVLTRSDKARGKSDNVPSEEVVKKMKNYWRQLLNAKLITQRKFDNLTKAERGGLSELDKAGFIKRQLVETRQITKHVAQILDSRMNTKYDENDKLIREVKVITLKSKLVSDFRKDFQFYKVREINNYHHAHDAYLNAVVGTALIKKYPKLESEFVYGDYKVYDVRKMIAKSEQEIGKATAKYFFYSNIMNFFKTEITLANGEIRKRPLIETNGETGEIVWDKGRDFATVRKVLSMPQVNIVKKTEVQTGGFSKESILPKRNSDKLIARKKDWDPKKYGGFDSPTVAYSVLVVAKVEKGKSKKLKSVKELLGITIMERSSFEKNPIDFLEAKGYKEVKKDLIIKLPKYSLFELENGRKRMLASAGELQKGNELALPSKYVNFLYLASHYEKLKGSPEDNEQKQLFVEQHKHYLDEIIEQISEFSKRVILADANLDKVLSAYNKHRDKPIREQAENIIHLFTLTNLGAPAAFKYFDTTIDRKRYTSTKEVLDATLIHQSITGLYETRIDLSQLGGDGGGGGGGGGGGLGIEDEYRLHETSTEPDVSLGSTWLSDFPQAWAETGGMGLAVRQAPLIIPLKATSTPVSIQQYPMSHEARLGIKPHIQRLLDQGILVPCQSPWNTPLLPVKKPGTNDYRPVQDLREVNKRVEDIHPTVPNPYNLLSGLPPSHQWYTVLDLKDAFFCLRLHPTSQPLFAFEWRDPGMGISGQLTWTRLPQGFKNSPTLFNEALHRDLADFRIQHPDLILLQYVDDILLAATSELDCQQGTRALLQTLGDLGYRASAKKAQICQKQVKYLGYLLREGQRWLTEARKETVMGQPVPKTPRQLREFLGKAGFCRLFIPGFAEMAAPLYPLTKPGTLFSWGPDQQKAYQEIKQALLTAPALGLPDLTKPFELFVDEKQGYAKGVLTQKLGPWRRPVAYLSKKLDPVAAGWPPCLRMVAAIAVLTKDAGKLTMGQPLVILAPHAVEALVKQPPDRWLSNARMTHYQAMLLDTDRVQFGPVVALNPATLLPLPEEGAPHDCLEILAETHGTRPDLTDQPIPDADHTWYTDGSSFLQEGQRKAGAAVTTETEVIWAGALPAGTSAQRAELIALTQALKMAEGKRLNVYTDSRYAFATAHIHGEIYRRRGWLTSEGREIKNKSEILALLKALFLPKRLSIIHCLGHQKGDSAEARGNRLADQAAREAAIKTPPDTSTLLIAGKRTADGSEFEKRTADGSEFESPKKKAKVE

SEQ ID NO: 2111 - protein, 2091 aa, synthetic construct
MPAAKRVKLDGGDKKYSIGLDIGTNSVGWAVITDEYKVPSKKFKVLGNTDRHSIKKNLIGALLFDSGETAEATRLKRTARRRYTRRKNRICYLQEIFSNEMAKVDDSFFHRLEESFLVEEDKKHERHPIFGNIVDEVAYHEKYPTIYHLRKKLVDSTDKADLRLIYLALAHMIKFRGHFLIEGDLNPDNSDVDKLFIQLVQTYNQLFEENPINASGVDAKAILSARLSKSRRLENLIAQLPGEKKNGLFGNLIALSLGLTPNFKSNFDLAEDAKLQLSKDTYDDDLDNLLAQIGDQYADLFLAAKNLSDAILLSDILRVNTEITKAPLSASMIKRYDEHHQDLTLLKALVRQQLPEKYKEIFFDQSKNGYAGYIDGGASQEEFYKFIKPILEKMDGTEELLVKLNREDLLRKQRTFDNGSIPHQIHLGELHAILRRQEDFYPFLKDNREKIEKILTFRIPYYVGPLARGNSRFAWMTRKSEETITPWNFEEVVDKGASAQSFIERMTNFDKNLPNEKVLPKHSLLYEYFTVYNELTKVKYVTEGMRKPAFLSGEQKKAIVDLLFKTNRKVTVKQLKEDYFKKIECFDSVEISGVEDRFNASLGTYHDLLKIIKDKDFLDNEENEDILEDIVLTLTLFEDREMIEERLKTYAHLFDDKVMKQLKRRRYTGWGRLSRKLINGIRDKQSGKTILDFLKSDGFANRNFMQLIHDDSLTFKEDIQKAQVSGQGDSLHEHIANLAGSPAIKKGILQTVKVVDELVKVMGRHKPENIVIEMARENQTTQKGQKNSRERMKRIEEGIKELGSQILKEHPVENTQLQNEKLYLYYLQNGRDMYVDQELDINRLSDYDVDHIVPQSFLKDDSIDNKVLTRSDKARGKSDNVPSEEVVKKMKNYWRQLLNAKLITQRKFDNLTKAERGGLSELDKAGFIKRQLVETRQITKHVAQILDSRMNTKYDENDKLIREVKVITLKSKLVSDFRKDFQFYKVREINNYHHAHDAYLNAVVGTALIKKYPKLESEFVYGDYKVYDVRKMIAKSEQEIGKATAKYFFYSNIMNFFKTEITLANGEIRKRPLIETNGETGEIVWDKGRDFATVRKVLSMPQVNIVKKTEVQTGGFSKESILPKRNSDKLIARKKDWDPKKYGGFDSPTVAYSVLVVAKVEKGKSKKLKSVKELLGITIMERSSFEKNPIDFLEAKGYKEVKKDLIIKLPKYSLFELENGRKRMLASAGELQKGNELALPSKYVNFLYLASHYEKLKGSPEDNEQKQLFVEQHKHYLDEIIEQISEFSKRVILADANLDKVLSAYNKHRDKPIREQAENIIHLFTLTNLGAPAAFKYFDTTIDRKRYTSTKEVLDATLIHQSITGLYETRIDLSQLGGDGGGGGGGGGGLGIEDEYRLHETSTEPDVSLGSTWLSDFPQAWAETGGMGLAVRQAPLIIPLKATSTPVSIQQYPMSHEARLGIKPHIQRLLDQGILVPCQSPWNTPLLPVKKPGTNDYRPVQDLREVNKRVEDIHPTVPNPYNLLSGLPPSHQWYTVLDLKDAFFCLRLHPTSQPLFAFEWRDPGMGISGQLTWTRLPQGFKNSPTLFNEALHRDLADFRIQHPDLILLQYVDDILLAATSELDCQQGTRALLQTLGDLGYRASAKKAQICQKQVKYLGYLLREGQRWLTEARKETVMGQPVPKTPRQLREFLGKAGFCRLFIPGFAEMAAPLYPLTKPGTLFSWGPDQQKAYQEIKQALLTAPALGLPDLTKPFELFVDEKQGYAKGVLTQKLGPWRRPVAYLSKKLDPVAAGWPPCLRMVAAIAVLTKDAGKLTMGQPLVILAPHAVEALVKQPPDRWLSNARMTHYQAMLLDTDRVQFGPVVALNPATLLPLPEEGAPHDCLEILAETHGTRPDLTDQPIPDADHTWYTDGSSFLQEGQRKAGAAVTTETEVIWAGALPAGTSAQRAELIALTQALKMAEGKRLNVYTDSRYAFATAHIHGEIYRRRGWLTSEGREIKNKSEILALLKALFLPKRLSIIHCLGHQKGDSAEARGNRLADQAAREAAIKTPPDTSTLLIAGKRTADGSEFEKRTADGSEFESPKKKAKVE

SEQ ID NO: 2112 - protein, 2096 aa, synthetic construct
MPAAKRVKLDGGDKKYSIGLDIGTNSVGWAVITDEYKVPSKKFKVLGNTDRHSIKKNLIGALLFDSGETAEATRLKRTARRRYTRRKNRICYLQEIFSNEMAKVDDSFFHRLEESFLVEEDKKHERHPIFGNIVDEVAYHEKYPTIYHLRKKLVDSTDKADLRLIYLALAHMIKFRGHFLIEGDLNPDNSDVDKLFIQLVQTYNQLFEENPINASGVDAKAILSARLSKSRRLENLIAQLPGEKKNGLFGNLIALSLGLTPNFKSNFDLAEDAKLQLSKDTYDDDLDNLLAQIGDQYADLFLAAKNLSDAILLSDILRVNTEITKAPLSASMIKRYDEHHQDLTLLKALVRQQLPEKYKEIFFDQSKNGYAGYIDGGASQEEFYKFIKPILEKMDGTEELLVKLNREDLLRKQRTFDNGSIPHQIHLGELHAILRRQEDFYPFLKDNREKIEKILTFRIPYYVGPLARGNSRFAWMTRKSEETITPWNFEEVVDKGASAQSFIERMTNFDKNLPNEKVLPKHSLLYEYFTVYNELTKVKYVTEGMRKPAFLSGEQKKAIVDLLFKTNRKVTVKQLKEDYFKKIECFDSVEISGVEDRFNASLGTYHDLLKIIKDKDFLDNEENEDILEDIVLTLTLFEDREMIEERLKTYAHLFDDKVMKQLKRRRYTGWGRLSRKLINGIRDKQSGKTILDFLKSDGFANRNFMQLIHDDSLTFKEDIQKAQVSGQGDSLHEHIANLAGSPAIKKGILQTVKVVDELVKVMGRHKPENIVIEMARENQTTQKGQKNSRERMKRIEEGIKELGSQILKEHPVENTQLQNEKLYLYYLQNGRDMYVDQELDINRLSDYDVDHIVPQSFLKDDSIDNKVLTRSDKARGKSDNVPSEEVVKKMKNYWRQLLNAKLITQRKFDNLTKAERGGLSELDKAGFIKRQLVETRQITKHVAQILDSRMNTKYDENDKLIREVKVITLKSKLVSDFRKDFQFYKVREINNYHHAHDAYLNAVVGTALIKKYPKLESEFVYGDYKVYDVRKMIAKSEQEIGKATAKYFFYSNIMNFFKTEITLANGEIRKRPLIETNGETGEIVWDKGRDFATVRKVLSMPQVNIVKKTEVQTGGFSKESILPKRNSDKLIARKKDWDPKKYGGFDSPTVAYSVLVVAKVEKGKSKKLKSVKELLGITIMERSSFEKNPIDFLEAKGYKEVKKDLIIKLPKYSLFELENGRKRMLASAGELQKGNELALPSKYVNFLYLASHYEKLKGSPEDNEQKQLFVEQHKHYLDEIIEQISEFSKRVILADANLDKVLSAYNKHRDKPIREQAENIIHLFTLTNLGAPAAFKYFDTTIDRKRYTSTKEVLDATLIHQSITGLYETRIDLSQLGGDGGEAAAKGGSPAPGGLGIEDEYRLHETSTEPDVSLGSTWLSDFPQAWAETGGMGLAVRQAPLIIPLKATSTPVSIQQYPMSHEARLGIKPHIQRLLDQGILVPCQSPWNTPLLPVKKPGTNDYRPVQDLREVNKRVEDIHPTVPNPYNLLSGLPPSHQWYTVLDLKDAFFCLRLHPTSQPLFAFEWRDPGMGISGQLTWTRLPQGFKNSPTLFNEALHRDLADFRIQHPDLILLQYVDDILLAATSELDCQQGTRALLQTLGDLGYRASAKKAQICQKQVKYLGYLLREGQRWLTEARKETVMGQPVPKTPRQLREFLGKAGFCRLFIPGFAEMAAPLYPLTKPGTLFSWGPDQQKAYQEIKQALLTAPALGLPDLTKPFELFVDEKQGYAKGVLTQKLGPWRRPVAYLSKKLDPVAAGWPPCLRMVAAIAVLTKDAGKLTMGQPLVILAPHAVEALVKQPPDRWLSNARMTHYQAMLLDTDRVQFGPVVALNPATLLPLPEEGAPHDCLEILAETHGTRPDLTDQPIPDADHTWYTDGSSFLQEGQRKAGAAVTTETEVIWAGALPAGTSAQRAELIALTQALKMAEGKRLNVYTDSRYAFATAHIHGEIYRRRGWLTSEGREIKNKSEILALLKALFLPKRLSIIHCLGHQKGDSAEARGNRLADQAAREAAIKTPPDTSTLLIAGKRTADGSEFEKRTADGSEFESPKKKAKVE

SEQ ID NO: 2113 - protein, 2088 aa, synthetic construct; identical to SEQ ID NO: 2053

SEQ ID NO: 2114 - protein, 2094 aa, synthetic construct; identical to SEQ ID NO: 2060

SEQ ID NO: 2115 - protein, 2093 aa, synthetic construct
MPAAKRVKLDGGDKKYSIGLDIGTNSVGWAVITDEYKVPSKKFKVLGNTDRHSIKKNLIGALLFDSGETAEATRLKRTARRRYTRRKNRICYLQEIFSNEMAKVDDSFFHRLEESFLVEEDKKHERHPIFGNIVDEVAYHEKYPTIYHLRKKLVDSTDKADLRLIYLALAHMIKFRGHFLIEGDLNPDNSDVDKLFIQLVQTYNQLFEENPINASGVDAKAILSARLSKSRRLENLIAQLPGEKKNGLFGNLIALSLGLTPNFKSNFDLAEDAKLQLSKDTYDDDLDNLLAQIGDQYADLFLAAKNLSDAILLSDILRVNTEITKAPLSASMIKRYDEHHQDLTLLKALVRQQLPEKYKEIFFDQSKNGYAGYIDGGASQEEFYKFIKPILEKMDGTEELLVKLNREDLLRKQRTFDNGSIPHQIHLGELHAILRRQEDFYPFLKDNREKIEKILTFRIPYYVGPLARGNSRFAWMTRKSEETITPWNFEEVVDKGASAQSFIERMTNFDKNLPNEKVLPKHSLLYEYFTVYNELTKVKYVTEGMRKPAFLSGEQKKAIVDLLFKTNRKVTVKQLKEDYFKKIECFDSVEISGVEDRFNASLGTYHDLLKIIKDKDFLDNEENEDILEDIVLTLTLFEDREMIEERLKTYAHLFDDKVMKQLKRRRYTGWGRLSRKLINGIRDKQSGKTILDFLKSDGFANRNFMQLIHDDSLTFKEDIQKAQVSGQGDSLHEHIANLAGSPAIKKGILQTVKVVDELVKVMGRHKPENIVIEMARENQTTQKGQKNSRERMKRIEEGIKELGSQILKEHPVENTQLQNEKLYLYYLQNGRDMYVDQELDINRLSDYDVDHIVPQSFLKDDSIDNKVLTRSDKARGKSDNVPSEEVVKKMKNYWRQLLNAKLITQRKFDNLTKAERGGLSELDKAGFIKRQLVETRQITKHVAQILDSRMNTKYDENDKLIREVKVITLKSKLVSDFRKDFQFYKVREINNYHHAHDAYLNAVVGTALIKKYPKLESEFVYGDYKVYDVRKMIAKSEQEIGKATAKYFFYSNIMNFFKTEITLANGEIRKRPLIETNGETGEIVWDKGRDFATVRKVLSMPQVNIVKKTEVQTGGFSKESILPKRNSDKLIARKKDWDPKKYGGFDSPTVAYSVLVVAKVEKGKSKKLKSVKELLGITIMERSSFEKNPIDFLEAKGYKEVKKDLIIKLPKYSLFELENGRKRMLASAGELQKGNELALPSKYVNFLYLASHYEKLKGSPEDNEQKQLFVEQHKHYLDEIIEQISEFSKRVILADANLDKVLSAYNKHRDKPIREQAENIIHLFTLTNLGAPAAFKYFDTTIDRKRYTSTKEVLDATLIHQSITGLYETRIDLSQLGGDGGGSSEAAAKGGLGIEDEYRLHETSTEPDVSLGSTWLSDFPQAWAETGGMGLAVRQAPLIIPLKATSTPVSIQQYPMSHEARLGIKPHIQRLLDQGILVPCQSPWNTPLLPVKKPGTNDYRPVQDLREVNKRVEDIHPTVPNPYNLLSGLPPSHQWYTVLDLKDAFFCLRLHPTSQPLFAFEWRDPGMGISGQLTWTRLPQGFKNSPTLFNEALHRDLADFRIQHPDLILLQYVDDILLAATSELDCQQGTRALLQTLGDLGYRASAKKAQICQKQVKYLGYLLREGQRWLTEARKETVMGQPVPKTPRQLREFLGKAGFCRLFIPGFAEMAAPLYPLTKPGTLFSWGPDQQKAYQEIKQALLTAPALGLPDLTKPFELFVDEKQGYAKGVLTQKLGPWRRPVAYLSKKLDPVAAGWPPCLRMVAAIAVLTKDAGKLTMGQPLVILAPHAVEALVKQPPDRWLSNARMTHYQAMLLDTDRVQFGPVVALNPATLLPLPEEGAPHDCLEILAETHGTRPDLTDQPIPDADHTWYTDGSSFLQEGQRKAGAAVTTETEVIWAGALPAGTSAQRAELIALTQALKMAEGKRLNVYTDSRYAFATAHIHGEIYRRRGWLTSEGREIKNKSEILALLKALFLPKRLSIIHCLGHQKGDSAEARGNRLADQAAREAAIKTPPDTSTLLIAGKRTADGSEFEKRTADGSEFESPKKKAKVE

SEQ ID NO: 2116 - protein, 2100 aa, synthetic construct
MPAAKRVKLDGGDKKYSIGLDIGTNSVGWAVITDEYKVPSKKFKVLGNTDRHSIKKNLIGALLFDSGETAEATRLKRTARRRYTRRKNRICYLQEIFSNEMAKVDDSFFHRLEESFLVEEDKKHERHPIFGNIVDEVAYHEKYPTIYHLRKKLVDSTDKADLRLIYLALAHMIKFRGHFLIEGDLNPDNSDVDKLFIQLVQTYNQLFEENPINASGVDAKAILSARLSKSRRLENLIAQLPGEKKNGLFGNLIALSLGLTPNFKSNFDLAEDAKLQLSKDTYDDDLDNLLAQIGDQYADLFLAAKNLSDAILLSDILRVNTEITKAPLSASMIKRYDEHHQDLTLLKALVRQQLPEKYKEIFFDQSKNGYAGYIDGGASQEEFYKFIKPILEKMDGTEELLVKLNREDLLRKQRTFDNGSIPHQIHLGELHAILRRQEDFYPFLKDNREKIEKILTFRIPYYVGPLARGNSRFAWMTRKSEETITPWNFEEVVDKGASAQSFIERMTNFDKNLPNEKVLPKHSLLYEYFTVYNELTKVKYVTEGMRKPAFLSGEQKKAIVDLLFKTNRKVTVKQLKEDYFKKIECFDSVEISGVEDRFNASLGTYHDLLKIIKDKDFLDNEENEDILEDIVLTLTLFEDREMIEERLKTYAHLFDDKVMKQLKRRRYTGWGRLSRKLINGIRDKQSGKTILDFLKSDGFANRNFMQLIHDDSLTFKEDIQKAQVSGQGDSLHEHIANLAGSPAIKKGILQTVKVVDELVKVMGRHKPENIVIEMARENQTTQKGQKNSRERMKRIEEGIKELGSQILKEHPVENTQLQNEKLYLYYLQNGRDMYVDQELDINRLSDYDVDHIVPQSFLKDDSIDNKVLTRSDKARGKSDNVPSEEVVKKMKNYWRQLLNAKLITQRKFDNLTKAERGGLSELDKAGFIKRQLVETRQITKHVAQILDSRMNTKYDENDKLIREVKVITLKSKLVSDFRKDFQFYKVREINNYHHAHDAYLNAVVGTALIKKYPKLESEFVYGDYKVYDVRKMIAKSEQEIGKATAKYFFYSNIMNFFKTEITLANGEIRKRPLIETNGETGEIVWDKGRDFATVRKVLSMPQVNIVKKTEVQTGGFSKESILPKRNSDKLIARKKDWDPKKYGGFDSPTVAYSVLVVAKVEKGKSKKLKSVKELLGITIMERSSFEKNPIDFLEAKGYKEVKKDLIIKLPKYSLFELENGRKRMLASAGELQKGNELALPSKYVNFLYLASHYEKLKGSPEDNEQKQLFVEQHKHYLDEIIEQISEFSKRVILADANLDKVLSAYNKHRDKPIREQAENIIHLFTLTNLGAPAAFKYFDTTIDRKRYTSTKEVLDATLIHQSITGLYETRIDLSQLGGDGGGGGGSGGGGSGGGGSGGLGIEDEYRLHETSTEPDVSLGSTWLSDFPQAWAETGGMGLAVRQAPLIIPLKATSTPVSIQQYPMSHEARLGIKPHIQRLLDQGILVPCQSPWNTPLLPVKKPGTNDYRPVQDLREVNKRVEDIHPTVPNPYNLLSGLPPSHQWYTVLDLKDAFFCLRLHPTSQPLFAFEWRDPGMGISGQLTWTRLPQGFKNSPTLFNEALHRDLADFRIQHPDLILLQYVDDILLAATSELDCQQGTRALLQTLGDLGYRASAKKAQICQKQVKYLGYLLREGQRWLTEARKETVMGQPVPKTPRQLREFLGKAGFCRLFIPGFAEMAAPLYPLTKPGTLFSWGPDQQKAYQEIKQALLTAPALGLPDLTKPFELFVDEKQGYAKGVLTQKLGPWRRPVAYLSKKLDPVAAGWPPCLRMVAAIAVLTKDAGKLTMGQPLVILAPHAVEALVKQPPDRWLSNARMTHYQAMLLDTDRVQFGPVVALNPATLLPLPEEGAPHDCLEILAETHGTRPDLTDQPIPDADHTWYTDGSSFLQEGQRKAGAAVTTETEVIWAGALPAGTSAQRAELIALTQALKMAEGKRLNVYTDSRYAFATAHIHGEIYRRRGWLTSEGREIKNKSEILALLKALFLPKRLSIIHCLGHQKGDSAEARGNRLADQAAREAAIKTPPDTSTLLIAGKRTADGSEFEKRTADGSEFESPKKKAKVE

SEQ ID NO: 2117 - protein, 2096 aa, synthetic construct
MPAAKRVKLDGGDKKYSIGLDIGTNSVGWAVITDEYKVPSKKFKVLGNTDRHSIKKNLIGALLFDSGETAEATRLKRTARRRYTRRKNRICYLQEIFSNEMAKVDDSFFHRLEESFLVEEDKKHERHPIFGNIVDEVAYHEKYPTIYHLRKKLVDSTDKADLRLIYLALAHMIKFRGHFLIEGDLNPDNSDVDKLFIQLVQTYNQLFEENPINASGVDAKAILSARLSKSRRLENLIAQLPGEKKNGLFGNLIALSLGLTPNFKSNFDLAEDAKLQLSKDTYDDDLDNLLAQIGDQYADLFLAAKNLSDAILLSDILRVNTEITKAPLSASMIKRYDEHHQDLTLLKALVRQQLPEKYKEIFFDQSKNGYAGYIDGGASQEEFYKFIKPILEKMDGTEELLVKLNREDLLRKQRTFDNGSIPHQIHLGELHAILRRQEDFYPFLKDNREKIEKILTFRIPYYVGPLARGNSRFAWMTRKSEETITPWNFEEVVDKGASAQSFIERMTNFDKNLPNEKVLPKHSLLYEYFTVYNELTKVKYVTEGMRKPAFLSGEQKKAIVDLLFKTNRKVTVKQLKEDYFKKIECFDSVEISGVEDRFNASLGTYHDLLKIIKDKDFLDNEENEDILEDIVLTLTLFEDREMIEERLKTYAHLFDDKVMKQLKRRRYTGWGRLSRKLINGIRDKQSGKTILDFLKSDGFANRNFMQLIHDDSLTFKEDIQKAQVSGQGDSLHEHIANLAGSPAIKKGILQTVKVVDELVKVMGRHKPENIVIEMARENQTTQKGQKNSRERMKRIEEGIKELGSQILKEHPVENTQLQNEKLYLYYLQNGRDMYVDQELDINRLSDYDVDHIVPQSFLKDDSIDNKVLTRSDKARGKSDNVPSEEVVKKMKNYWRQLLNAKLITQRKFDNLTKAERGGLSELDKAGFIKRQLVETRQITKHVAQILDSRMNTKYDENDKLIREVKVITLKSKLVSDFRKDFQFYKVREINNYHHAHDAYLNAVVGTALIKKYPKLESEFVYGDYKVYDVRKMIAKSEQEIGKATAKYFFYSNIMNFFKTEITLANGEIRKRPLIETNGETGEIVWDKGRDFATVRKVLSMPQVNIVKKTEVQTGGFSKESILPKRNSDKLIARKKDWDPKKYGGFDSPTVAYSVLVVAKVEKGKSKKLKSVKELLGITIMERSSFEKNPIDFLEAKGYKEVKKDLIIKLPKYSLFELENGRKRMLASAGELQKGNELALPSKYVNFLYLASHYEKLKGSPEDNEQKQLFVEQHKHYLDEIIEQISEFSKRVILADANLDKVLSAYNKHRDKPIREQAENIIHLFTLTNLGAPAAFKYFDTTIDRKRYTSTKEVLDATLIHQSITGLYETRIDLSQLGGDGGGSSGGSEAAAKGGLGIEDEYRLHETSTEPDVSLGSTWLSDFPQAWAETGGMGLAVRQAPLIIPLKATSTPVSIQQYPMSHEARLGIKPHIQRLLDQGILVPCQSPWNTPLLPVKKPGTNDYRPVQDLREVNKRVEDIHPTVPNPYNLLSGLPPSHQWYTVLDLKDAFFCLRLHPTSQPLFAFEWRDPGMGISGQLTWTRLPQGFKNSPTLFNEALHRDLADFRIQHPDLILLQYVDDILLAATSELDCQQGTRALLQTLGDLGYRASAKKAQICQKQVKYLGYLLREGQRWLTEARKETVMGQPVPKTPRQLREFLGKAGFCRLFIPGFAEMAAPLYPLTKPGTLFSWGPDQQKAYQEIKQALLTAPALGLPDLTKPFELFVDEKQGYAKGVLTQKLGPWRRPVAYLSKKLDPVAAGWPPCLRMVAAIAVLTKDAGKLTMGQPLVILAPHAVEALVKQPPDRWLSNARMTHYQAMLLDTDRVQFGPVVALNPATLLPLPEEGAPHDCLEILAETHGTRPDLTDQPIPDADHTWYTDGSSFLQEGQRKAGAAVTTETEVIWAGALPAGTSAQRAELIALTQALKMAEGKRLNVYTDSRYAFATAHIHGEIYRRRGWLTSEGREIKNKSEILALLKALFLPKRLSIIHCLGHQKGDSAEARGNRLADQAAREAAIKTPPDTSTLLIAGKRTADGSEFEKRTADGSEFESPKKKAKVE

SEQ ID NO: 2118 - protein, 2100 aa, synthetic construct
MPAAKRVKLDGGDKKYSIGLDIGTNSVGWAVITDEYKVPSKKFKVLGNTDRHSIKKNLIGALLFDSGETAEATRLKRTARRRYTRRKNRICYLQEIFSNEMAKVDDSFFHRLEESFLVEEDKKHERHPIFGNIVDEVAYHEKYPTIYHLRKKLVDSTDKADLRLIYLALAHMIKFRGHFLIEGDLNPDNSDVDKLFIQLVQTYNQLFEENPINASGVDAKAILSARLSKSRRLENLIAQLPGEKKNGLFGNLIALSLGLTPNFKSNFDLAEDAKLQLSKDTYDDDLDNLLAQIGDQYADLFLAAKNLSDAILLSDILRVNTEITKAPLSASMIKRYDEHHQDLTLLKALVRQQLPEKYKEIFFDQSKNGYAGYIDGGASQEEFYKFIKPILEKMDGTEELLVKLNREDLLRKQRTFDNGSIPHQIHLGELHAILRRQEDFYPFLKDNREKIEKILTFRIPYYVGPLARGNSRFAWMTRKSEETITPWNFEEVVDKGASAQSFIERMTNFDKNLPNEKVLPKHSLLYEYFTVYNELTKVKYVTEGMRKPAFLSGEQKKAIVDLLFKTNRKVTVKQLKEDYFKKIECFDSVEISGVEDRFNASLGTYHDLLKIIKDKDFLDNEENEDILEDIVLTLTLFEDREMIEERLKTYAHLFDDKVMKQLKRRRYTGWGRLSRKLINGIRDKQSGKTILDFLKSDGFANRNFMQLIHDDSLTFKEDIQKAQVSGQGDSLHEHIANLAGSPAIKKGILQTVKVVDELVKVMGRHKPENIVIEMARENQTTQKGQKNSRERMKRIEEGIKELGSQILKEHPVENTQLQNEKLYLYYLQNGRDMYVDQELDINRLSDYDVDHIVPQSFLKDDSIDNKVLTRSDKARGKSDNVPSEEVVKKMKNYWRQLLNAKLITQRKFDNLTKAERGGLSELDKAGFIKRQLVETRQITKHVAQILDSRMNTKYDENDKLIREVKVITLKSKLVSDFRKDFQFYKVREINNYHHAHDAYLNAVVGTALIKKYPKLESEFVYGDYKVYDVRKMIAKSEQEIGKATAKYFFYSNIMNFFKTEITLANGEIRKRPLIETNGETGEIVWDKGRDFATVRKVLSMPQVNIVKKTEVQTGGFSKESILPKRNSDKLIARKKDWDPKKYGGFDSPTVAYSVLVVAKVEKGKSKKLKSVKELLGITIMERSSFEKNPIDFLEAKGYKEVKKDLIIKLPKYSLFELENGRKRMLASAGELQKGNELALPSKYVNFLYLASHYEKLKGSPEDNEQKQLFVEQHKHYLDEIIEQISEFSKRVILADANLDKVLSAYNKHRDKPIREQAENIIHLFTLTNLGAPAAFKYFDTTIDRKRYTSTKEVLDATLIHQSITGLYETRIDLSQLGGDGGGGSGGSGGSGGSGGSGGLGIEDEYRLHETSTEPDVSLGSTWLSDFPQAWAETGGMGLAVRQAPLIIPLKATSTPVSIQQYPMSHEARLGIKPHIQRLLDQGILVPCQSPWNTPLLPVKKPGTNDYRPVQDLREVNKRVEDIHPTVPNPYNLLSGLPPSHQWYTVLDLKDAFFCLRLHPTSQPLFAFEWRDPGMGISGQLTWTRLPQGFKNSPTLFNEALHRDLADFRIQHPDLILLQYVDDILLAATSELDCQQGTRALLQTLGDLGYRASAKKAQICQKQVKYLGYLLREGQRWLTEARKETVMGQPVPKTPRQLREFLGKAGFCRLFIPGFAEMAAPLYPLTKPGTLFSWGPDQQKAYQEIKQALLTAPALGLPDLTKPFELFVDEKQGYAKGVLTQKLGPWRRPVAYLSKKLDPVAAGWPPCLRMVAAIAVLTKDAGKLTMGQPLVILAPHAVEALVKQPPDRWLSNARMTHYQAMLLDTDRVQFGPVVALNPATLLPLPEEGAPHDCLEILAETHGTRPDLTDQPIPDADHTWYTDGSSFLQEGQRKAGAAVTTETEVIWAGALPAGTSAQRAELIALTQALKMAEGKRLNVYTDSRYAFATAHIHGEIYRRRGWLTSEGREIKNKSEILALLKALFLPKRLSIIHCLGHQKGDSAEARGNRLADQAAREAAIKTPPDTSTLLIAGKRTADGSEFEKRTADGSEFESPKKKAKVE

SEQ ID NO: 2119 - protein, 2096 aa, synthetic construct
MPAAKRVKLDGGDKKYSIGLDIGTNSVGWAVITDEYKVPSKKFKVLGNTDRHSIKKNLIGALLFDSGETAEATRLKRTARRRYTRRKNRICYLQEIFSNEMAKVDDSFFHRLEESFLVEEDKKHERHPIFGNIVDEVAYHEKYPTIYHLRKKLVDSTDKADLRLIYLALAHMIKFRGHFLIEGDLNPDNSDVDKLFIQLVQTYNQLFEENPINASGVDAKAILSARLSKSRRLENLIAQLPGEKKNGLFGNLIALSLGLTPNFKSNFDLAEDAKLQLSKDTYDDDLDNLLAQIGDQYADLFLAAKNLSDAILLSDILRVNTEITKAPLSASMIKRYDEHHQDLTLLKALVRQQLPEKYKEIFFDQSKNGYAGYIDGGASQEEFYKFIKPILEKMDGTEELLVKLNREDLLRKQRTFDNGSIPHQIHLGELHAILRRQEDFYPFLKDNREKIEKILTFRIPYYVGPLARGNSRFAWMTRKSEETITPWNFEEVVDKGASAQSFIERMTNFDKNLPNEKVLPKHSLLYEYFTVYNELTKVKYVTEGMRKPAFLSGEQKKAIVDLLFKTNRKVTVKQLKEDYFKKIECFDSVEISGVEDRFNASLGTYHDLLKIIKDKDFLDNEENEDILEDIVLTLTLFEDREMIEERLKTYAHLFDDKVMKQLKRRRYTGWGRLSRKLINGIRDKQSGKTILDFLKSDGFANRNFMQLIHDDSLTFKEDIQKAQVSGQGDSLHEHIANLAGSPAIKKGILQTVKVVDELVKVMGRHKPENIVIEMARENQTTQKGQKNSRERMKRIEEGIKELGSQILKEHPVENTQLQNEKLYLYYLQNGRDMYVDQELDINRLSDYDVDHIVPQSFLKDDSIDNKVLTRSDKARGKSDNVPSEEVVKKMKNYWRQLLNAKLITQRKFDNLTKAERGGLSELDKAGFIKRQLVETRQITKHVAQILDSRMNTKYDENDKLIREVKVITLKSKLVSDFRKDFQFYKVREINNYHHAHDAYLNAVVGTALIKKYPKLESEFVYGDYKVYDVRKMIAKSEQEIGKATAKYFFYSNIMNFFKTEITLANGEIRKRPLIETNGETGEIVWDKGRDFATVRKVLSMPQVNIVKKTEVQTGGFSKESILPKRNSDKLIARKKDWDPKKYGGFDSPTVAYSVLVVAKVEKGKSKKLKSVKELLGITIMERSSFEKNPIDFLEAKGYKEVKKDLIIKLPKYSLFELENGRKRMLASAGELQKGNELALPSKYVNFLYLASHYEKLKGSPEDNEQKQLFVEQHKHYLDEIIEQISEFSKRVILADANLDKVLSAYNKHRDKPIREQAENIIHLFTLTNLGAPAAFKYFDTTIDRKRYTSTKEVLDATLIHQSITGLYETRIDLSQLGGDGGEAAAKGSSGGSGGLGIEDEYRLHETSTEPDVSLGSTWLSDFPQAWAETGGMGLAVRQAPLIIPLKATSTPVSIQQYPMSHEARLGIKPHIQRLLDQGILVPCQSPWNTPLLPVKKPGTNDYRPVQDLREVNKRVEDIHPTVPNPYNLLSGLPPSHQWYTVLDLKDAFFCLRLHPTSQPLFAFEWRDPGMGISGQLTWTRLPQGFKNSPTLFNEALHRDLADFRIQHPDLILLQYVDDILLAATSELDCQQGTRALLQTLGDLGYRASAKKAQICQKQVKYLGYLLREGQRWLTEARKETVMGQPVPKTPRQLREFLGKAGFCRLFIPGFAEMAAPLYPLTKPGTLFSWGPDQQKAYQEIKQALLTAPALGLPDLTKPFELFVDEKQGYAKGVLTQKLGPWRRPVAYLSKKLDPVAAGWPPCLRMVAAIAVLTKDAGKLTMGQPLVILAPHAVEALVKQPPDRWLSNARMTHYQAMLLDTDRVQFGPVVALNPATLLPLPEEGAPHDCLEILAETHGTRPDLTDQPIPDADHTWYTDGSSFLQEGQRKAGAAVTTETEVIWAGALPAGTSAQRAELIALTQALKMAEGKRLNVYTDSRYAFATAHIHGEIYRRRGWLTSEGREIKNKSEILALLKALFLPKRLSIIHCLGHQKGDSAEARGNRLADQAAREAAIKTPPDTSTLLIAGKRTADGSEFEKRTADGSEFESPKKKAKVE

SEQ ID NO: 2120 - protein, 2096 aa, synthetic construct
MPAAKRVKLDGGDKKYSIGLDIGTNSVGWAVITDEYKVPSKKFKVLGNTDRHSIKKNLIGALLFDSGETAEATRLKRTARRRYTRRKNRICYLQEIFSNEMAKVDDSFFHRLEESFLVEEDKKHERHPIFGNIVDEVAYHEKYPTIYHLRKKLVDSTDKADLRLIYLALAHMIKFRGHFLIEGDLNPDNSDVDKLFIQLVQTYNQLFEENPINASGVDAKAILSARLSKSRRLENLIAQLPGEKKNGLFGNLIALSLGLTPNFKSNFDLAEDAKLQLSKDTYDDDLDNLLAQIGDQYADLFLAAKNLSDAILLSDILRVNTEITKAPLSASMIKRYDEHHQDLTLLKALVRQQLPEKYKEIFFDQSKNGYAGYIDGGASQEEFYKFIKPILEKMDGTEELLVKLNREDLLRKQRTFDNGSIPHQIHLGELHAILRRQEDFYPFLKDNREKIEKILTFRIPYYVGPLARGNSRFAWMTRKSEETITPWNFEEVVDKGASAQSFIERMTNFDKNLPNEKVLPKHSLLYEYFTVYNELTKVKYVTEGMRKPAFLSGEQKKAIVDLLFKTNRKVTVKQLKEDYFKKIECFDSVEISGVEDRFNASLGTYHDLLKIIKDKDFLDNEENEDILEDIVLTLTLFEDREMIEERLKTYAHLFDDKVMKQLKRRRYTGWGRLSRKLINGIRDKQSGKTILDFLKSDGFANRNFMQLIHDDSLTFKEDIQKAQVSGQGDSLHEHIANLAGSPAIKKGILQTVKVVDELVKVMGRHKPENIVIEMARENQTTQKGQKNSRERMKRIEEGIKELGSQILKEHPVENTQLQNEKLYLYYLQNGRDMYVDQELDINRLSDYDVDHIVPQSFLKDDSIDNKVLTRSDKARGKSDNVPSEEVVKKMKNYWRQLLNAKLITQRKFDNLTKAERGGLSELDKAGFIKRQLVETRQITKHVAQILDSRMNTKYDENDKLIREVKVITLKSKLVSDFRKDFQFYKVREINNYHHAHDAYLNAVVGTALIKKYPKLESEFVYGDYKVYDVRKMIAKSEQEIGKATAKYFFYSNIMNFFKTEITLANGEIRKRPLIETNGETGEIVWDKGRDFATVRKVLSMPQVNIVKKTEVQTGGFSKESILPKRNSDKLIARKKDWDPKKYGGFDSPTVAYSVLVVAKVEKGKSKKLKSVKELLGITIMERSSFEKNPIDFLEAKGYKEVKKDLIIKLPKYSLFELENGRKRMLASAGELQKGNELALPSKYVNFLYLASHYEKLKGSPEDNEQKQLFVEQHKHYLDEIIEQISEFSKRVILADANLDKVLSAYNKHRDKPIREQAENIIHLFTLTNLGAPAAFKYFDTTIDRKRYTSTKEVLDATLIHQSITGLYETRIDLSQLGGDGGPAPEAAAKGGGGGLGIEDEYRLHETSTEPDVSLGSTWLSDFPQAWAETGGMGLAVRQAPLIIPLKATSTPVSIQQYPMSHEARLGIKPHIQRLLDQGILVPCQSPWNTPLLPVKKPGTNDYRPVQDLREVNKRVEDIHPTVPNPYNLLSGLPPSHQWYTVLDLKDAFFCLRLHPTSQPLFAFEWRDPGMGISGQLTWTRLPQGFKNSPTLFNEALHRDLADFRIQHPDLILLQYVDDILLAATSELDCQQGTRALLQTLGDLGYRASAKKAQICQKQVKYLGYLLREGQRWLTEARKETVMGQPVPKTPRQLREFLGKAGFCRLFIPGFAEMAAPLYPLTKPGTLFSWGPDQQKAYQEIKQALLTAPALGLPDLTKPFELFVDEKQGYAKGVLTQKLGPWRRPVAYLSKKLDPVAAGWPPCLRMVAAIAVLTKDAGKLTMGQPLVILAPHAVEALVKQPPDRWLSNARMTHYQAMLLDTDRVQFGPVVALNPATLLPLPEEGAPHDCLEILAETHGTRPDLTDQPIPDADHTWYTDGSSFLQEGQRKAGAAVTTETEVIWAGALPAGTSAQRAELIALTQALKMAEGKRLNVYTDSRYAFATAHIHGEIYRRRGWLTSEGREIKNKSEILALLKALFLPKRLSIIHCLGHQKGDSAEARGNRLADQAAREAAIKTPPDTSTLLIAGKRTADGSEFEKRTADGSEFESPKKKAKVE

SEQ ID NO: 2121 - protein, 2101 aa, synthetic construct
MPAAKRVKLDGGDKKYSIGLDIGTNSVGWAVITDEYKVPSKKFKVLGNTDRHSIKKNLIGALLFDSGETAEATRLKRTARRRYTRRKNRICYLQEIFSNEMAKVDDSFFHRLEESFLVEEDKKHERHPIFGNIVDEVAYHEKYPTIYHLRKKLVDSTDKADLRLIYLALAHMIKFRGHFLIEGDLNPDNSDVDKLFIQLVQTYNQLFEENPINASGVDAKAILSARLSKSRRLENLIAQLPGEKKNGLFGNLIALSLGLTPNFKSNFDLAEDAKLQLSKDTYDDDLDNLLAQIGDQYADLFLAAKNLSDAILLSDILRVNTEITKAPLSASMIKRYDEHHQDLTLLKALVRQQLPEKYKEIFFDQSKNGYAGYIDGGASQEEFYKFIKPILEKMDGTEELLVKLNREDLLRKQRTFDNGSIPHQIHLGELHAILRRQEDFYPFLKDNREKIEKILTFRIPYYVGPLARGNSRFAWMTRKSEETITPWNFEEVVDKGASAQSFIERMTNFDKNLPNEKVLPKHSLLYEYFTVYNELTKVKYVTEGMRKPAFLSGEQKKAIVDLLFKTNRKVTVKQLKEDYFKKIECFDSVEISGVEDRFNASLGTYHDLLKIIKDKDFLDNEENEDILEDIVLTLTLFEDREMIEERLKTYAHLFDDKVMKQLKRRRYTGWGRLSRKLINGIRDKQSGKTILDFLKSDGFANRNFMQLIHDDSLTFKEDIQKAQVSGQGDSLHEHIANLAGSPAIKKGILQTVKVVDELVKVMGRHKPENIVIEMARENQTTQKGQKNSRERMKRIEEGIKELGSQILKEHPVENTQLQNEKLYLYYLQNGRDMYVDQELDINRLSDYDVDHIVPQSFLKDDSIDNKVLTRSDKARGKSDNVPSEEVVKKMKNYWRQLLNAKLITQRKFDNLTKAERGGLSELDKAGFIKRQLVETRQITKHVAQILDSRMNTKYDENDKLIREVKVITLKSKLVSDFRKDFQFYKVREINNYHHAHDAYLNAVVGTALIKKYPKLESEFVYGDYKVYDVRKMIAKSEQEIGKATAKYFFYSNIMNFFKTEITLANGEIRKRPLIETNGETGEIVWDKGRDFATVRKVLSMPQVNIVKKTEVQTGGFSKESILPKRNSDKLIARKKDWDPKKYGGFDSPTVAYSVLVVAKVEKGKSKKLKSVKELLGITIMERSSFEKNPIDFLEAKGYKEVKKDLIIKLPKYSLFELENGRKRMLASAGELQKGNELALPSKYVNFLYLASHYEKLKGSPEDNEQKQLFVEQHKHYLDEIIEQISEFSKRVILADANLDKVLSAYNKHRDKPIREQAENIIHLFTLTNLGAPAAFKYFDTTIDRKRYTSTKEVLDATLIHQSITGLYETRIDLSQLGGDGGSGSETPGTSESATPESGGLGIEDEYRLHETSTEPDVSLGSTWLSDFPQAWAETGGMGLAVRQAPLIIPLKATSTPVSIQQYPMSHEARLGIKPHIQRLLDQGILVPCQSPWNTPLLPVKKPGTNDYRPVQDLREVNKRVEDIHPTVPNPYNLLSGLPPSHQWYTVLDLKDAFFCLRLHPTSQPLFAFEWRDPGMGISGQLTWTRLPQGFKNSPTLFNEALHRDLADFRIQHPDLILLQYVDDILLAATSELDCQQGTRALLQTLGDLGYRASAKKAQICQKQVKYLGYLLREGQRWLTEARKETVMGQPVPKTPRQLREFLGKAGFCRLFIPGFAEMAAPLYPLTKPGTLFSWGPDQQKAYQEIKQALLTAPALGLPDLTKPFELFVDEKQGYAKGVLTQKLGPWRRPVAYLSKKLDPVAAGWPPCLRMVAAIAVLTKDAGKLTMGQPLVILAPHAVEALVKQPPDRWLSNARMTHYQAMLLDTDRVQFGPVVALNPATLLPLPEEGAPHDCLEILAETHGTRPDLTDQPIPDADHTWYTDGSSFLQEGQRKAGAAVTTETEVIWAGALPAGTSAQRAELIALTQALKMAEGKRLNVYTDSRYAFATAHIHGEIYRRRGWLTSEGREIKNKSEILALLKALFLPKRLSIIHCLGHQKGDSAEARGNRLADQAAREAAIKTPPDTSTLLIAGKRTADGSEFEKRTADGSEFESPKKKAKVE

SEQ ID NO: 2122 - protein, 2094 aa, synthetic construct; identical to SEQ ID NO: 2058

SEQ ID NO: 2123 - protein, 2096 aa, synthetic construct; identical to SEQ ID NO: 2054

SEQ ID NO: 2124 - protein, 2091 aa, synthetic construct
MPAAKRVKLDGGDKKYSIGLDIGTNSVGWAVITDEYKVPSKKFKVLGNTDRHSIKKNLIGALLFDSGETAEATRLKRTARRRYTRRKNRICYLQEIFSNEMAKVDDSFFHRLEESFLVEEDKKHERHPIFGNIVDEVAYHEKYPTIYHLRKKLVDSTDKADLRLIYLALAHMIKFRGHFLIEGDLNPDNSDVDKLFIQLVQTYNQLFEENPINASGVDAKAILSARLSKSRRLENLIAQLPGEKKNGLFGNLIALSLGLTPNFKSNFDLAEDAKLQLSKDTYDDDLDNLLAQIGDQYADLFLAAKNLSDAILLSDILRVNTEITKAPLSASMIKRYDEHHQDLTLLKALVRQQLPEKYKEIFFDQSKNGYAGYIDGGASQEEFYKFIKPILEKMDGTEELLVKLNREDLLRKQRTFDNGSIPHQIHLGELHAILRRQEDFYPFLKDNREKIEKILTFRIPYYVGPLARGNSRFAWMTRKSEETITPWNFEEVVDKGASAQSFIERMTNFDKNLPNEKVLPKHSLLYEYFTVYNELTKVKYVTEGMRKPAFLSGEQKKAIVDLLFKTNRKVTVKQLKEDYFKKIECFDSVEISGVEDRFNASLGTYHDLLKIIKDKDFLDNEENEDILEDIVLTLTLFEDREMIEERLKTYAHLFDDKVMKQLKRRRYTGWGRLSRKLINGIRDKQSGKTILDFLKSDGFANRNFMQLIHDDSLTFKEDIQKAQVSGQGDSLHEHIANLAGSPAIKKGILQTVKVVDELVKVMGRHKPENIVIEMARENQTTQKGQKNSRERMKRIEEGIKELGSQILKEHPVENTQLQNEKLYLYYLQNGRDMYVDQELDINRLSDYDVDHIVPQSFLKDDSIDNKVLTRSDKARGKSDNVPSEEVVKKMKNYWRQLLNAKLITQRKFDNLTKAERGGLSELDKAGFIKRQLVETRQITKHVAQILDSRMNTKYDENDKLIREVKVITLKSKLVSDFRKDFQFYKVREINNYHHAHDAYLNAVVGTALIKKYPKLESEFVYGDYKVYDVRKMIAKSEQEIGKATAKYFFYSNIMNFFKTEITLANGEIRKRPLIETNGETGEIVWDKGRDFATVRKVLSMPQVNIVKKTEVQTGGFSKESILPKRNSDKLIARKKDWDPKKYGGFDSPTVAYSVLVVAKVEKGKSKKLKSVKELLGITIMERSSFEKNPIDFLEAKGYKEVKKDLIIKLPKYSLFELENGRKRMLASAGELQKGNELALPSKYVNFLYLASHYEKLKGSPEDNEQKQLFVEQHKHYLDEIIEQISEFSKRVILADANLDKVLSAYNKHRDKPIREQAENIIHLFTLTNLGAPAAFKYFDTTIDRKRYTSTKEVLDATLIHQSITGLYETRIDLSQLGGDGGGSSPAPGGLGIEDEYRLHETSTEPDVSLGSTWLSDFPQAWAETGGMGLAVRQAPLIIPLKATSTPVSIQQYPMSHEARLGIKPHIQRLLDQGILVPCQSPWNTPLLPVKKPGTNDYRPVQDLREVNKRVEDIHPTVPNPYNLLSGLPPSHQWYTVLDLKDAFFCLRLHPTSQPLFAFEWRDPGMGISGQLTWTRLPQGFKNSPTLFNEALHRDLADFRIQHPDLILLQYVDDILLAATSELDCQQGTRALLQTLGDLGYRASAKKAQICQKQVKYLGYLLREGQRWLTEARKETVMGQPVPKTPRQLREFLGKAGFCRLFIPGFAEMAAPLYPLTKPGTLFSWGPDQQKAYQEIKQALLTAPALGLPDLTKPFELFVDEKQGYAKGVLTQKLGPWRRPVAYLSKKLDPVAAGWPPCLRMVAAIAVLTKDAGKLTMGQPLVILAPHAVEALVKQPPDRWLSNARMTHYQAMLLDTDRVQFGPVVALNPATLLPLPEEGAPHDCLEILAETHGTRPDLTDQPIPDADHTWYTDGSSFLQEGQRKAGAAVTTETEVIWAGALPAGTSAQRAELIALTQALKMAEGKRLNVYTDSRYAFATAHIHGEIYRRRGWLTSEGREIKNKSEILALLKALFLPKRLSIIHCLGHQKGDSAEARGNRLADQAAREAAIKTPPDTSTLLIAGKRTADGSEFEKRTADGSEFESPKKKAKVE

SEQ ID NO: 2125 - protein, 2090 aa, synthetic construct
MPAAKRVKLDGGDKKYSIGLDIGTNSVGWAVITDEYKVPSKKFKVLGNTDRHSIKKNLIGALLFDSGETAEATRLKRTARRRYTRRKNRICYLQEIFSNEMAKVDDSFFHRLEESFLVEEDKKHERHPIFGNIVDEVAYHEKYPTIYHLRKKLVDSTDKADLRLIYLALAHMIKFRGHFLIEGDLNPDNSDVDKLFIQLVQTYNQLFEENPINASGVDAKAILSARLSKSRRLENLIAQLPGEKKNGLFGNLIALSLGLTPNFKSNFDLAEDAKLQLSKDTYDDDLDNLLAQIGDQYADLFLAAKNLSDAILLSDILRVNTEITKAPLSASMIKRYDEHHQDLTLLKALVRQQLPEKYKEIFFDQSKNGYAGYIDGGASQEEFYKFIKPILEKMDGTEELLVKLNREDLLRKQRTFDNGSIPHQIHLGELHAILRRQEDFYPFLKDNREKIEKILTFRIPYYVGPLARGNSRFAWMTRKSEETITPWNFEEVVDKGASAQSFIERMTNFDKNLPNEKVLPKHSLLYEYFTVYNELTKVKYVTEGMRKPAFLSGEQKKAIVDLLFKTNRKVTVKQLKEDYFKKIECFDSVEISGVEDRFNASLGTYHDLLKIIKDKDFLDNEENEDILEDIVLTLTLFEDREMIEERLKTYAHLFDDKVMKQLKRRRYTGWGRLSRKLINGIRDKQSGKTILDFLKSDGFANRNFMQLIHDDSLTFKEDIQKAQVSGQGDSLHEHIANLAGSPAIKKGILQTVKVVDELVKVMGRHKPENIVIEMARENQTTQKGQKNSRERMKRIEEGIKELGSQILKEHPVENTQLQNEKLYLYYLQNGRDMYVDQELDINRLSDYDVDHIVPQSFLKDDSIDNKVLTRSDKARGKSDNVPSEEVVKKMKNYWRQLLNAKLITQRKFDNLTKAERGGLSELDKAGFIKRQLVETRQITKHVAQILDSRMNTKYDENDKLIREVKVITLKSKLVSDFRKDFQFYKVREINNYHHAHDAYLNAVVGTALIKKYPKLESEFVYGDYKVYDVRKMIAKSEQEIGKATAKYFFYSNIMNFFKTEITLANGEIRKRPLIETNGETGEIVWDKGRDFATVRKVLSMPQVNIVKKTEVQTGGFSKESILPKRNSDKLIARKKDWDPKKYGGFDSPTVAYSVLVVAKVEKGKSKKLKSVKELLGITIMERSSFEKNPIDFLEAKGYKEVKKDLIIKLPKYSLFELENGRKRMLASAGELQKGNELALPSKYVNFLYLASHYEKLKGSPEDNEQKQLFVEQHKHYLDEIIEQISEFSKRVILADANLDKVLSAYNKHRDKPIREQAENIIHLFTLTNLGAPAAFKYFDTTIDRKRYTSTKEVLDATLIHQSITGLYETRIDLSQLGGDGGGGGGSGGLGIEDEYRLHETSTEPDVSLGSTWLSDFPQAWAETGGMGLAVRQAPLIIPLKATSTPVSIQQYPMSHEARLGIKPHIQRLLDQGILVPCQSPWNTPLLPVKKPGTNDYRPVQDLREVNKRVEDIHPTVPNPYNLLSGLPPSHQWYTVLDLKDAFFCLRLHPTSQPLFAFEWRDPGMGISGQLTWTRLPQGFKNSPTLFNEALHRDLADFRIQHPDLILLQYVDDILLAATSELDCQQGTRALLQTLGDLGYRASAKKAQICQKQVKYLGYLLREGQRWLTEARKETVMGQPVPKTPRQLREFLGKAGFCRLFIPGFAEMAAPLYPLTKPGTLFSWGPDQQKAYQEIKQALLTAPALGLPDLTKPFELFVDEKQGYAKGVLTQKLGPWRRPVAYLSKKLDPVAAGWPPCLRMVAAIAVLTKDAGKLTMGQPLVILAPHAVEALVKQPPDRWLSNARMTHYQAMLLDTDRVQFGPVVALNPATLLPLPEEGAPHDCLEILAETHGTRPDLTDQPIPDADHTWYTDGSSFLQEGQRKAGAAVTTETEVIWAGALPAGTSAQRAELIALTQALKMAEGKRLNVYTDSRYAFATAHIHGEIYRRRGWLTSEGREIKNKSEILALLKALFLPKRLSIIHCLGHQKGDSAEARGNRLADQAAREAAIKTPPDTSTLLIAGKRTADGSEFEKRTADGSEFESPKKKAKVE

SEQ ID NO: 2126 - protein, 2096 aa, synthetic construct; identical to SEQ ID NO: 2052

SEQ ID NO: 2127 - protein, 2091 aa, synthetic construct
MPAAKRVKLDGGDKKYSIGLDIGTNSVGWAVITDEYKVPSKKFKVLGNTDRHSIKKNLIGALLFDSGETAEATRLKRTARRRYTRRKNRICYLQEIFSNEMAKVDDSFFHRLEESFLVEEDKKHERHPIFGNIVDEVAYHEKYPTIYHLRKKLVDSTDKADLRLIYLALAHMIKFRGHFLIEGDLNPDNSDVDKLFIQLVQTYNQLFEENPINASGVDAKAILSARLSKSRRLENLIAQLPGEKKNGLFGNLIALSLGLTPNFKSNFDLAEDAKLQLSKDTYDDDLDNLLAQIGDQYADLFLAAKNLSDAILLSDILRVNTEITKAPLSASMIKRYDEHHQDLTLLKALVRQQLPEKYKEIFFDQSKNGYAGYIDGGASQEEFYKFIKPILEKMDGTEELLVKLNREDLLRKQRTFDNGSIPHQIHLGELHAILRRQEDFYPFLKDNREKIEKILTFRIPYYVGPLARGNSRFAWMTRKSEETITPWNFEEVVDKGASAQSFIERMTNFDKNLPNEKVLPKHSLLYEYFTVYNELTKVKYVTEGMRKPAFLSGEQKKAIVDLLFKTNRKVTVKQLKEDYFKKIECFDSVEISGVEDRFNASLGTYHDLLKIIKDKDFLDNEENEDILEDIVLTLTLFEDREMIEERLKTYAHLFDDKVMKQLKRRRYTGWGRLSRKLINGIRDKQSGKTILDFLKSDGFANRNFMQLIHDDSLTFKEDIQKAQVSGQGDSLHEHIANLAGSPAIKKGILQTVKVVDELVKVMGRHKPENIVIEMARENQTTQKGQKNSRERMKRIEEGIKELGSQILKEHPVENTQLQNEKLYLYYLQNGRDMYVDQELDINRLSDYDVDHIVPQSFLKDDSIDNKVLTRSDKARGKSDNVPSEEVVKKMKNYWRQLLNAKLITQRKFDNLTKAERGGLSELDKAGFIKRQLVETRQITKHVAQILDSRMNTKYDENDKLIREVKVITLKSKLVSDFRKDFQFYKVREINNYHHAHDAYLNAVVGTALIKKYPKLESEFVYGDYKVYDVRKMIAKSEQEIGKATAKYFFYSNIMNFFKTEITLANGEIRKRPLIETNGETGEIVWDKGRDFATVRKVLSMPQVNIVKKTEVQTGGFSKESILPKRNSDKLIARKKDWDPKKYGGFDSPTVAYSVLVVAKVEKGKSKKLKSVKELLGITIMERSSFEKNPIDFLEAKGYKEVKKDLIIKLPKYSLFELENGRKRMLASAGELQKGNELALPSKYVNFLYLASHYEKLKGSPEDNEQKQLFVEQHKHYLDEIIEQISEFSKRVILADANLDKVLSAYNKHRDKPIREQAENIIHLFTLTNLGAPAAFKYFDTTIDRKRYTSTKEVLDATLIHQSITGLYETRIDLSQLGGDGGGGGPAPGGLGIEDEYRLHETSTEPDVSLGSTWLSDFPQAWAETGGMGLAVRQAPLIIPLKATSTPVSIQQYPMSHEARLGIKPHIQRLLDQGILVPCQSPWNTPLLPVKKPGTNDYRPVQDLREVNKRVEDIHPTVPNPYNLLSGLPPSHQWYTVLDLKDAFFCLRLHPTSQPLFAFEWRDPGMGISGQLTWTRLPQGFKNSPTLFNEALHRDLADFRIQHPDLILLQYVDDILLAATSELDCQQGTRALLQTLGDLGYRASAKKAQICQKQVKYLGYLLREGQRWLTEARKETVMGQPVPKTPRQLREFLGKAGFCRLFIPGFAEMAAPLYPLTKPGTLFSWGPDQQKAYQEIKQALLTAPALGLPDLTKPFELFVDEKQGYAKGVLTQKLGPWRRPVAYLSKKLDPVAAGWPPCLRMVAAIAVLTKDAGKLTMGQPLVILAPHAVEALVKQPPDRWLSNARMTHYQAMLLDTDRVQFGPVVALNPATLLPLPEEGAPHDCLEILAETHGTRPDLTDQPIPDADHTWYTDGSSFLQEGQRKAGAAVTTETEVIWAGALPAGTSAQRAELIALTQALKMAEGKRLNVYTDSRYAFATAHIHGEIYRRRGWLTSEGREIKNKSEILALLKALFLPKRLSIIHCLGHQKGDSAEARGNRLADQAAREAAIKTPPDTSTLLIAGKRTADGSEFEKRTADGSEFESPKKKAKVE

SEQ ID NO: 2128 - protein, 2095 aa, synthetic construct
MPAAKRVKLDGGDKKYSIGLDIGTNSVGWAVITDEYKVPSKKFKVLGNTDRHSIKKNLIGALLFDSGETAEATRLKRTARRRYTRRKNRICYLQEIFSNEMAKVDDSFFHRLEESFLVEEDKKHERHPIFGNIVDEVAYHEKYPTIYHLRKKLVDSTDKADLRLIYLALAHMIKFRGHFLIEGDLNPDNSDVDKLFIQLVQTYNQLFEENPINASGVDAKAILSARLSKSRRLENLIAQLPGEKKNGLFGNLIALSLGLTPNFKSNFDLAEDAKLQLSKDTYDDDLDNLLAQIGDQYADLFLAAKNLSDAILLSDILRVNTEITKAPLSASMIKRYDEHHQDLTLLKALVRQQLPEKYKEIFFDQSKNGYAGYIDGGASQEEFYKFIKPILEKMDGTEELLVKLNREDLLRKQRTFDNGSIPHQIHLGELHAILRRQEDFYPFLKDNREKIEKILTFRIPYYVGPLARGNSRFAWMTRKSEETITPWNFEEVVDKGASAQSFIERMTNFDKNLPNEKVLPKHSLLYEYFTVYNELTKVKYVTEGMRKPAFLSGEQKKAIVDLLFKTNRKVTVKQLKEDYFKKIECFDSVEISGVEDRFNASLGTYHDLLKIIKDKDFLDNEENEDILEDIVLTLTLFEDREMIEERLKTYAHLFDDKVMKQLKRRRYTGWGRLSRKLINGIRDKQSGKTILDFLKSDGFANRNFMQLIHDDSLTFKEDIQKAQVSGQGDSLHEHIANLAGSPAIKKGILQTVKVVDELVKVMGRHKPENIVIEMARENQTTQKGQKNSRERMKRIEEGIKELGSQILKEHPVENTQLQNEKLYLYYLQNGRDMYVDQELDINRLSDYDVDHIVPQSFLKDDSIDNKVLTRSDKARGKSDNVPSEEVVKKMKNYWRQLLNAKLITQRKFDNLTKAERGGLSELDKAGFIKRQLVETRQITKHVAQILDSRMNTKYDENDKLIREVKVITLKSKLVSDFRKDFQFYKVREINNYHHAHDAYLNAVVGTALIKKYPKLESEFVYGDYKVYDVRKMIAKSEQEIGKATAKYFFYSNIMNFFKTEITLANGEIRKRPLIETNGETGEIVWDKGRDFATVRKVLSMPQVNIVKKTEVQTGGFSKESILPKRNSDKLIARKKDWDPKKYGGFDSPTVAYSVLVVAKVEKGKSKKLKSVKELLGITIMERSSFEKNPIDFLEAKGYKEVKKDLIIKLPKYSLFELENGRKRMLASAGELQKGNELALPSKYVNFLYLASHYEKLKGSPEDNEQKQLFVEQHKHYLDEIIEQISEFSKRVILADANLDKVLSAYNKHRDKPIREQAENIIHLFTLTNLGAPAAFKYFDTTIDRKRYTSTKEVLDATLIHQSITGLYETRIDLSQLGGDGGEAAAKEAAAKGGLGIEDEYRLHETSTEPDVSLGSTWLSDFPQAWAETGGMGLAVRQAPLIIPLKATSTPVSIQQYPMSHEARLGIKPHIQRLLDQGILVPCQSPWNTPLLPVKKPGTNDYRPVQDLREVNKRVEDIHPTVPNPYNLLSGLPPSHQWYTVLDLKDAFFCLRLHPTSQPLFAFEWRDPGMGISGQLTWTRLPQGFKNSPTLFNEALHRDLADFRIQHPDLILLQYVDDILLAATSELDCQQGTRALLQTLGDLGYRASAKKAQICQKQVKYLGYLLREGQRWLTEARKETVMGQPVPKTPRQLREFLGKAGFCRLFIPGFAEMAAPLYPLTKPGTLFSWGPDQQKAYQEIKQALLTAPALGLPDLTKPFELFVDEKQGYAKGVLTQKLGPWRRPVAYLSKKLDPVAAGWPPCLRMVAAIAVLTKDAGKLTMGQPLVILAPHAVEALVKQPPDRWLSNARMTHYQAMLLDTDRVQFGPVVALNPATLLPLPEEGAPHDCLEILAETHGTRPDLTDQPIPDADHTWYTDGSSFLQEGQRKAGAAVTTETEVIWAGALPAGTSAQRAELIALTQALKMAEGKRLNVYTDSRYAFATAHIHGEIYRRRGWLTSEGREIKNKSEILALLKALFLPKRLSIIHCLGHQKGDSAEARGNRLADQAAREAAIKTPPDTSTLLIAGKRTADGSEFEKRTADGSEFESPKKKAKVE

SEQ ID NO: 2129 - protein, 2096 aa, synthetic construct; identical to SEQ ID NO: 2059

SEQ ID NO: 2130 - protein, 2096 aa, synthetic construct
MPAAKRVKLDGGDKKYSIGLDIGTNSVGWAVITDEYKVPSKKFKVLGNTDRHSIKKNLIGALLFDSGETAEATRLKRTARRRYTRRKNRICYLQEIFSNEMAKVDDSFFHRLEESFLVEEDKKHERHPIFGNIVDEVAYHEKYPTIYHLRKKLVDSTDKADLRLIYLALAHMIKFRGHFLIEGDLNPDNSDVDKLFIQLVQTYNQLFEENPINASGVDAKAILSARLSKSRRLENLIAQLPGEKKNGLFGNLIALSLGLTPNFKSNFDLAEDAKLQLSKDTYDDDLDNLLAQIGDQYADLFLAAKNLSDAILLSDILRVNTEITKAPLSASMIKRYDEHHQDLTLLKALVRQQLPEKYKEIFFDQSKNGYAGYIDGGASQEEFYKFIKPILEKMDGTEELLVKLNREDLLRKQRTFDNGSIPHQIHLGELHAILRRQEDFYPFLKDNREKIEKILTFRIPYYVGPLARGNSRFAWMTRKSEETITPWNFEEVVDKGASAQSFIERMTNFDKNLPNEKVLPKHSLLYEYFTVYNELTKVKYVTEGMRKPAFLSGEQKKAIVDLLFKTNRKVTVKQLKEDYFKKIECFDSVEISGVEDRFNASLGTYHDLLKIIKDKDFLDNEENEDILEDIVLTLTLFEDREMIEERLKTYAHLFDDKVMKQLKRRRYTGWGRLSRKLINGIRDKQSGKTILDFLKSDGFANRNFMQLIHDDSLTFKEDIQKAQVSGQGDSLHEHIANLAGSPAIKKGILQTVKVVDELVKVMGRHKPENIVIEMARENQTTQKGQKNSRERMKRIEEGIKELGSQILKEHPVENTQLQNEKLYLYYLQNGRDMYVDQELDINRLSDYDVDHIVPQSFLKDDSIDNKVLTRSDKARGKSDNVPSEEVVKKMKNYWRQLLNAKLITQRKFDNLTKAERGGLSELDKAGFIKRQLVETRQITKHVAQILDSRMNTKYDENDKLIREVKVITLKSKLVSDFRKDFQFYKVREINNYHHAHDAYLNAVVGTALIKKYPKLESEFVYGDYKVYDVRKMIAKSEQEIGKATAKYFFYSNIMNFFKTEITLANGEIRKRPLIETNGETGEIVWDKGRDFATVRKVLSMPQVNIVKKTEVQTGGFSKESILPKRNSDKLIARKKDWDPKKYGGFDSPTVAYSVLVVAKVEKGKSKKLKSVKELLGITIMERSSFEKNPIDFLEAKGYKEVKKDLIIKLPKYSLFELENGRKRMLASAGELQKGNELALPSKYVNFLYLASHYEKLKGSPEDNEQKQLFVEQHKHYLDEIIEQISEFSKRVILADANLDKVLSAYNKHRDKPIREQAENIIHLFTLTNLGAPAAFKYFDTTIDRKRYTSTKEVLDATLIHQSITGLYETRIDLSQLGGDGGEAAAKPAPGGGGGLGIEDEYRLHETSTEPDVSLGSTWLSDFPQAWAETGGMGLAVRQAPLIIPLKATSTPVSIQQYPMSHEARLGIKPHIQRLLDQGILVPCQSPWNTPLLPVKKPGTNDYRPVQDLREVNKRVEDIHPTVPNPYNLLSGLPPSHQWYTVLDLKDAFFCLRLHPTSQPLFAFEWRDPGMGISGQLTWTRLPQGFKNSPTLFNEALHRDLADFRIQHPDLILLQYVDDILLAATSELDCQQGTRALLQTLGDLGYRASAKKAQICQKQVKYLGYLLREGQRWLTEARKETVMGQPVPKTPRQLREFLGKAGFCRLFIPGFAEMAAPLYPLTKPGTLFSWGPDQQKAYQEIKQALLTAPALGLPDLTKPFELFVDEKQGYAKGVLTQKLGPWRRPVAYLSKKLDPVAAGWPPCLRMVAAIAVLTKDAGKLTMGQPLVILAPHAVEALVKQPPDRWLSNARMTHYQAMLLDTDRVQFGPVVALNPATLLPLPEEGAPHDCLEILAETHGTRPDLTDQPIPDADHTWYTDGSSFLQEGQRKAGAAVTTETEVIWAGALPAGTSAQRAELIALTQALKMAEGKRLNVYTDSRYAFATAHIHGEIYRRRGWLTSEGREIKNKSEILALLKALFLPKRLSIIHCLGHQKGDSAEARGNRLADQAAREAAIKTPPDTSTLLIAGKRTADGSEFEKRTADGSEFESPKKKAKVE

SEQ ID NO: 2131 - protein, 2088 aa, synthetic construct
MPAAKRVKLDGGDKKYSIGLDIGTNSVGWAVITDEYKVPSKKFKVLGNTDRHSIKKNLIGALLFDSGETAEATRLKRTARRRYTRRKNRICYLQEIFSNEMAKVDDSFFHRLEESFLVEEDKKHERHPIFGNIVDEVAYHEKYPTIYHLRKKLVDSTDKADLRLIYLALAHMIKFRGHFLIEGDLNPDNSDVDKLFIQLVQTYNQLFEENPINASGVDAKAILSARLSKSRRLENLIAQLPGEKKNGLFGNLIALSLGLTPNFKSNFDLAEDAKLQLSKDTYDDDLDNLLAQIGDQYADLFLAAKNLSDAILLSDILRVNTEITKAPLSASMIKRYDEHHQDLTLLKALVRQQLPEKYKEIFFDQSKNGYAGYIDGGASQEEFYKFIKPILEKMDGTEELLVKLNREDLLRKQRTFDNGSIPHQIHLGELHAILRRQEDFYPFLKDNREKIEKILTFRIPYYVGPLARGNSRFAWMTRKSEETITPWNFEEVVDKGASAQSFIERMTNFDKNLPNEKVLPKHSLLYEYFTVYNELTKVKYVTEGMRKPAFLSGEQKKAIVDLLFKTNRKVTVKQLKEDYFKKIECFDSVEISGVEDRFNASLGTYHDLLKIIKDKDFLDNEENEDILEDIVLTLTLFEDREMIEERLKTYAHLFDDKVMKQLKRRRYTGWGRLSRKLINGIRDKQSGKTILDFLKSDGFANRNFMQLIHDDSLTFKEDIQKAQVSGQGDSLHEHIANLAGSPAIKKGILQTVKVVDELVKVMGRHKPENIVIEMARENQTTQKGQKNSRERMKRIEEGIKELGSQILKEHPVENTQLQNEKLYLYYLQNGRDMYVDQELDINRLSDYDVDHIVPQSFLKDDSIDNKVLTRSDKARGKSDNVPSEEVVKKMKNYWRQLLNAKLITQRKFDNLTKAERGGLSELDKAGFIKRQLVETRQITKHVAQILDSRMNTKYDENDKLIREVKVITLKSKLVSDFRKDFQFYKVREINNYHHAHDAYLNAVVGTALIKKYPKLESEFVYGDYKVYDVRKMIAKSEQEIGKATAKYFFYSNIMNFFKTEITLANGEIRKRPLIETNGETGEIVWDKGRDFATVRKVLSMPQVNIVKKTEVQTGGFSKESILPKRNSDKLIARKKDWDPKKYGGFDSPTVAYSVLVVAKVEKGKSKKLKSVKELLGITIMERSSFEKNPIDFLEAKGYKEVKKDLIIKLPKYSLFELENGRKRMLASAGELQKGNELALPSKYVNFLYLASHYEKLKGSPEDNEQKQLFVEQHKHYLDEIIEQISEFSKRVILADANLDKVLSAYNKHRDKPIREQAENIIHLFTLTNLGAPAAFKYFDTTIDRKRYTSTKEVLDATLIHQSITGLYETRIDLSQLGGDGGGGSGGLGIEDEYRLHETSTEPDVSLGSTWLSDFPQAWAETGGMGLAVRQAPLIIPLKATSTPVSIQQYPMSHEARLGIKPHIQRLLDQGILVPCQSPWNTPLLPVKKPGTNDYRPVQDLREVNKRVEDIHPTVPNPYNLLSGLPPSHQWYTVLDLKDAFFCLRLHPTSQPLFAFEWRDPGMGISGQLTWTRLPQGFKNSPTLFNEALHRDLADFRIQHPDLILLQYVDDILLAATSELDCQQGTRALLQTLGDLGYRASAKKAQICQKQVKYLGYLLREGQRWLTEARKETVMGQPVPKTPRQLREFLGKAGFCRLFIPGFAEMAAPLYPLTKPGTLFSWGPDQQKAYQEIKQALLTAPALGLPDLTKPFELFVDEKQGYAKGVLTQKLGPWRRPVAYLSKKLDPVAAGWPPCLRMVAAIAVLTKDAGKLTMGQPLVILAPHAVEALVKQPPDRWLSNARMTHYQAMLLDTDRVQFGPVVALNPATLLPLPEEGAPHDCLEILAETHGTRPDLTDQPIPDADHTWYTDGSSFLQEGQRKAGAAVTTETEVIWAGALPAGTSAQRAELIALTQALKMAEGKRLNVYTDSRYAFATAHIHGEIYRRRGWLTSEGREIKNKSEILALLKALFLPKRLSIIHCLGHQKGDSAEARGNRLADQAAREAAIKTPPDTSTLLIAGKRTADGSEFEKRTADGSEFESPKKKAKVE

SEQ ID NO: 2132 - protein, 2096 aa, synthetic construct
MPAAKRVKLDGGDKKYSIGLDIGTNSVGWAVITDEYKVPSKKFKVLGNTDRHSIKKNLIGALLFDSGETAEATRLKRTARRRYTRRKNRICYLQEIFSNEMAKVDDSFFHRLEESFLVEEDKKHERHPIFGNIVDEVAYHEKYPTIYHLRKKLVDSTDKADLRLIYLALAHMIKFRGHFLIEGDLNPDNSDVDKLFIQLVQTYNQLFEENPINASGVDAKAILSARLSKSRRLENLIAQLPGEKKNGLFGNLIALSLGLTPNFKSNFDLAEDAKLQLSKDTYDDDLDNLLAQIGDQYADLFLAAKNLSDAILLSDILRVNTEITKAPLSASMIKRYDEHHQDLTLLKALVRQQLPEKYKEIFFDQSKNGYAGYIDGGASQEEFYKFIKPILEKMDGTEELLVKLNREDLLRKQRTFDNGSIPHQIHLGELHAILRRQEDFYPFLKDNREKIEKILTFRIPYYVGPLARGNSRFAWMTRKSEETITPWNFEEVVDKGASAQSFIERMTNFDKNLPNEKVLPKHSLLYEYFTVYNELTKVKYVTEGMRKPAFLSGEQKKAIVDLLFKTNRKVTVKQLKEDYFKKIECFDSVEISGVEDRFNASLGTYHDLLKIIKDKDFLDNEENEDILEDIVLTLTLFEDREMIEERLKTYAHLFDDKVMKQLKRRRYTGWGRLSRKLINGIRDKQSGKTILDFLKSDGFANRNFMQLIHDDSLTFKEDIQKAQVSGQGDSLHEHIANLAGSPAIKKGILQTVKVVDELVKVMGRHKPENIVIEMARENQTTQKGQKNSRERMKRIEEGIKELGSQILKEHPVENTQLQNEKLYLYYLQNGRDMYVDQELDINRLSDYDVDHIVPQSFLKDDSIDNKVLTRSDKARGKSDNVPSEEVVKKMKNYWRQLLNAKLITQRKFDNLTKAERGGLSELDKAGFIKRQLVETRQITKHVAQILDSRMNTKYDENDKLIREVKVITLKSKLVSDFRKDFQFYKVREINNYHHAHDAYLNAVVGTALIKKYPKLESEFVYGDYKVYDVRKMIAKSEQEIGKATAKYFFYSNIMNFFKTEITLANGEIRKRPLIETNGETGEIVWDKGRDFATVRKVLSMPQVNIVKKTEVQTGGFSKESILPKRNSDKLIARKKDWDPKKYGGFDSPTVAYSVLVVAKVEKGKSKKLKSVKELLGITIMERSSFEKNPIDFLEAKGYKEVKKDLIIKLPKYSLFELENGRKRMLASAGELQKGNELALPSKYVNFLYLASHYEKLKGSPEDNEQKQLFVEQHKHYLDEIIEQISEFSKRVILADANLDKVLSAYNKHRDKPIREQAENIIHLFTLTNLGAPAAFKYFDTTIDRKRYTSTKEVLDATLIHQSITGLYETRIDLSQLGGDGGGGGEAAAKGGSGGLGIEDEYRLHETSTEPDVSLGSTWLSDFPQAWAETGGMGLAVRQAPLIIPLKATSTPVSIQQYPMSHEARLGIKPHIQRLLDQGILVPCQSPWNTPLLPVKKPGTNDYRPVQDLREVNKRVEDIHPTVPNPYNLLSGLPPSHQWYTVLDLKDAFFCLRLHPTSQPLFAFEWRDPGMGISGQLTWTRLPQGFKNSPTLFNEALHRDLADFRIQHPDLILLQYVDDILLAATSELDCQQGTRALLQTLGDLGYRASAKKAQICQKQVKYLGYLLREGQRWLTEARKETVMGQPVPKTPRQLREFLGKAGFCRLFIPGFAEMAAPLYPLTKPGTLFSWGPDQQKAYQEIKQALLTAPALGLPDLTKPFELFVDEKQGYAKGVLTQKLGPWRRPVAYLSKKLDPVAAGWPPCLRMVAAIAVLTKDAGKLTMGQPLVILAPHAVEALVKQPPDRWLSNARMTHYQAMLLDTDRVQFGPVVALNPATLLPLPEEGAPHDCLEILAETHGTRPDLTDQPIPDADHTWYTDGSSFLQEGQRKAGAAVTTETEVIWAGALPAGTSAQRAELIALTQALKMAEGKRLNVYTDSRYAFATAHIHGEIYRRRGWLTSEGREIKNKSEILALLKALFLPKRLSIIHCLGHQKGDSAEARGNRLADQAAREAAIKTPPDTSTLLIAGKRTADGSEFEKRTADGSEFESPKKKAKVE

SEQ ID NO: 2133 - protein, 2094 aa, synthetic construct
MPAAKRVKLDGGDKKYSIGLDIGTNSVGWAVITDEYKVPSKKFKVLGNTDRHSIKKNLIGALLFDSGETAEATRLKRTARRRYTRRKNRICYLQEIFSNEMAKVDDSFFHRLEESFLVEEDKKHERHPIFGNIVDEVAYHEKYPTIYHLRKKLVDSTDKADLRLIYLALAHMIKFRGHFLIEGDLNPDNSDVDKLFIQLVQTYNQLFEENPINASGVDAKAILSARLSKSRRLENLIAQLPGEKKNGLFGNLIALSLGLTPNFKSNFDLAEDAKLQLSKDTYDDDLDNLLAQIGDQYADLFLAAKNLSDAILLSDILRVNTEITKAPLSASMIKRYDEHHQDLTLLKALVRQQLPEKYKEIFFDQSKNGYAGYIDGGASQEEFYKFIKPILEKMDGTEELLVKLNREDLLRKQRTFDNGSIPHQIHLGELHAILRRQEDFYPFLKDNREKIEKILTFRIPYYVGPLARGNSRFAWMTRKSEETITPWNFEEVVDKGASAQSFIERMTNFDKNLPNEKVLPKHSLLYEYFTVYNELTKVKYVTEGMRKPAFLSGEQKKAIVDLLFKTNRKVTVKQLKEDYFKKIECFDSVEISGVEDRFNASLGTYHDLLKIIKDKDFLDNEENEDILEDIVLTLTLFEDREMIEERLKTYAHLFDDKVMKQLKRRRYTGWGRLSRKLINGIRDKQSGKTILDFLKSDGFANRNFMQLIHDDSLTFKEDIQKAQVSGQGDSLHEHIANLAGSPAIKKGILQTVKVVDELVKVMGRHKPENIVIEMARENQTTQKGQKNSRERMKRIEEGIKELGSQILKEHPVENTQLQNEKLYLYYLQNGRDMYVDQELDINRLSDYDVDHIVPQSFLKDDSIDNKVLTRSDKARGKSDNVPSEEVVKKMKNYWRQLLNAKLITQRKFDNLTKAERGGLSELDKAGFIKRQLVETRQITKHVAQILDSRMNTKYDENDKLIREVKVITLKSKLVSDFRKDFQFYKVREINNYHHAHDAYLNAVVGTALIKKYPKLESEFVYGDYKVYDVRKMIAKSEQEIGKATAKYFFYSNIMNFFKTEITLANGEIRKRPLIETNGETGEIVWDKGRDFATVRKVLSMPQVNIVKKTEVQTGGFSKESILPKRNSDKLIARKKDWDPKKYGGFDSPTVAYSVLVVAKVEKGKSKKLKSVKELLGITIMERSSFEKNPIDFLEAKGYKEVKKDLIIKLPKYSLFELENGRKRMLASAGELQKGNELALPSKYVNFLYLASHYEKLKGSPEDNEQKQLFVEQHKHYLDEIIEQISEFSKRVILADANLDKVLSAYNKHRDKPIREQAENIIHLFTLTNLGAPAAFKYFDTTIDRKRYTSTKEVLDATLIHQSITGLYETRIDLSQLGGDGGGGGGGSPAPGGLGIEDEYRLHETSTEPDVSLGSTWLSDFPQAWAETGGMGLAVRQAPLIIPLKATSTPVSIQQYPMSHEARLGIKPHIQRLLDQGILVPCQSPWNTPLLPVKKPGTNDYRPVQDLREVNKRVEDIHPTVPNPYNLLSGLPPSHQWYTVLDLKDAFFCLRLHPTSQPLFAFEWRDPGMGISGQLTWTRLPQGFKNSPTLFNEALHRDLADFRIQHPDLILLQYVDDILLAATSELDCQQGTRALLQTLGDLGYRASAKKAQICQKQVKYLGYLLREGQRWLTEARKETVMGQPVPKTPRQLREFLGKAGFCRLFIPGFAEMAAPLYPLTKPGTLFSWGPDQQKAYQEIKQALLTAPALGLPDLTKPFELFVDEKQGYAKGVLTQKLGPWRRPVAYLSKKLDPVAAGWPPCLRMVAAIAVLTKDAGKLTMGQPLVILAPHAVEALVKQPPDRWLSNARMTHYQAMLLDTDRVQFGPVVALNPATLLPLPEEGAPHDCLEILAETHGTRPDLTDQPIPDADHTWYTDGSSFLQEGQRKAGAAVTTETEVIWAGALPAGTSAQRAELIALTQALKMAEGKRLNVYTDSRYAFATAHIHGEIYRRRGWLTSEGREIKNKSEILALLKALFLPKRLSIIHCLGHQKGDSAEARGNRLADQAAREAAIKTPPDTSTLLIAGKRTADGSEFEKRTADGSEFESPKKKAKVE

SEQ ID NO: 2134 - protein, 2091 aa, synthetic construct
MPAAKRVKLDGGDKKYSIGLDIGTNSVGWAVITDEYKVPSKKFKVLGNTDRHSIKKNLIGALLFDSGETAEATRLKRTARRRYTRRKNRICYLQEIFSNEMAKVDDSFFHRLEESFLVEEDKKHERHPIFGNIVDEVAYHEKYPTIYHLRKKLVDSTDKADLRLIYLALAHMIKFRGHFLIEGDLNPDNSDVDKLFIQLVQTYNQLFEENPINASGVDAKAILSARLSKSRRLENLIAQLPGEKKNGLFGNLIALSLGLTPNFKSNFDLAEDAKLQLSKDTYDDDLDNLLAQIGDQYADLFLAAKNLSDAILLSDILRVNTEITKAPLSASMIKRYDEHHQDLTLLKALVRQQLPEKYKEIFFDQSKNGYAGYIDGGASQEEFYKFIKPILEKMDGTEELLVKLNREDLLRKQRTFDNGSIPHQIHLGELHAILRRQEDFYPFLKDNREKIEKILTFRIPYYVGPLARGNSRFAWMTRKSEETITPWNFEEVVDKGASAQSFIERMTNFDKNLPNEKVLPKHSLLYEYFTVYNELTKVKYVTEGMRKPAFLSGEQKKAIVDLLFKTNRKVTVKQLKEDYFKKIECFDSVEISGVEDRFNASLGTYHDLLKIIKDKDFLDNEENEDILEDIVLTLTLFEDREMIEERLKTYAHLFDDKVMKQLKRRRYTGWGRLSRKLINGIRDKQSGKTILDFLKSDGFANRNFMQLIHDDSLTFKEDIQKAQVSGQGDSLHEHIANLAGSPAIKKGILQTVKVVDELVKVMGRHKPENIVIEMARENQTTQKGQKNSRERMKRIEEGIKELGSQILKEHPVENTQLQNEKLYLYYLQNGRDMYVDQELDINRLSDYDVDHIVPQSFLKDDSIDNKVLTRSDKARGKSDNVPSEEVVKKMKNYWRQLLNAKLITQRKFDNLTKAERGGLSELDKAGFIKRQLVETRQITKHVAQILDSRMNTKYDENDKLIREVKVITLKSKLVSDFRKDFQFYKVREINNYHHAHDAYLNAVVGTALIKKYPKLESEFVYGDYKVYDVRKMIAKSEQEIGKATAKYFFYSNIMNFFKTEITLANGEIRKRPLIETNGETGEIVWDKGRDFATVRKVLSMPQVNIVKKTEVQTGGFSKESILPKRNSDKLIARKKDWDPKKYGGFDSPTVAYSVLVVAKVEKGKSKKLKSVKELLGITIMERSSFEKNPIDFLEAKGYKEVKKDLIIKLPKYSLFELENGRKRMLASAGELQKGNELALPSKYVNFLYLASHYEKLKGSPEDNEQKQLFVEQHKHYLDEIIEQISEFSKRVILADANLDKVLSAYNKHRDKPIREQAENIIHLFTLTNLGAPAAFKYFDTTIDRKRYTSTKEVLDATLIHQSITGLYETRIDLSQLGGDGGPAPGGGGGLGIEDEYRLHETSTEPDVSLGSTWLSDFPQAWAETGGMGLAVRQAPLIIPLKATSTPVSIQQYPMSHEARLGIKPHIQRLLDQGILVPCQSPWNTPLLPVKKPGTNDYRPVQDLREVNKRVEDIHPTVPNPYNLLSGLPPSHQWYTVLDLKDAFFCLRLHPTSQPLFAFEWRDPGMGISGQLTWTRLPQGFKNSPTLFNEALHRDLADFRIQHPDLILLQYVDDILLAATSELDCQQGTRALLQTLGDLGYRASAKKAQICQKQVKYLGYLLREGQRWLTEARKETVMGQPVPKTPRQLREFLGKAGFCRLFIPGFAEMAAPLYPLTKPGTLFSWGPDQQKAYQEIKQALLTAPALGLPDLTKPFELFVDEKQGYAKGVLTQKLGPWRRPVAYLSKKLDPVAAGWPPCLRMVAAIAVLTKDAGKLTMGQPLVILAPHAVEALVKQPPDRWLSNARMTHYQAMLLDTDRVQFGPVVALNPATLLPLPEEGAPHDCLEILAETHGTRPDLTDQPIPDADHTWYTDGSSFLQEGQRKAGAAVTTETEVIWAGALPAGTSAQRAELIALTQALKMAEGKRLNVYTDSRYAFATAHIHGEIYRRRGWLTSEGREIKNKSEILALLKALFLPKRLSIIHCLGHQKGDSAEARGNRLADQAAREAAIKTPPDTSTLLIAGKRTADGSEFEKRTADGSEFESPKKKAKVE

SEQ ID NO: 2135 - protein, 2096 aa, synthetic construct
MPAAKRVKLDGGDKKYSIGLDIGTNSVGWAVITDEYKVPSKKFKVLGNTDRHSIKKNLIGALLFDSGETAEATRLKRTARRRYTRRKNRICYLQEIFSNEMAKVDDSFFHRLEESFLVEEDKKHERHPIFGNIVDEVAYHEKYPTIYHLRKKLVDSTDKADLRLIYLALAHMIKFRGHFLIEGDLNPDNSDVDKLFIQLVQTYNQLFEENPINASGVDAKAILSARLSKSRRLENLIAQLPGEKKNGLFGNLIALSLGLTPNFKSNFDLAEDAKLQLSKDTYDDDLDNLLAQIGDQYADLFLAAKNLSDAILLSDILRVNTEITKAPLSASMIKRYDEHHQDLTLLKALVRQQLPEKYKEIFFDQSKNGYAGYIDGGASQEEFYKFIKPILEKMDGTEELLVKLNREDLLRKQRTFDNGSIPHQIHLGELHAILRRQEDFYPFLKDNREKIEKILTFRIPYYVGPLARGNSRFAWMTRKSEETITPWNFEEVVDKGASAQSFIERMTNFDKNLPNEKVLPKHSLLYEYFTVYNELTKVKYVTEGMRKPAFLSGEQKKAIVDLLFKTNRKVTVKQLKEDYFKKIECFDSVEISGVEDRFNASLGTYHDLLKIIKDKDFLDNEENEDILEDIVLTLTLFEDREMIEERLKTYAHLFDDKVMKQLKRRRYTGWGRLSRKLINGIRDKQSGKTILDFLKSDGFANRNFMQLIHDDSLTFKEDIQKAQVSGQGDSLHEHIANLAGSPAIKKGILQTVKVVDELVKVMGRHKPENIVIEMARENQTTQKGQKNSRERMKRIEEGIKELGSQILKEHPVENTQLQNEKLYLYYLQNGRDMYVDQELDINRLSDYDVDHIVPQSFLKDDSIDNKVLTRSDKARGKSDNVPSEEVVKKMKNYWRQLLNAKLITQRKFDNLTKAERGGLSELDKAGFIKRQLVETRQITKHVAQILDSRMNTKYDENDKLIREVKVITLKSKLVSDFRKDFQFYKVREINNYHHAHDAYLNAVVGTALIKKYPKLESEFVYGDYKVYDVRKMIAKSEQEIGKATAKYFFYSNIMNFFKTEITLANGEIRKRPLIETNGETGEIVWDKGRDFATVRKVLSMPQVNIVKKTEVQTGGFSKESILPKRNSDKLIARKKDWDPKKYGGFDSPTVAYSVLVVAKVEKGKSKKLKSVKELLGITIMERSSFEKNPIDFLEAKGYKEVKKDLIIKLPKYSLFELENGRKRMLASAGELQKGNELALPSKYVNFLYLASHYEKLKGSPEDNEQKQLFVEQHKHYLDEIIEQISEFSKRVILADANLDKVLSAYNKHRDKPIREQAENIIHLFTLTNLGAPAAFKYFDTTIDRKRYTSTKEVLDATLIHQSITGLYETRIDLSQLGGDGGGGGEAAAKPAPGGLGIEDEYRLHETSTEPDVSLGSTWLSDFPQAWAETGGMGLAVRQAPLIIPLKATSTPVSIQQYPMSHEARLGIKPHIQRLLDQGILVPCQSPWNTPLLPVKKPGTNDYRPVQDLREVNKRVEDIHPTVPNPYNLLSGLPPSHQWYTVLDLKDAFFCLRLHPTSQPLFAFEWRDPGMGISGQLTWTRLPQGFKNSPTLFNEALHRDLADFRIQHPDLILLQYVDDILLAATSELDCQQGTRALLQTLGDLGYRASAKKAQICQKQVKYLGYLLREGQRWLTEARKETVMGQPVPKTPRQLREFLGKAGFCRLFIPGFAEMAAPLYPLTKPGTLFSWGPDQQKAYQEIKQALLTAPALGLPDLTKPFELFVDEKQGYAKGVLTQKLGPWRRPVAYLSKKLDPVAAGWPPCLRMVAAIAVLTKDAGKLTMGQPLVILAPHAVEALVKQPPDRWLSNARMTHYQAMLLDTDRVQFGPVVALNPATLLPLPEEGAPHDCLEILAETHGTRPDLTDQPIPDADHTWYTDGSSFLQEGQRKAGAAVTTETEVIWAGALPAGTSAQRAELIALTQALKMAEGKRLNVYTDSRYAFATAHIHGEIYRRRGWLTSEGREIKNKSEILALLKALFLPKRLSIIHCLGHQKGDSAEARGNRLADQAAREAAIKTPPDTSTLLIAGKRTADGSEFEKRTADGSEFESPKKKAKVE

SEQ ID NO: 2136 - protein, 2091 aa, synthetic construct
MPAAKRVKLDGGDKKYSIGLDIGTNSVGWAVITDEYKVPSKKFKVLGNTDRHSIKKNLIGALLFDSGETAEATRLKRTARRRYTRRKNRICYLQEIFSNEMAKVDDSFFHRLEESFLVEEDKKHERHPIFGNIVDEVAYHEKYPTIYHLRKKLVDSTDKADLRLIYLALAHMIKFRGHFLIEGDLNPDNSDVDKLFIQLVQTYNQLFEENPINASGVDAKAILSARLSKSRRLENLIAQLPGEKKNGLFGNLIALSLGLTPNFKSNFDLAEDAKLQLSKDTYDDDLDNLLAQIGDQYADLFLAAKNLSDAILLSDILRVNTEITKAPLSASMIKRYDEHHQDLTLLKALVRQQLPEKYKEIFFDQSKNGYAGYIDGGASQEEFYKFIKPILEKMDGTEELLVKLNREDLLRKQRTFDNGSIPHQIHLGELHAILRRQEDFYPFLKDNREKIEKILTFRIPYYVGPLARGNSRFAWMTRKSEETITPWNFEEVVDKGASAQSFIERMTNFDKNLPNEKVLPKHSLLYEYFTVYNELTKVKYVTEGMRKPAFLSGEQKKAIVDLLFKTNRKVTVKQLKEDYFKKIECFDSVEISGVEDRFNASLGTYHDLLKIIKDKDFLDNEENEDILEDIVLTLTLFEDREMIEERLKTYAHLFDDKVMKQLKRRRYTGWGRLSRKLINGIRDKQSGKTILDFLKSDGFANRNFMQLIHDDSLTFKEDIQKAQVSGQGDSLHEHIANLAGSPAIKKGILQTVKVVDELVKVMGRHKPENIVIEMARENQTTQKGQKNSRERMKRIEEGIKELGSQILKEHPVENTQLQNEKLYLYYLQNGRDMYVDQELDINRLSDYDVDHIVPQSFLKDDSIDNKVLTRSDKARGKSDNVPSEEVVKKMKNYWRQLLNAKLITQRKFDNLTKAERGGLSELDKAGFIKRQLVETRQITKHVAQILDSRMNTKYDENDKLIREVKVITLKSKLVSDFRKDFQFYKVREINNYHHAHDAYLNAVVGTALIKKYPKLESEFVYGDYKVYDVRKMIAKSEQEIGKATAKYFFYSNIMNFFKTEITLANGEIRKRPLIETNGETGEIVWDKGRDFATVRKVLSMPQVNIVKKTEVQTGGFSKESILPKRNSDKLIARKKDWDPKKYGGFDSPTVAYSVLVVAKVEKGKSKKLKSVKELLGITIMERSSFEKNPIDFLEAKGYKEVKKDLIIKLPKYSLFELENGRKRMLASAGELQKGNELALPSKYVNFLYLASHYEKLKGSPEDNEQKQLFVEQHKHYLDEIIEQISEFSKRVILADANLDKVLSAYNKHRDKPIREQAENIIHLFTLTNLGAPAAFKYFDTTIDRKRYTSTKEVLDATLIHQSITGLYETRIDLSQLGGDGGGGSPAPGGLGIEDEYRLHETSTEPDVSLGSTWLSDFPQAWAETGGMGLAVRQAPLIIPLKATSTPVSIQQYPMSHEARLGIKPHIQRLLDQGILVPCQSPWNTPLLPVKKPGTNDYRPVQDLREVNKRVEDIHPTVPNPYNLLSGLPPSHQWYTVLDLKDAFFCLRLHPTSQPLFAFEWRDPGMGISGQLTWTRLPQGFKNSPTLFNEALHRDLADFRIQHPDLILLQYVDDILLAATSELDCQQGTRALLQTLGDLGYRASAKKAQICQKQVKYLGYLLREGQRWLTEARKETVMGQPVPKTPRQLREFLGKAGFCRLFIPGFAEMAAPLYPLTKPGTLFSWGPDQQKAYQEIKQALLTAPALGLPDLTKPFELFVDEKQGYAKGVLTQKLGPWRRPVAYLSKKLDPVAAGWPPCLRMVAAIAVLTKDAGKLTMGQPLVILAPHAVEALVKQPPDRWLSNARMTHYQAMLLDTDRVQFGPVVALNPATLLPLPEEGAPHDCLEILAETHGTRPDLTDQPIPDADHTWYTDGSSFLQEGQRKAGAAVTTETEVIWAGALPAGTSAQRAELIALTQALKMAEGKRLNVYTDSRYAFATAHIHGEIYRRRGWLTSEGREIKNKSEILALLKALFLPKRLSIIHCLGHQKGDSAEARGNRLADQAAREAAIKTPPDTSTLLIAGKRTADGSEFEKRTADGSEFESPKKKAKVE

SEQ ID NO: 2137 - protein, 2097 aa, synthetic construct
MPAAKRVKLDGGDKKYSIGLDIGTNSVGWAVITDEYKVPSKKFKVLGNTDRHSIKKNLIGALLFDSGETAEATRLKRTARRRYTRRKNRICYLQEIFSNEMAKVDDSFFHRLEESFLVEEDKKHERHPIFGNIVDEVAYHEKYPTIYHLRKKLVDSTDKADLRLIYLALAHMIKFRGHFLIEGDLNPDNSDVDKLFIQLVQTYNQLFEENPINASGVDAKAILSARLSKSRRLENLIAQLPGEKKNGLFGNLIALSLGLTPNFKSNFDLAEDAKLQLSKDTYDDDLDNLLAQIGDQYADLFLAAKNLSDAILLSDILRVNTEITKAPLSASMIKRYDEHHQDLTLLKALVRQQLPEKYKEIFFDQSKNGYAGYIDGGASQEEFYKFIKPILEKMDGTEELLVKLNREDLLRKQRTFDNGSIPHQIHLGELHAILRRQEDFYPFLKDNREKIEKILTFRIPYYVGPLARGNSRFAWMTRKSEETITPWNFEEVVDKGASAQSFIERMTNFDKNLPNEKVLPKHSLLYEYFTVYNELTKVKYVTEGMRKPAFLSGEQKKAIVDLLFKTNRKVTVKQLKEDYFKKIECFDSVEISGVEDRFNASLGTYHDLLKIIKDKDFLDNEENEDILEDIVLTLTLFEDREMIEERLKTYAHLFDDKVMKQLKRRRYTGWGRLSRKLINGIRDKQSGKTILDFLKSDGFANRNFMQLIHDDSLTFKEDIQKAQVSGQGDSLHEHIANLAGSPAIKKGILQTVKVVDELVKVMGRHKPENIVIEMARENQTTQKGQKNSRERMKRIEEGIKELGSQILKEHPVENTQLQNEKLYLYYLQNGRDMYVDQELDINRLSDYDVDHIVPQSFLKDDSIDNKVLTRSDKARGKSDNVPSEEVVKKMKNYWRQLLNAKLITQRKFDNLTKAERGGLSELDKAGFIKRQLVETRQITKHVAQILDSRMNTKYDENDKLIREVKVITLKSKLVSDFRKDFQFYKVREINNYHHAHDAYLNAVVGTALIKKYPKLESEFVYGDYKVYDVRKMIAKSEQEIGKATAKYFFYSNIMNFFKTEITLANGEIRKRPLIETNGETGEIVWDKGRDFATVRKVLSMPQVNIVKKTEVQTGGFSKESILPKRNSDKLIARKKDWDPKKYGGFDSPTVAYSVLVVAKVEKGKSKKLKSVKELLGITIMERSSFEKNPIDFLEAKGYKEVKKDLIIKLPKYSLFELENGRKRMLASAGELQKGNELALPSKYVNFLYLASHYEKLKGSPEDNEQKQLFVEQHKHYLDEIIEQISEFSKRVILADANLDKVLSAYNKHRDKPIREQAENIIHLFTLTNLGAPAAFKYFDTTIDRKRYTSTKEVLDATLIHQSITGLYETRIDLSQLGGDGGGGSGGSGGSGGSGGLGIEDEYRLHETSTEPDVSLGSTWLSDFPQAWAETGGMGLAVRQAPLIIPLKATSTPVSIQQYPMSHEARLGIKPHIQRLLDQGILVPCQSPWNTPLLPVKKPGTNDYRPVQDLREVNKRVEDIHPTVPNPYNLLSGLPPSHQWYTVLDLKDAFFCLRLHPTSQPLFAFEWRDPGMGISGQLTWTRLPQGFKNSPTLFNEALHRDLADFRIQHPDLILLQYVDDILLAATSELDCQQGTRALLQTLGDLGYRASAKKAQICQKQVKYLGYLLREGQRWLTEARKETVMGQPVPKTPRQLREFLGKAGFCRLFIPGFAEMAAPLYPLTKPGTLFSWGPDQQKAYQEIKQALLTAPALGLPDLTKPFELFVDEKQGYAKGVLTQKLGPWRRPVAYLSKKLDPVAAGWPPCLRMVAAIAVLTKDAGKLTMGQPLVILAPHAVEALVKQPPDRWLSNARMTHYQAMLLDTDRVQFGPVVALNPATLLPLPEEGAPHDCLEILAETHGTRPDLTDQPIPDADHTWYTDGSSFLQEGQRKAGAAVTTETEVIWAGALPAGTSAQRAELIALTQALKMAEGKRLNVYTDSRYAFATAHIHGEIYRRRGWLTSEGREIKNKSEILALLKALFLPKRLSIIHCLGHQKGDSAEARGNRLADQAAREAAIKTPPDTSTLLIAGKRTADGSEFEKRTADGSEFESPKKKAKVE

SEQ ID NO: 2138 - protein, 2094 aa, synthetic construct; identical to SEQ ID NO: 2061

SEQ ID NO: 2139 - protein, 2096 aa, synthetic construct
MPAAKRVKLDGGDKKYSIGLDIGTNSVGWAVITDEYKVPSKKFKVLGNTDRHSIKKNLIGALLFDSGETAEATRLKRTARRRYTRRKNRICYLQEIFSNEMAKVDDSFFHRLEESFLVEEDKKHERHPIFGNIVDEVAYHEKYPTIYHLRKKLVDSTDKADLRLIYLALAHMIKFRGHFLIEGDLNPDNSDVDKLFIQLVQTYNQLFEENPINASGVDAKAILSARLSKSRRLENLIAQLPGEKKNGLFGNLIALSLGLTPNFKSNFDLAEDAKLQLSKDTYDDDLDNLLAQIGDQYADLFLAAKNLSDAILLSDILRVNTEITKAPLSASMIKRYDEHHQDLTLLKALVRQQLPEKYKEIFFDQSKNGYAGYIDGGASQEEFYKFIKPILEKMDGTEELLVKLNREDLLRKQRTFDNGSIPHQIHLGELHAILRRQEDFYPFLKDNREKIEKILTFRIPYYVGPLARGNSRFAWMTRKSEETITPWNFEEVVDKGASAQSFIERMTNFDKNLPNEKVLPKHSLLYEYFTVYNELTKVKYVTEGMRKPAFLSGEQKKAIVDLLFKTNRKVTVKQLKEDYFKKIECFDSVEISGVEDRFNASLGTYHDLLKIIKDKDFLDNEENEDILEDIVLTLTLFEDREMIEERLKTYAHLFDDKVMKQLKRRRYTGWGRLSRKLINGIRDKQSGKTILDFLKSDGFANRNFMQLIHDDSLTFKEDIQKAQVSGQGDSLHEHIANLAGSPAIKKGILQTVKVVDELVKVMGRHKPENIVIEMARENQTTQKGQKNSRERMKRIEEGIKELGSQILKEHPVENTQLQNEKLYLYYLQNGRDMYVDQELDINRLSDYDVDHIVPQSFLKDDSIDNKVLTRSDKARGKSDNVPSEEVVKKMKNYWRQLLNAKLITQRKFDNLTKAERGGLSELDKAGFIKRQLVETRQITKHVAQILDSRMNTKYDENDKLIREVKVITLKSKLVSDFRKDFQFYKVREINNYHHAHDAYLNAVVGTALIKKYPKLESEFVYGDYKVYDVRKMIAKSEQEIGKATAKYFFYSNIMNFFKTEITLANGEIRKRPLIETNGETGEIVWDKGRDFATVRKVLSMPQVNIVKKTEVQTGGFSKESILPKRNSDKLIARKKDWDPKKYGGFDSPTVAYSVLVVAKVEKGKSKKLKSVKELLGITIMERSSFEKNPIDFLEAKGYKEVKKDLIIKLPKYSLFELENGRKRMLASAGELQKGNELALPSKYVNFLYLASHYEKLKGSPEDNEQKQLFVEQHKHYLDEIIEQISEFSKRVILADANLDKVLSAYNKHRDKPIREQAENIIHLFTLTNLGAPAAFKYFDTTIDRKRYTSTKEVLDATLIHQSITGLYETRIDLSQLGGDGGGGSPAPEAAAKGGLGIEDEYRLHETSTEPDVSLGSTWLSDFPQAWAETGGMGLAVRQAPLIIPLKATSTPVSIQQYPMSHEARLGIKPHIQRLLDQGILVPCQSPWNTPLLPVKKPGTNDYRPVQDLREVNKRVEDIHPTVPNPYNLLSGLPPSHQWYTVLDLKDAFFCLRLHPTSQPLFAFEWRDPGMGISGQLTWTRLPQGFKNSPTLFNEALHRDLADFRIQHPDLILLQYVDDILLAATSELDCQQGTRALLQTLGDLGYRASAKKAQICQKQVKYLGYLLREGQRWLTEARKETVMGQPVPKTPRQLREFLGKAGFCRLFIPGFAEMAAPLYPLTKPGTLFSWGPDQQKAYQEIKQALLTAPALGLPDLTKPFELFVDEKQGYAKGVLTQKLGPWRRPVAYLSKKLDPVAAGWPPCLRMVAAIAVLTKDAGKLTMGQPLVILAPHAVEALVKQPPDRWLSNARMTHYQAMLLDTDRVQFGPVVALNPATLLPLPEEGAPHDCLEILAETHGTRPDLTDQPIPDADHTWYTDGSSFLQEGQRKAGAAVTTETEVIWAGALPAGTSAQRAELIALTQALKMAEGKRLNVYTDSRYAFATAHIHGEIYRRRGWLTSEGREIKNKSEILALLKALFLPKRLSIIHCLGHQKGDSAEARGNRLADQAAREAAIKTPPDTSTLLIAGKRTADGSEFEKRTADGSEFESPKKKAKVE

SEQ ID NO: 2140 - protein, 2103 aa, synthetic construct
MPAAKRVKLDGGDKKYSIGLDIGTNSVGWAVITDEYKVPSKKFKVLGNTDRHSIKKNLIGALLFDSGETAEATRLKRTARRRYTRRKNRICYLQEIFSNEMAKVDDSFFHRLEESFLVEEDKKHERHPIFGNIVDEVAYHEKYPTIYHLRKKLVDSTDKADLRLIYLALAHMIKFRGHFLIEGDLNPDNSDVDKLFIQLVQTYNQLFEENPINASGVDAKAILSARLSKSRRLENLIAQLPGEKKNGLFGNLIALSLGLTPNFKSNFDLAEDAKLQLSKDTYDDDLDNLLAQIGDQYADLFLAAKNLSDAILLSDILRVNTEITKAPLSASMIKRYDEHHQDLTLLKALVRQQLPEKYKEIFFDQSKNGYAGYIDGGASQEEFYKFIKPILEKMDGTEELLVKLNREDLLRKQRTFDNGSIPHQIHLGELHAILRRQEDFYPFLKDNREKIEKILTFRIPYYVGPLARGNSRFAWMTRKSEETITPWNFEEVVDKGASAQSFIERMTNFDKNLPNEKVLPKHSLLYEYFTVYNELTKVKYVTEGMRKPAFLSGEQKKAIVDLLFKTNRKVTVKQLKEDYFKKIECFDSVEISGVEDRFNASLGTYHDLLKIIKDKDFLDNEENEDILEDIVLTLTLFEDREMIEERLKTYAHLFDDKVMKQLKRRRYTGWGRLSRKLINGIRDKQSGKTILDFLKSDGFANRNFMQLIHDDSLTFKEDIQKAQVSGQGDSLHEHIANLAGSPAIKKGILQTVKVVDELVKVMGRHKPENIVIEMARENQTTQKGQKNSRERMKRIEEGIKELGSQILKEHPVENTQLQNEKLYLYYLQNGRDMYVDQELDINRLSDYDVDHIVPQSFLKDDSIDNKVLTRSDKARGKSDNVPSEEVVKKMKNYWRQLLNAKLITQRKFDNLTKAERGGLSELDKAGFIKRQLVETRQITKHVAQILDSRMNTKYDENDKLIREVKVITLKSKLVSDFRKDFQFYKVREINNYHHAHDAYLNAVVGTALIKKYPKLESEFVYGDYKVYDVRKMIAKSEQEIGKATAKYFFYSNIMNFFKTEITLANGEIRKRPLIETNGETGEIVWDKGRDFATVRKVLSMPQVNIVKKTEVQTGGFSKESILPKRNSDKLIARKKDWDPKKYGGFDSPTVAYSVLVVAKVEKGKSKKLKSVKELLGITIMERSSFEKNPIDFLEAKGYKEVKKDLIIKLPKYSLFELENGRKRMLASAGELQKGNELALPSKYVNFLYLASHYEKLKGSPEDNEQKQLFVEQHKHYLDEIIEQISEFSKRVILADANLDKVLSAYNKHRDKPIREQAENIIHLFTLTNLGAPAAFKYFDTTIDRKRYTSTKEVLDATLIHQSITGLYETRIDLSQLGGDGGGSSGSSGSSGSSGSSGSSGGLGIEDEYRLHETSTEPDVSLGSTWLSDFPQAWAETGGMGLAVRQAPLIIPLKATSTPVSIQQYPMSHEARLGIKPHIQRLLDQGILVPCQSPWNTPLLPVKKPGTNDYRPVQDLREVNKRVEDIHPTVPNPYNLLSGLPPSHQWYTVLDLKDAFFCLRLHPTSQPLFAFEWRDPGMGISGQLTWTRLPQGFKNSPTLFNEALHRDLADFRIQHPDLILLQYVDDILLAATSELDCQQGTRALLQTLGDLGYRASAKKAQICQKQVKYLGYLLREGQRWLTEARKETVMGQPVPKTPRQLREFLGKAGFCRLFIPGFAEMAAPLYPLTKPGTLFSWGPDQQKAYQEIKQALLTAPALGLPDLTKPFELFVDEKQGYAKGVLTQKLGPWRRPVAYLSKKLDPVAAGWPPCLRMVAAIAVLTKDAGKLTMGQPLVILAPHAVEALVKQPPDRWLSNARMTHYQAMLLDTDRVQFGPVVALNPATLLPLPEEGAPHDCLEILAETHGTRPDLTDQPIPDADHTWYTDGSSFLQEGQRKAGAAVTTETEVIWAGALPAGTSAQRAELIALTQALKMAEGKRLNVYTDSRYAFATAHIHGEIYRRRGWLTSEGREIKNKSEILALLKALFLPKRLSIIHCLGHQKGDSAEARGNRLADQAAREAAIKTPPDTSTLLIAGKRTADGSEFEKRTADGSEFESPKKKAKVE

SEQ ID NO: 2141 - protein, 2096 aa, synthetic construct
MPAAKRVKLDGGDKKYSIGLDIGTNSVGWAVITDEYKVPSKKFKVLGNTDRHSIKKNLIGALLFDSGETAEATRLKRTARRRYTRRKNRICYLQEIFSNEMAKVDDSFFHRLEESFLVEEDKKHERHPIFGNIVDEVAYHEKYPTIYHLRKKLVDSTDKADLRLIYLALAHMIKFRGHFLIEGDLNPDNSDVDKLFIQLVQTYNQLFEENPINASGVDAKAILSARLSKSRRLENLIAQLPGEKKNGLFGNLIALSLGLTPNFKSNFDLAEDAKLQLSKDTYDDDLDNLLAQIGDQYADLFLAAKNLSDAILLSDILRVNTEITKAPLSASMIKRYDEHHQDLTLLKALVRQQLPEKYKEIFFDQSKNGYAGYIDGGASQEEFYKFIKPILEKMDGTEELLVKLNREDLLRKQRTFDNGSIPHQIHLGELHAILRRQEDFYPFLKDNREKIEKILTFRIPYYVGPLARGNSRFAWMTRKSEETITPWNFEEVVDKGASAQSFIERMTNFDKNLPNEKVLPKHSLLYEYFTVYNELTKVKYVTEGMRKPAFLSGEQKKAIVDLLFKTNRKVTVKQLKEDYFKKIECFDSVEISGVEDRFNASLGTYHDLLKIIKDKDFLDNEENEDILEDIVLTLTLFEDREMIEERLKTYAHLFDDKVMKQLKRRRYTGWGRLSRKLINGIRDKQSGKTILDFLKSDGFANRNFMQLIHDDSLTFKEDIQKAQVSGQGDSLHEHIANLAGSPAIKKGILQTVKVVDELVKVMGRHKPENIVIEMARENQTTQKGQKNSRERMKRIEEGIKELGSQILKEHPVENTQLQNEKLYLYYLQNGRDMYVDQELDINRLSDYDVDHIVPQSFLKDDSIDNKVLTRSDKARGKSDNVPSEEVVKKMKNYWRQLLNAKLITQRKFDNLTKAERGGLSELDKAGFIKRQLVETRQITKHVAQILDSRMNTKYDENDKLIREVKVITLKSKLVSDFRKDFQFYKVREINNYHHAHDAYLNAVVGTALIKKYPKLESEFVYGDYKVYDVRKMIAKSEQEIGKATAKYFFYSNIMNFFKTEITLANGEIRKRPLIETNGETGEIVWDKGRDFATVRKVLSMPQVNIVKKTEVQTGGFSKESILPKRNSDKLIARKKDWDPKKYGGFDSPTVAYSVLVVAKVEKGKSKKLKSVKELLGITIMERSSFEKNPIDFLEAKGYKEVKKDLIIKLPKYSLFELENGRKRMLASAGELQKGNELALPSKYVNFLYLASHYEKLKGSPEDNEQKQLFVEQHKHYLDEIIEQISEFSKRVILADANLDKVLSAYNKHRDKPIREQAENIIHLFTLTNLGAPAAFKYFDTTIDRKRYTSTKEVLDATLIHQSITGLYETRIDLSQLGGDGGEAAAKGSSGGGGGLGIEDEYRLHETSTEPDVSLGSTWLSDFPQAWAETGGMGLAVRQAPLIIPLKATSTPVSIQQYPMSHEARLGIKPHIQRLLDQGILVPCQSPWNTPLLPVKKPGTNDYRPVQDLREVNKRVEDIHPTVPNPYNLLSGLPPSHQWYTVLDLKDAFFCLRLHPTSQPLFAFEWRDPGMGISGQLTWTRLPQGFKNSPTLFNEALHRDLADFRIQHPDLILLQYVDDILLAATSELDCQQGTRALLQTLGDLGYRASAKKAQICQKQVKYLGYLLREGQRWLTEARKETVMGQPVPKTPRQLREFLGKAGFCRLFIPGFAEMAAPLYPLTKPGTLFSWGPDQQKAYQEIKQALLTAPALGLPDLTKPFELFVDEKQGYAKGVLTQKLGPWRRPVAYLSKKLDPVAAGWPPCLRMVAAIAVLTKDAGKLTMGQPLVILAPHAVEALVKQPPDRWLSNARMTHYQAMLLDTDRVQFGPVVALNPATLLPLPEEGAPHDCLEILAETHGTRPDLTDQPIPDADHTWYTDGSSFLQEGQRKAGAAVTTETEVIWAGALPAGTSAQRAELIALTQALKMAEGKRLNVYTDSRYAFATAHIHGEIYRRRGWLTSEGREIKNKSEILALLKALFLPKRLSIIHCLGHQKGDSAEARGNRLADQAAREAAIKTPPDTSTLLIAGKRTADGSEFEKRTADGSEFESPKKKAKVE

SEQ ID NO: 2142 - protein, 2094 aa, synthetic construct
MPAAKRVKLDGGDKKYSIGLDIGTNSVGWAVITDEYKVPSKKFKVLGNTDRHSIKKNLIGALLFDSGETAEATRLKRTARRRYTRRKNRICYLQEIFSNEMAKVDDSFFHRLEESFLVEEDKKHERHPIFGNIVDEVAYHEKYPTIYHLRKKLVDSTDKADLRLIYLALAHMIKFRGHFLIEGDLNPDNSDVDKLFIQLVQTYNQLFEENPINASGVDAKAILSARLSKSRRLENLIAQLPGEKKNGLFGNLIALSLGLTPNFKSNFDLAEDAKLQLSKDTYDDDLDNLLAQIGDQYADLFLAAKNLSDAILLSDILRVNTEITKAPLSASMIKRYDEHHQDLTLLKALVRQQLPEKYKEIFFDQSKNGYAGYIDGGASQEEFYKFIKPILEKMDGTEELLVKLNREDLLRKQRTFDNGSIPHQIHLGELHAILRRQEDFYPFLKDNREKIEKILTFRIPYYVGPLARGNSRFAWMTRKSEETITPWNFEEVVDKGASAQSFIERMTNFDKNLPNEKVLPKHSLLYEYFTVYNELTKVKYVTEGMRKPAFLSGEQKKAIVDLLFKTNRKVTVKQLKEDYFKKIECFDSVEISGVEDRFNASLGTYHDLLKIIKDKDFLDNEENEDILEDIVLTLTLFEDREMIEERLKTYAHLFDDKVMKQLKRRRYTGWGRLSRKLINGIRDKQSGKTILDFLKSDGFANRNFMQLIHDDSLTFKEDIQKAQVSGQGDSLHEHIANLAGSPAIKKGILQTVKVVDELVKVMGRHKPENIVIEMARENQTTQKGQKNSRERMKRIEEGIKELGSQILKEHPVENTQLQNEKLYLYYLQNGRDMYVDQELDINRLSDYDVDHIVPQSFLKDDSIDNKVLTRSDKARGKSDNVPSEEVVKKMKNYWRQLLNAKLITQRKFDNLTKAERGGLSELDKAGFIKRQLVETRQITKHVAQILDSRMNTKYDENDKLIREVKVITLKSKLVSDFRKDFQFYKVREINNYHHAHDAYLNAVVGTALIKKYPKLESEFVYGDYKVYDVRKMIAKSEQEIGKATAKYFFYSNIMNFFKTEITLANGEIRKRPLIETNGETGEIVWDKGRDFATVRKVLSMPQVNIVKKTEVQTGGFSKESILPKRNSDKLIARKKDWDPKKYGGFDSPTVAYSVLVVAKVEKGKSKKLKSVKELLGITIMERSSFEKNPIDFLEAKGYKEVKKDLIIKLPKYSLFELENGRKRMLASAGELQKGNELALPSKYVNFLYLASHYEKLKGSPEDNEQKQLFVEQHKHYLDEIIEQISEFSKRVILADANLDKVLSAYNKHRDKPIREQAENIIHLFTLTNLGAPAAFKYFDTTIDRKRYTSTKEVLDATLIHQSITGLYETRIDLSQLGGDGGGSSGSSGSSGGLGIEDEYRLHETSTEPDVSLGSTWLSDFPQAWAETGGMGLAVRQAPLIIPLKATSTPVSIQQYPMSHEARLGIKPHIQRLLDQGILVPCQSPWNTPLLPVKKPGTNDYRPVQDLREVNKRVEDIHPTVPNPYNLLSGLPPSHQWYTVLDLKDAFFCLRLHPTSQPLFAFEWRDPGMGISGQLTWTRLPQGFKNSPTLFNEALHRDLADFRIQHPDLILLQYVDDILLAATSELDCQQGTRALLQTLGDLGYRASAKKAQICQKQVKYLGYLLREGQRWLTEARKETVMGQPVPKTPRQLREFLGKAGFCRLFIPGFAEMAAPLYPLTKPGTLFSWGPDQQKAYQEIKQALLTAPALGLPDLTKPFELFVDEKQGYAKGVLTQKLGPWRRPVAYLSKKLDPVAAGWPPCLRMVAAIAVLTKDAGKLTMGQPLVILAPHAVEALVKQPPDRWLSNARMTHYQAMLLDTDRVQFGPVVALNPATLLPLPEEGAPHDCLEILAETHGTRPDLTDQPIPDADHTWYTDGSSFLQEGQRKAGAAVTTETEVIWAGALPAGTSAQRAELIALTQALKMAEGKRLNVYTDSRYAFATAHIHGEIYRRRGWLTSEGREIKNKSEILALLKALFLPKRLSIIHCLGHQKGDSAEARGNRLADQAAREAAIKTPPDTSTLLIAGKRTADGSEFEKRTADGSEFESPKKKAKVE

SEQ ID NO: 2143 - protein, 2094 aa, synthetic construct
MPAAKRVKLDGGDKKYSIGLDIGTNSVGWAVITDEYKVPSKKFKVLGNTDRHSIKKNLIGALLFDSGETAEATRLKRTARRRYTRRKNRICYLQEIFSNEMAKVDDSFFHRLEESFLVEEDKKHERHPIFGNIVDEVAYHEKYPTIYHLRKKLVDSTDKADLRLIYLALAHMIKFRGHFLIEGDLNPDNSDVDKLFIQLVQTYNQLFEENPINASGVDAKAILSARLSKSRRLENLIAQLPGEKKNGLFGNLIALSLGLTPNFKSNFDLAEDAKLQLSKDTYDDDLDNLLAQIGDQYADLFLAAKNLSDAILLSDILRVNTEITKAPLSASMIKRYDEHHQDLTLLKALVRQQLPEKYKEIFFDQSKNGYAGYIDGGASQEEFYKFIKPILEKMDGTEELLVKLNREDLLRKQRTFDNGSIPHQIHLGELHAILRRQEDFYPFLKDNREKIEKILTFRIPYYVGPLARGNSRFAWMTRKSEETITPWNFEEVVDKGASAQSFIERMTNFDKNLPNEKVLPKHSLLYEYFTVYNELTKVKYVTEGMRKPAFLSGEQKKAIVDLLFKTNRKVTVKQLKEDYFKKIECFDSVEISGVEDRFNASLGTYHDLLKIIKDKDFLDNEENEDILEDIVLTLTLFEDREMIEERLKTYAHLFDDKVMKQLKRRRYTGWGRLSRKLINGIRDKQSGKTILDFLKSDGFANRNFMQLIHDDSLTFKEDIQKAQVSGQGDSLHEHIANLAGSPAIKKGILQTVKVVDELVKVMGRHKPENIVIEMARENQTTQKGQKNSRERMKRIEEGIKELGSQILKEHPVENTQLQNEKLYLYYLQNGRDMYVDQELDINRLSDYDVDHIVPQSFLKDDSIDNKVLTRSDKARGKSDNVPSEEVVKKMKNYWRQLLNAKLITQRKFDNLTKAERGGLSELDKAGFIKRQLVETRQITKHVAQILDSRMNTKYDENDKLIREVKVITLKSKLVSDFRKDFQFYKVREINNYHHAHDAYLNAVVGTALIKKYPKLESEFVYGDYKVYDVRKMIAKSEQEIGKATAKYFFYSNIMNFFKTEITLANGEIRKRPLIETNGETGEIVWDKGRDFATVRKVLSMPQVNIVKKTEVQTGGFSKESILPKRNSDKLIARKKDWDPKKYGGFDSPTVAYSVLVVAKVEKGKSKKLKSVKELLGITIMERSSFEKNPIDFLEAKGYKEVKKDLIIKLPKYSLFELENGRKRMLASAGELQKGNELALPSKYVNFLYLASHYEKLKGSPEDNEQKQLFVEQHKHYLDEIIEQISEFSKRVILADANLDKVLSAYNKHRDKPIREQAENIIHLFTLTNLGAPAAFKYFDTTIDRKRYTSTKEVLDATLIHQSITGLYETRIDLSQLGGDGGGSSGGSPAPGGLGIEDEYRLHETSTEPDVSLGSTWLSDFPQAWAETGGMGLAVRQAPLIIPLKATSTPVSIQQYPMSHEARLGIKPHIQRLLDQGILVPCQSPWNTPLLPVKKPGTNDYRPVQDLREVNKRVEDIHPTVPNPYNLLSGLPPSHQWYTVLDLKDAFFCLRLHPTSQPLFAFEWRDPGMGISGQLTWTRLPQGFKNSPTLFNEALHRDLADFRIQHPDLILLQYVDDILLAATSELDCQQGTRALLQTLGDLGYRASAKKAQICQKQVKYLGYLLREGQRWLTEARKETVMGQPVPKTPRQLREFLGKAGFCRLFIPGFAEMAAPLYPLTKPGTLFSWGPDQQKAYQEIKQALLTAPALGLPDLTKPFELFVDEKQGYAKGVLTQKLGPWRRPVAYLSKKLDPVAAGWPPCLRMVAAIAVLTKDAGKLTMGQPLVILAPHAVEALVKQPPDRWLSNARMTHYQAMLLDTDRVQFGPVVALNPATLLPLPEEGAPHDCLEILAETHGTRPDLTDQPIPDADHTWYTDGSSFLQEGQRKAGAAVTTETEVIWAGALPAGTSAQRAELIALTQALKMAEGKRLNVYTDSRYAFATAHIHGEIYRRRGWLTSEGREIKNKSEILALLKALFLPKRLSIIHCLGHQKGDSAEARGNRLADQAAREAAIKTPPDTSTLLIAGKRTADGSEFEKRTADGSEFESPKKKAKVE

SEQ ID NO: 2144 - protein, 2090 aa, synthetic construct
MPAAKRVKLDGGDKKYSIGLDIGTNSVGWAVITDEYKVPSKKFKVLGNTDRHSIKKNLIGALLFDSGETAEATRLKRTARRRYTRRKNRICYLQEIFSNEMAKVDDSFFHRLEESFLVEEDKKHERHPIFGNIVDEVAYHEKYPTIYHLRKKLVDSTDKADLRLIYLALAHMIKFRGHFLIEGDLNPDNSDVDKLFIQLVQTYNQLFEENPINASGVDAKAILSARLSKSRRLENLIAQLPGEKKNGLFGNLIALSLGLTPNFKSNFDLAEDAKLQLSKDTYDDDLDNLLAQIGDQYADLFLAAKNLSDAILLSDILRVNTEITKAPLSASMIKRYDEHHQDLTLLKALVRQQLPEKYKEIFFDQSKNGYAGYIDGGASQEEFYKFIKPILEKMDGTEELLVKLNREDLLRKQRTFDNGSIPHQIHLGELHAILRRQEDFYPFLKDNREKIEKILTFRIPYYVGPLARGNSRFAWMTRKSEETITPWNFEEVVDKGASAQSFIERMTNFDKNLPNEKVLPKHSLLYEYFTVYNELTKVKYVTEGMRKPAFLSGEQKKAIVDLLFKTNRKVTVKQLKEDYFKKIECFDSVEISGVEDRFNASLGTYHDLLKIIKDKDFLDNEENEDILEDIVLTLTLFEDREMIEERLKTYAHLFDDKVMKQLKRRRYTGWGRLSRKLINGIRDKQSGKTILDFLKSDGFANRNFMQLIHDDSLTFKEDIQKAQVSGQGDSLHEHIANLAGSPAIKKGILQTVKVVDELVKVMGRHKPENIVIEMARENQTTQKGQKNSRERMKRIEEGIKELGSQILKEHPVENTQLQNEKLYLYYLQNGRDMYVDQELDINRLSDYDVDHIVPQSFLKDDSIDNKVLTRSDKARGKSDNVPSEEVVKKMKNYWRQLLNAKLITQRKFDNLTKAERGGLSELDKAGFIKRQLVETRQITKHVAQILDSRMNTKYDENDKLIREVKVITLKSKLVSDFRKDFQFYKVREINNYHHAHDAYLNAVVGTALIKKYPKLESEFVYGDYKVYDVRKMIAKSEQEIGKATAKYFFYSNIMNFFKTEITLANGEIRKRPLIETNGETGEIVWDKGRDFATVRKVLSMPQVNIVKKTEVQTGGFSKESILPKRNSDKLIARKKDWDPKKYGGFDSPTVAYSVLVVAKVEKGKSKKLKSVKELLGITIMERSSFEKNPIDFLEAKGYKEVKKDLIIKLPKYSLFELENGRKRMLASAGELQKGNELALPSKYVNFLYLASHYEKLKGSPEDNEQKQLFVEQHKHYLDEIIEQISEFSKRVILADANLDKVLSAYNKHRDKPIREQAENIIHLFTLTNLGAPAAFKYFDTTIDRKRYTSTKEVLDATLIHQSITGLYETRIDLSQLGGDGGPAPAPGGLGIEDEYRLHETSTEPDVSLGSTWLSDFPQAWAETGGMGLAVRQAPLIIPLKATSTPVSIQQYPMSHEARLGIKPHIQRLLDQGILVPCQSPWNTPLLPVKKPGTNDYRPVQDLREVNKRVEDIHPTVPNPYNLLSGLPPSHQWYTVLDLKDAFFCLRLHPTSQPLFAFEWRDPGMGISGQLTWTRLPQGFKNSPTLFNEALHRDLADFRIQHPDLILLQYVDDILLAATSELDCQQGTRALLQTLGDLGYRASAKKAQICQKQVKYLGYLLREGQRWLTEARKETVMGQPVPKTPRQLREFLGKAGFCRLFIPGFAEMAAPLYPLTKPGTLFSWGPDQQKAYQEIKQALLTAPALGLPDLTKPFELFVDEKQGYAKGVLTQKLGPWRRPVAYLSKKLDPVAAGWPPCLRMVAAIAVLTKDAGKLTMGQPLVILAPHAVEALVKQPPDRWLSNARMTHYQAMLLDTDRVQFGPVVALNPATLLPLPEEGAPHDCLEILAETHGTRPDLTDQPIPDADHTWYTDGSSFLQEGQRKAGAAVTTETEVIWAGALPAGTSAQRAELIALTQALKMAEGKRLNVYTDSRYAFATAHIHGEIYRRRGWLTSEGREIKNKSEILALLKALFLPKRLSIIHCLGHQKGDSAEARGNRLADQAAREAAIKTPPDTSTLLIAGKRTADGSEFEKRTADGSEFESPKKKAKVE

SEQ ID NO: 2145 - protein, 2096 aa, synthetic construct
MPAAKRVKLDGGDKKYSIGLDIGTNSVGWAVITDEYKVPSKKFKVLGNTDRHSIKKNLIGALLFDSGETAEATRLKRTARRRYTRRKNRICYLQEIFSNEMAKVDDSFFHRLEESFLVEEDKKHERHPIFGNIVDEVAYHEKYPTIYHLRKKLVDSTDKADLRLIYLALAHMIKFRGHFLIEGDLNPDNSDVDKLFIQLVQTYNQLFEENPINASGVDAKAILSARLSKSRRLENLIAQLPGEKKNGLFGNLIALSLGLTPNFKSNFDLAEDAKLQLSKDTYDDDLDNLLAQIGDQYADLFLAAKNLSDAILLSDILRVNTEITKAPLSASMIKRYDEHHQDLTLLKALVRQQLPEKYKEIFFDQSKNGYAGYIDGGASQEEFYKFIKPILEKMDGTEELLVKLNREDLLRKQRTFDNGSIPHQIHLGELHAILRRQEDFYPFLKDNREKIEKILTFRIPYYVGPLARGNSRFAWMTRKSEETITPWNFEEVVDKGASAQSFIERMTNFDKNLPNEKVLPKHSLLYEYFTVYNELTKVKYVTEGMRKPAFLSGEQKKAIVDLLFKTNRKVTVKQLKEDYFKKIECFDSVEISGVEDRFNASLGTYHDLLKIIKDKDFLDNEENEDILEDIVLTLTLFEDREMIEERLKTYAHLFDDKVMKQLKRRRYTGWGRLSRKLINGIRDKQSGKTILDFLKSDGFANRNFMQLIHDDSLTFKEDIQKAQVSGQGDSLHEHIANLAGSPAIKKGILQTVKVVDELVKVMGRHKPENIVIEMARENQTTQKGQKNSRERMKRIEEGIKELGSQILKEHPVENTQLQNEKLYLYYLQNGRDMYVDQELDINRLSDYDVDHIVPQSFLKDDSIDNKVLTRSDKARGKSDNVPSEEVVKKMKNYWRQLLNAKLITQRKFDNLTKAERGGLSELDKAGFIKRQLVETRQITKHVAQILDSRMNTKYDENDKLIREVKVITLKSKLVSDFRKDFQFYKVREINNYHHAHDAYLNAVVGTALIKKYPKLESEFVYGDYKVYDVRKMIAKSEQEIGKATAKYFFYSNIMNFFKTEITLANGEIRKRPLIETNGETGEIVWDKGRDFATVRKVLSMPQVNIVKKTEVQTGGFSKESILPKRNSDKLIARKKDWDPKKYGGFDSPTVAYSVLVVAKVEKGKSKKLKSVKELLGITIMERSSFEKNPIDFLEAKGYKEVKKDLIIKLPKYSLFELENGRKRMLASAGELQKGNELALPSKYVNFLYLASHYEKLKGSPEDNEQKQLFVEQHKHYLDEIIEQISEFSKRVILADANLDKVLSAYNKHRDKPIREQAENIIHLFTLTNLGAPAAFKYFDTTIDRKRYTSTKEVLDATLIHQSITGLYETRIDLSQLGGDGGGGGGSSEAAAKGGLGIEDEYRLHETSTEPDVSLGSTWLSDFPQAWAETGGMGLAVRQAPLIIPLKATSTPVSIQQYPMSHEARLGIKPHIQRLLDQGILVPCQSPWNTPLLPVKKPGTNDYRPVQDLREVNKRVEDIHPTVPNPYNLLSGLPPSHQWYTVLDLKDAFFCLRLHPTSQPLFAFEWRDPGMGISGQLTWTRLPQGFKNSPTLFNEALHRDLADFRIQHPDLILLQYVDDILLAATSELDCQQGTRALLQTLGDLGYRASAKKAQICQKQVKYLGYLLREGQRWLTEARKETVMGQPVPKTPRQLREFLGKAGFCRLFIPGFAEMAAPLYPLTKPGTLFSWGPDQQKAYQEIKQALLTAPALGLPDLTKPFELFVDEKQGYAKGVLTQKLGPWRRPVAYLSKKLDPVAAGWPPCLRMVAAIAVLTKDAGKLTMGQPLVILAPHAVEALVKQPPDRWLSNARMTHYQAMLLDTDRVQFGPVVALNPATLLPLPEEGAPHDCLEILAETHGTRPDLTDQPIPDADHTWYTDGSSFLQEGQRKAGAAVTTETEVIWAGALPAGTSAQRAELIALTQALKMAEGKRLNVYTDSRYAFATAHIHGEIYRRRGWLTSEGREIKNKSEILALLKALFLPKRLSIIHCLGHQKGDSAEARGNRLADQAAREAAIKTPPDTSTLLIAGKRTADGSEFEKRTADGSEFESPKKKAKVE

SEQ ID NO: 2146 - protein, 2096 aa, synthetic construct
MPAAKRVKLDGGDKKYSIGLDIGTNSVGWAVITDEYKVPSKKFKVLGNTDRHSIKKNLIGALLFDSGETAEATRLKRTARRRYTRRKNRICYLQEIFSNEMAKVDDSFFHRLEESFLVEEDKKHERHPIFGNIVDEVAYHEKYPTIYHLRKKLVDSTDKADLRLIYLALAHMIKFRGHFLIEGDLNPDNSDVDKLFIQLVQTYNQLFEENPINASGVDAKAILSARLSKSRRLENLIAQLPGEKKNGLFGNLIALSLGLTPNFKSNFDLAEDAKLQLSKDTYDDDLDNLLAQIGDQYADLFLAAKNLSDAILLSDILRVNTEITKAPLSASMIKRYDEHHQDLTLLKALVRQQLPEKYKEIFFDQSKNGYAGYIDGGASQEEFYKFIKPILEKMDGTEELLVKLNREDLLRKQRTFDNGSIPHQIHLGELHAILRRQEDFYPFLKDNREKIEKILTFRIPYYVGPLARGNSRFAWMTRKSEETITPWNFEEVVDKGASAQSFIERMTNFDKNLPNEKVLPKHSLLYEYFTVYNELTKVKYVTEGMRKPAFLSGEQKKAIVDLLFKTNRKVTVKQLKEDYFKKIECFDSVEISGVEDRFNASLGTYHDLLKIIKDKDFLDNEENEDILEDIVLTLTLFEDREMIEERLKTYAHLFDDKVMKQLKRRRYTGWGRLSRKLINGIRDKQSGKTILDFLKSDGFANRNFMQLIHDDSLTFKEDIQKAQVSGQGDSLHEHIANLAGSPAIKKGILQTVKVVDELVKVMGRHKPENIVIEMARENQTTQKGQKNSRERMKRIEEGIKELGSQILKEHPVENTQLQNEKLYLYYLQNGRDMYVDQELDINRLSDYDVDHIVPQSFLKDDSIDNKVLTRSDKARGKSDNVPSEEVVKKMKNYWRQLLNAKLITQRKFDNLTKAERGGLSELDKAGFIKRQLVETRQITKHVAQILDSRMNTKYDENDKLIREVKVITLKSKLVSDFRKDFQFYKVREINNYHHAHDAYLNAVVGTALIKKYPKLESEFVYGDYKVYDVRKMIAKSEQEIGKATAKYFFYSNIMNFFKTEITLANGEIRKRPLIETNGETGEIVWDKGRDFATVRKVLSMPQVNIVKKTEVQTGGFSKESILPKRNSDKLIARKKDWDPKKYGGFDSPTVAYSVLVVAKVEKGKSKKLKSVKELLGITIMERSSFEKNPIDFLEAKGYKEVKKDLIIKLPKYSLFELENGRKRMLASAGELQKGNELALPSKYVNFLYLASHYEKLKGSPEDNEQKQLFVEQHKHYLDEIIEQISEFSKRVILADANLDKVLSAYNKHRDKPIREQAENIIHLFTLTNLGAPAAFKYFDTTIDRKRYTSTKEVLDATLIHQSITGLYETRIDLSQLGGDGGGGSEAAAKPAPGGLGIEDEYRLHETSTEPDVSLGSTWLSDFPQAWAETGGMGLAVRQAPLIIPLKATSTPVSIQQYPMSHEARLGIKPHIQRLLDQGILVPCQSPWNTPLLPVKKPGTNDYRPVQDLREVNKRVEDIHPTVPNPYNLLSGLPPSHQWYTVLDLKDAFFCLRLHPTSQPLFAFEWRDPGMGISGQLTWTRLPQGFKNSPTLFNEALHRDLADFRIQHPDLILLQYVDDILLAATSELDCQQGTRALLQTLGDLGYRASAKKAQICQKQVKYLGYLLREGQRWLTEARKETVMGQPVPKTPRQLREFLGKAGFCRLFIPGFAEMAAPLYPLTKPGTLFSWGPDQQKAYQEIKQALLTAPALGLPDLTKPFELFVDEKQGYAKGVLTQKLGPWRRPVAYLSKKLDPVAAGWPPCLRMVAAIAVLTKDAGKLTMGQPLVILAPHAVEALVKQPPDRWLSNARMTHYQAMLLDTDRVQFGPVVALNPATLLPLPEEGAPHDCLEILAETHGTRPDLTDQPIPDADHTWYTDGSSFLQEGQRKAGAAVTTETEVIWAGALPAGTSAQRAELIALTQALKMAEGKRLNVYTDSRYAFATAHIHGEIYRRRGWLTSEGREIKNKSEILALLKALFLPKRLSIIHCLGHQKGDSAEARGNRLADQAAREAAIKTPPDTSTLLIAGKRTADGSEFEKRTADGSEFESPKKKAKVE

SEQ ID NO: 2147 - protein, 2093 aa, synthetic construct
MPAAKRVKLDGGDKKYSIGLDIGTNSVGWAVITDEYKVPSKKFKVLGNTDRHSIKKNLIGALLFDSGETAEATRLKRTARRRYTRRKNRICYLQEIFSNEMAKVDDSFFHRLEESFLVEEDKKHERHPIFGNIVDEVAYHEKYPTIYHLRKKLVDSTDKADLRLIYLALAHMIKFRGHFLIEGDLNPDNSDVDKLFIQLVQTYNQLFEENPINASGVDAKAILSARLSKSRRLENLIAQLPGEKKNGLFGNLIALSLGLTPNFKSNFDLAEDAKLQLSKDTYDDDLDNLLAQIGDQYADLFLAAKNLSDAILLSDILRVNTEITKAPLSASMIKRYDEHHQDLTLLKALVRQQLPEKYKEIFFDQSKNGYAGYIDGGASQEEFYKFIKPILEKMDGTEELLVKLNREDLLRKQRTFDNGSIPHQIHLGELHAILRRQEDFYPFLKDNREKIEKILTFRIPYYVGPLARGNSRFAWMTRKSEETITPWNFEEVVDKGASAQSFIERMTNFDKNLPNEKVLPKHSLLYEYFTVYNELTKVKYVTEGMRKPAFLSGEQKKAIVDLLFKTNRKVTVKQLKEDYFKKIECFDSVEISGVEDRFNASLGTYHDLLKIIKDKDFLDNEENEDILEDIVLTLTLFEDREMIEERLKTYAHLFDDKVMKQLKRRRYTGWGRLSRKLINGIRDKQSGKTILDFLKSDGFANRNFMQLIHDDSLTFKEDIQKAQVSGQGDSLHEHIANLAGSPAIKKGILQTVKVVDELVKVMGRHKPENIVIEMARENQTTQKGQKNSRERMKRIEEGIKELGSQILKEHPVENTQLQNEKLYLYYLQNGRDMYVDQELDINRLSDYDVDHIVPQSFLKDDSIDNKVLTRSDKARGKSDNVPSEEVVKKMKNYWRQLLNAKLITQRKFDNLTKAERGGLSELDKAGFIKRQLVETRQITKHVAQILDSRMNTKYDENDKLIREVKVITLKSKLVSDFRKDFQFYKVREINNYHHAHDAYLNAVVGTALIKKYPKLESEFVYGDYKVYDVRKMIAKSEQEIGKATAKYFFYSNIMNFFKTEITLANGEIRKRPLIETNGETGEIVWDKGRDFATVRKVLSMPQVNIVKKTEVQTGGFSKESILPKRNSDKLIARKKDWDPKKYGGFDSPTVAYSVLVVAKVEKGKSKKLKSVKELLGITIMERSSFEKNPIDFLEAKGYKEVKKDLIIKLPKYSLFELENGRKRMLASAGELQKGNELALPSKYVNFLYLASHYEKLKGSPEDNEQKQLFVEQHKHYLDEIIEQISEFSKRVILADANLDKVLSAYNKHRDKPIREQAENIIHLFTLTNLGAPAAFKYFDTTIDRKRYTSTKEVLDATLIHQSITGLYETRIDLSQLGGDGGEAAAKPAPGGLGIEDEYRLHETSTEPDVSLGSTWLSDFPQAWAETGGMGLAVRQAPLIIPLKATSTPVSIQQYPMSHEARLGIKPHIQRLLDQGILVPCQSPWNTPLLPVKKPGTNDYRPVQDLREVNKRVEDIHPTVPNPYNLLSGLPPSHQWYTVLDLKDAFFCLRLHPTSQPLFAFEWRDPGMGISGQLTWTRLPQGFKNSPTLFNEALHRDLADFRIQHPDLILLQYVDDILLAATSELDCQQGTRALLQTLGDLGYRASAKKAQICQKQVKYLGYLLREGQRWLTEARKETVMGQPVPKTPRQLREFLGKAGFCRLFIPGFAEMAAPLYPLTKPGTLFSWGPDQQKAYQEIKQALLTAPALGLPDLTKPFELFVDEKQGYAKGVLTQKLGPWRRPVAYLSKKLDPVAAGWPPCLRMVAAIAVLTKDAGKLTMGQPLVILAPHAVEALVKQPPDRWLSNARMTHYQAMLLDTDRVQFGPVVALNPATLLPLPEEGAPHDCLEILAETHGTRPDLTDQPIPDADHTWYTDGSSFLQEGQRKAGAAVTTETEVIWAGALPAGTSAQRAELIALTQALKMAEGKRLNVYTDSRYAFATAHIHGEIYRRRGWLTSEGREIKNKSEILALLKALFLPKRLSIIHCLGHQKGDSAEARGNRLADQAAREAAIKTPPDTSTLLIAGKRTADGSEFEKRTADGSEFESPKKKAKVE

SEQ ID NO: 2148 - protein, 2091 aa, synthetic construct
MPAAKRVKLDGGDKKYSIGLDIGTNSVGWAVITDEYKVPSKKFKVLGNTDRHSIKKNLIGALLFDSGETAEATRLKRTARRRYTRRKNRICYLQEIFSNEMAKVDDSFFHRLEESFLVEEDKKHERHPIFGNIVDEVAYHEKYPTIYHLRKKLVDSTDKADLRLIYLALAHMIKFRGHFLIEGDLNPDNSDVDKLFIQLVQTYNQLFEENPINASGVDAKAILSARLSKSRRLENLIAQLPGEKKNGLFGNLIALSLGLTPNFKSNFDLAEDAKLQLSKDTYDDDLDNLLAQIGDQYADLFLAAKNLSDAILLSDILRVNTEITKAPLSASMIKRYDEHHQDLTLLKALVRQQLPEKYKEIFFDQSKNGYAGYIDGGASQEEFYKFIKPILEKMDGTEELLVKLNREDLLRKQRTFDNGSIPHQIHLGELHAILRRQEDFYPFLKDNREKIEKILTFRIPYYVGPLARGNSRFAWMTRKSEETITPWNFEEVVDKGASAQSFIERMTNFDKNLPNEKVLPKHSLLYEYFTVYNELTKVKYVTEGMRKPAFLSGEQKKAIVDLLFKTNRKVTVKQLKEDYFKKIECFDSVEISGVEDRFNASLGTYHDLLKIIKDKDFLDNEENEDILEDIVLTLTLFEDREMIEERLKTYAHLFDDKVMKQLKRRRYTGWGRLSRKLINGIRDKQSGKTILDFLKSDGFANRNFMQLIHDDSLTFKEDIQKAQVSGQGDSLHEHIANLAGSPAIKKGILQTVKVVDELVKVMGRHKPENIVIEMARENQTTQKGQKNSRERMKRIEEGIKELGSQILKEHPVENTQLQNEKLYLYYLQNGRDMYVDQELDINRLSDYDVDHIVPQSFLKDDSIDNKVLTRSDKARGKSDNVPSEEVVKKMKNYWRQLLNAKLITQRKFDNLTKAERGGLSELDKAGFIKRQLVETRQITKHVAQILDSRMNTKYDENDKLIREVKVITLKSKLVSDFRKDFQFYKVREINNYHHAHDAYLNAVVGTALIKKYPKLESEFVYGDYKVYDVRKMIAKSEQEIGKATAKYFFYSNIMNFFKTEITLANGEIRKRPLIETNGETGEIVWDKGRDFATVRKVLSMPQVNIVKKTEVQTGGFSKESILPKRNSDKLIARKKDWDPKKYGGFDSPTVAYSVLVVAKVEKGKSKKLKSVKELLGITIMERSSFEKNPIDFLEAKGYKEVKKDLIIKLPKYSLFELENGRKRMLASAGELQKGNELALPSKYVNFLYLASHYEKLKGSPEDNEQKQLFVEQHKHYLDEIIEQISEFSKRVILADANLDKVLSAYNKHRDKPIREQAENIIHLFTLTNLGAPAAFKYFDTTIDRKRYTSTKEVLDATLIHQSITGLYETRIDLSQLGGDGGGGSGGGGGLGIEDEYRLHETSTEPDVSLGSTWLSDFPQAWAETGGMGLAVRQAPLIIPLKATSTPVSIQQYPMSHEARLGIKPHIQRLLDQGILVPCQSPWNTPLLPVKKPGTNDYRPVQDLREVNKRVEDIHPTVPNPYNLLSGLPPSHQWYTVLDLKDAFFCLRLHPTSQPLFAFEWRDPGMGISGQLTWTRLPQGFKNSPTLFNEALHRDLADFRIQHPDLILLQYVDDILLAATSELDCQQGTRALLQTLGDLGYRASAKKAQICQKQVKYLGYLLREGQRWLTEARKETVMGQPVPKTPRQLREFLGKAGFCRLFIPGFAEMAAPLYPLTKPGTLFSWGPDQQKAYQEIKQALLTAPALGLPDLTKPFELFVDEKQGYAKGVLTQKLGPWRRPVAYLSKKLDPVAAGWPPCLRMVAAIAVLTKDAGKLTMGQPLVILAPHAVEALVKQPPDRWLSNARMTHYQAMLLDTDRVQFGPVVALNPATLLPLPEEGAPHDCLEILAETHGTRPDLTDQPIPDADHTWYTDGSSFLQEGQRKAGAAVTTETEVIWAGALPAGTSAQRAELIALTQALKMAEGKRLNVYTDSRYAFATAHIHGEIYRRRGWLTSEGREIKNKSEILALLKALFLPKRLSIIHCLGHQKGDSAEARGNRLADQAAREAAIKTPPDTSTLLIAGKRTADGSEFEKRTADGSEFESPKKKAKVE

SEQ ID NO: 2149 - protein, 2096 aa, synthetic construct
MPAAKRVKLDGGDKKYSIGLDIGTNSVGWAVITDEYKVPSKKFKVLGNTDRHSIKKNLIGALLFDSGETAEATRLKRTARRRYTRRKNRICYLQEIFSNEMAKVDDSFFHRLEESFLVEEDKKHERHPIFGNIVDEVAYHEKYPTIYHLRKKLVDSTDKADLRLIYLALAHMIKFRGHFLIEGDLNPDNSDVDKLFIQLVQTYNQLFEENPINASGVDAKAILSARLSKSRRLENLIAQLPGEKKNGLFGNLIALSLGLTPNFKSNFDLAEDAKLQLSKDTYDDDLDNLLAQIGDQYADLFLAAKNLSDAILLSDILRVNTEITKAPLSASMIKRYDEHHQDLTLLKALVRQQLPEKYKEIFFDQSKNGYAGYIDGGASQEEFYKFIKPILEKMDGTEELLVKLNREDLLRKQRTFDNGSIPHQIHLGELHAILRRQEDFYPFLKDNREKIEKILTFRIPYYVGPLARGNSRFAWMTRKSEETITPWNFEEVVDKGASAQSFIERMTNFDKNLPNEKVLPKHSLLYEYFTVYNELTKVKYVTEGMRKPAFLSGEQKKAIVDLLFKTNRKVTVKQLKEDYFKKIECFDSVEISGVEDRFNASLGTYHDLLKIIKDKDFLDNEENEDILEDIVLTLTLFEDREMIEERLKTYAHLFDDKVMKQLKRRRYTGWGRLSRKLINGIRDKQSGKTILDFLKSDGFANRNFMQLIHDDSLTFKEDIQKAQVSGQGDSLHEHIANLAGSPAIKKGILQTVKVVDELVKVMGRHKPENIVIEMARENQTTQKGQKNSRERMKRIEEGIKELGSQILKEHPVENTQLQNEKLYLYYLQNGRDMYVDQELDINRLSDYDVDHIVPQSFLKDDSIDNKVLTRSDKARGKSDNVPSEEVVKKMKNYWRQLLNAKLITQRKFDNLTKAERGGLSELDKAGFIKRQLVETRQITKHVAQILDSRMNTKYDENDKLIREVKVITLKSKLVSDFRKDFQFYKVREINNYHHAHDAYLNAVVGTALIKKYPKLESEFVYGDYKVYDVRKMIAKSEQEIGKATAKYFFYSNIMNFFKTEITLANGEIRKRPLIETNGETGEIVWDKGRDFATVRKVLSMPQVNIVKKTEVQTGGFSKESILPKRNSDKLIARKKDWDPKKYGGFDSPTVAYSVLVVAKVEKGKSKKLKSVKELLGITIMERSSFEKNPIDFLEAKGYKEVKKDLIIKLPKYSLFELENGRKRMLASAGELQKGNELALPSKYVNFLYLASHYEKLKGSPEDNEQKQLFVEQHKHYLDEIIEQISEFSKRVILADANLDKVLSAYNKHRDKPIREQAENIIHLFTLTNLGAPAAFKYFDTTIDRKRYTSTKEVLDATLIHQSITGLYETRIDLSQLGGDGGGSSPAPEAAAKGGLGIEDEYRLHETSTEPDVSLGSTWLSDFPQAWAETGGMGLAVRQAPLIIPLKATSTPVSIQQYPMSHEARLGIKPHIQRLLDQGILVPCQSPWNTPLLPVKKPGTNDYRPVQDLREVNKRVEDIHPTVPNPYNLLSGLPPSHQWYTVLDLKDAFFCLRLHPTSQPLFAFEWRDPGMGISGQLTWTRLPQGFKNSPTLFNEALHRDLADFRIQHPDLILLQYVDDILLAATSELDCQQGTRALLQTLGDLGYRASAKKAQICQKQVKYLGYLLREGQRWLTEARKETVMGQPVPKTPRQLREFLGKAGFCRLFIPGFAEMAAPLYPLTKPGTLFSWGPDQQKAYQEIKQALLTAPALGLPDLTKPFELFVDEKQGYAKGVLTQKLGPWRRPVAYLSKKLDPVAAGWPPCLRMVAAIAVLTKDAGKLTMGQPLVILAPHAVEALVKQPPDRWLSNARMTHYQAMLLDTDRVQFGPVVALNPATLLPLPEEGAPHDCLEILAETHGTRPDLTDQPIPDADHTWYTDGSSFLQEGQRKAGAAVTTETEVIWAGALPAGTSAQRAELIALTQALKMAEGKRLNVYTDSRYAFATAHIHGEIYRRRGWLTSEGREIKNKSEILALLKALFLPKRLSIIHCLGHQKGDSAEARGNRLADQAAREAAIKTPPDTSTLLIAGKRTADGSEFEKRTADGSEFESPKKKAKVE

SEQ ID NO: 2150 - protein, 2091 aa, synthetic construct; identical to SEQ ID NO: 2057

SEQ ID NO: 2151 - protein, 2094 aa, synthetic construct
MPAAKRVKLDGGDKKYSIGLDIGTNSVGWAVITDEYKVPSKKFKVLGNTDRHSIKKNLIGALLFDSGETAEATRLKRTARRRYTRRKNRICYLQEIFSNEMAKVDDSFFHRLEESFLVEEDKKHERHPIFGNIVDEVAYHEKYPTIYHLRKKLVDSTDKADLRLIYLALAHMIKFRGHFLIEGDLNPDNSDVDKLFIQLVQTYNQLFEENPINASGVDAKAILSARLSKSRRLENLIAQLPGEKKNGLFGNLIALSLGLTPNFKSNFDLAEDAKLQLSKDTYDDDLDNLLAQIGDQYADLFLAAKNLSDAILLSDILRVNTEITKAPLSASMIKRYDEHHQDLTLLKALVRQQLPEKYKEIFFDQSKNGYAGYIDGGASQEEFYKFIKPILEKMDGTEELLVKLNREDLLRKQRTFDNGSIPHQIHLGELHAILRRQEDFYPFLKDNREKIEKILTFRIPYYVGPLARGNSRFAWMTRKSEETITPWNFEEVVDKGASAQSFIERMTNFDKNLPNEKVLPKHSLLYEYFTVYNELTKVKYVTEGMRKPAFLSGEQKKAIVDLLFKTNRKVTVKQLKEDYFKKIECFDSVEISGVEDRFNASLGTYHDLLKIIKDKDFLDNEENEDILEDIVLTLTLFEDREMIEERLKTYAHLFDDKVMKQLKRRRYTGWGRLSRKLINGIRDKQSGKTILDFLKSDGFANRNFMQLIHDDSLTFKEDIQKAQVSGQGDSLHEHIANLAGSPAIKKGILQTVKVVDELVKVMGRHKPENIVIEMARENQTTQKGQKNSRERMKRIEEGIKELGSQILKEHPVENTQLQNEKLYLYYLQNGRDMYVDQELDINRLSDYDVDHIVPQSFLKDDSIDNKVLTRSDKARGKSDNVPSEEVVKKMKNYWRQLLNAKLITQRKFDNLTKAERGGLSELDKAGFIKRQLVETRQITKHVAQILDSRMNTKYDENDKLIREVKVITLKSKLVSDFRKDFQFYKVREINNYHHAHDAYLNAVVGTALIKKYPKLESEFVYGDYKVYDVRKMIAKSEQEIGKATAKYFFYSNIMNFFKTEITLANGEIRKRPLIETNGETGEIVWDKGRDFATVRKVLSMPQVNIVKKTEVQTGGFSKESILPKRNSDKLIARKKDWDPKKYGGFDSPTVAYSVLVVAKVEKGKSKKLKSVKELLGITIMERSSFEKNPIDFLEAKGYKEVKKDLIIKLPKYSLFELENGRKRMLASAGELQKGNELALPSKYVNFLYLASHYEKLKGSPEDNEQKQLFVEQHKHYLDEIIEQISEFSKRVILADANLDKVLSAYNKHRDKPIREQAENIIHLFTLTNLGAPAAFKYFDTTIDRKRYTSTKEVLDATLIHQSITGLYETRIDLSQLGGDGGPAPGGGGGSGGLGIEDEYRLHETSTEPDVSLGSTWLSDFPQAWAETGGMGLAVRQAPLIIPLKATSTPVSIQQYPMSHEARLGIKPHIQRLLDQGILVPCQSPWNTPLLPVKKPGTNDYRPVQDLREVNKRVEDIHPTVPNPYNLLSGLPPSHQWYTVLDLKDAFFCLRLHPTSQPLFAFEWRDPGMGISGQLTWTRLPQGFKNSPTLFNEALHRDLADFRIQHPDLILLQYVDDILLAATSELDCQQGTRALLQTLGDLGYRASAKKAQICQKQVKYLGYLLREGQRWLTEARKETVMGQPVPKTPRQLREFLGKAGFCRLFIPGFAEMAAPLYPLTKPGTLFSWGPDQQKAYQEIKQALLTAPALGLPDLTKPFELFVDEKQGYAKGVLTQKLGPWRRPVAYLSKKLDPVAAGWPPCLRMVAAIAVLTKDAGKLTMGQPLVILAPHAVEALVKQPPDRWLSNARMTHYQAMLLDTDRVQFGPVVALNPATLLPLPEEGAPHDCLEILAETHGTRPDLTDQPIPDADHTWYTDGSSFLQEGQRKAGAAVTTETEVIWAGALPAGTSAQRAELIALTQALKMAEGKRLNVYTDSRYAFATAHIHGEIYRRRGWLTSEGREIKNKSEILALLKALFLPKRLSIIHCLGHQKGDSAEARGNRLADQAAREAAIKTPPDTSTLLIAGKRTADGSEFEKRTADGSEFESPKKKAKVE

SEQ ID NO: 2152 - protein, 2093 aa, synthetic construct
MPAAKRVKLDGGDKKYSIGLDIGTNSVGWAVITDEYKVPSKKFKVLGNTDRHSIKKNLIGALLFDSGETAEATRLKRTARRRYTRRKNRICYLQEIFSNEMAKVDDSFFHRLEESFLVEEDKKHERHPIFGNIVDEVAYHEKYPTIYHLRKKLVDSTDKADLRLIYLALAHMIKFRGHFLIEGDLNPDNSDVDKLFIQLVQTYNQLFEENPINASGVDAKAILSARLSKSRRLENLIAQLPGEKKNGLFGNLIALSLGLTPNFKSNFDLAEDAKLQLSKDTYDDDLDNLLAQIGDQYADLFLAAKNLSDAILLSDILRVNTEITKAPLSASMIKRYDEHHQDLTLLKALVRQQLPEKYKEIFFDQSKNGYAGYIDGGASQEEFYKFIKPILEKMDGTEELLVKLNREDLLRKQRTFDNGSIPHQIHLGELHAILRRQEDFYPFLKDNREKIEKILTFRIPYYVGPLARGNSRFAWMTRKSEETITPWNFEEVVDKGASAQSFIERMTNFDKNLPNEKVLPKHSLLYEYFTVYNELTKVKYVTEGMRKPAFLSGEQKKAIVDLLFKTNRKVTVKQLKEDYFKKIECFDSVEISGVEDRFNASLGTYHDLLKIIKDKDFLDNEENEDILEDIVLTLTLFEDREMIEERLKTYAHLFDDKVMKQLKRRRYTGWGRLSRKLINGIRDKQSGKTILDFLKSDGFANRNFMQLIHDDSLTFKEDIQKAQVSGQGDSLHEHIANLAGSPAIKKGILQTVKVVDELVKVMGRHKPENIVIEMARENQTTQKGQKNSRERMKRIEEGIKELGSQILKEHPVENTQLQNEKLYLYYLQNGRDMYVDQELDINRLSDYDVDHIVPQSFLKDDSIDNKVLTRSDKARGKSDNVPSEEVVKKMKNYWRQLLNAKLITQRKFDNLTKAERGGLSELDKAGFIKRQLVETRQITKHVAQILDSRMNTKYDENDKLIREVKVITLKSKLVSDFRKDFQFYKVREINNYHHAHDAYLNAVVGTALIKKYPKLESEFVYGDYKVYDVRKMIAKSEQEIGKATAKYFFYSNIMNFFKTEITLANGEIRKRPLIETNGETGEIVWDKGRDFATVRKVLSMPQVNIVKKTEVQTGGFSKESILPKRNSDKLIARKKDWDPKKYGGFDSPTVAYSVLVVAKVEKGKSKKLKSVKELLGITIMERSSFEKNPIDFLEAKGYKEVKKDLIIKLPKYSLFELENGRKRMLASAGELQKGNELALPSKYVNFLYLASHYEKLKGSPEDNEQKQLFVEQHKHYLDEIIEQISEFSKRVILADANLDKVLSAYNKHRDKPIREQAENIIHLFTLTNLGAPAAFKYFDTTIDRKRYTSTKEVLDATLIHQSITGLYETRIDLSQLGGDGGEAAAKGGGGGLGIEDEYRLHETSTEPDVSLGSTWLSDFPQAWAETGGMGLAVRQAPLIIPLKATSTPVSIQQYPMSHEARLGIKPHIQRLLDQGILVPCQSPWNTPLLPVKKPGTNDYRPVQDLREVNKRVEDIHPTVPNPYNLLSGLPPSHQWYTVLDLKDAFFCLRLHPTSQPLFAFEWRDPGMGISGQLTWTRLPQGFKNSPTLFNEALHRDLADFRIQHPDLILLQYVDDILLAATSELDCQQGTRALLQTLGDLGYRASAKKAQICQKQVKYLGYLLREGQRWLTEARKETVMGQPVPKTPRQLREFLGKAGFCRLFIPGFAEMAAPLYPLTKPGTLFSWGPDQQKAYQEIKQALLTAPALGLPDLTKPFELFVDEKQGYAKGVLTQKLGPWRRPVAYLSKKLDPVAAGWPPCLRMVAAIAVLTKDAGKLTMGQPLVILAPHAVEALVKQPPDRWLSNARMTHYQAMLLDTDRVQFGPVVALNPATLLPLPEEGAPHDCLEILAETHGTRPDLTDQPIPDADHTWYTDGSSFLQEGQRKAGAAVTTETEVIWAGALPAGTSAQRAELIALTQALKMAEGKRLNVYTDSRYAFATAHIHGEIYRRRGWLTSEGREIKNKSEILALLKALFLPKRLSIIHCLGHQKGDSAEARGNRLADQAAREAAIKTPPDTSTLLIAGKRTADGSEFEKRTADGSEFESPKKKAKVE

SEQ ID NO: 2153 - protein, 2094 aa, synthetic construct
MPAAKRVKLDGGDKKYSIGLDIGTNSVGWAVITDEYKVPSKKFKVLGNTDRHSIKKNLIGALLFDSGETAEATRLKRTARRRYTRRKNRICYLQEIFSNEMAKVDDSFFHRLEESFLVEEDKKHERHPIFGNIVDEVAYHEKYPTIYHLRKKLVDSTDKADLRLIYLALAHMIKFRGHFLIEGDLNPDNSDVDKLFIQLVQTYNQLFEENPINASGVDAKAILSARLSKSRRLENLIAQLPGEKKNGLFGNLIALSLGLTPNFKSNFDLAEDAKLQLSKDTYDDDLDNLLAQIGDQYADLFLAAKNLSDAILLSDILRVNTEITKAPLSASMIKRYDEHHQDLTLLKALVRQQLPEKYKEIFFDQSKNGYAGYIDGGASQEEFYKFIKPILEKMDGTEELLVKLNREDLLRKQRTFDNGSIPHQIHLGELHAILRRQEDFYPFLKDNREKIEKILTFRIPYYVGPLARGNSRFAWMTRKSEETITPWNFEEVVDKGASAQSFIERMTNFDKNLPNEKVLPKHSLLYEYFTVYNELTKVKYVTEGMRKPAFLSGEQKKAIVDLLFKTNRKVTVKQLKEDYFKKIECFDSVEISGVEDRFNASLGTYHDLLKIIKDKDFLDNEENEDILEDIVLTLTLFEDREMIEERLKTYAHLFDDKVMKQLKRRRYTGWGRLSRKLINGIRDKQSGKTILDFLKSDGFANRNFMQLIHDDSLTFKEDIQKAQVSGQGDSLHEHIANLAGSPAIKKGILQTVKVVDELVKVMGRHKPENIVIEMARENQTTQKGQKNSRERMKRIEEGIKELGSQILKEHPVENTQLQNEKLYLYYLQNGRDMYVDQELDINRLSDYDVDHIVPQSFLKDDSIDNKVLTRSDKARGKSDNVPSEEVVKKMKNYWRQLLNAKLITQRKFDNLTKAERGGLSELDKAGFIKRQLVETRQITKHVAQILDSRMNTKYDENDKLIREVKVITLKSKLVSDFRKDFQFYKVREINNYHHAHDAYLNAVVGTALIKKYPKLESEFVYGDYKVYDVRKMIAKSEQEIGKATAKYFFYSNIMNFFKTEITLANGEIRKRPLIETNGETGEIVWDKGRDFATVRKVLSMPQVNIVKKTEVQTGGFSKESILPKRNSDKLIARKKDWDPKKYGGFDSPTVAYSVLVVAKVEKGKSKKLKSVKELLGITIMERSSFEKNPIDFLEAKGYKEVKKDLIIKLPKYSLFELENGRKRMLASAGELQKGNELALPSKYVNFLYLASHYEKLKGSPEDNEQKQLFVEQHKHYLDEIIEQISEFSKRVILADANLDKVLSAYNKHRDKPIREQAENIIHLFTLTNLGAPAAFKYFDTTIDRKRYTSTKEVLDATLIHQSITGLYETRIDLSQLGGDGGPAPGGSGGGGGLGIEDEYRLHETSTEPDVSLGSTWLSDFPQAWAETGGMGLAVRQAPLIIPLKATSTPVSIQQYPMSHEARLGIKPHIQRLLDQGILVPCQSPWNTPLLPVKKPGTNDYRPVQDLREVNKRVEDIHPTVPNPYNLLSGLPPSHQWYTVLDLKDAFFCLRLHPTSQPLFAFEWRDPGMGISGQLTWTRLPQGFKNSPTLFNEALHRDLADFRIQHPDLILLQYVDDILLAATSELDCQQGTRALLQTLGDLGYRASAKKAQICQKQVKYLGYLLREGQRWLTEARKETVMGQPVPKTPRQLREFLGKAGFCRLFIPGFAEMAAPLYPLTKPGTLFSWGPDQQKAYQEIKQALLTAPALGLPDLTKPFELFVDEKQGYAKGVLTQKLGPWRRPVAYLSKKLDPVAAGWPPCLRMVAAIAVLTKDAGKLTMGQPLVILAPHAVEALVKQPPDRWLSNARMTHYQAMLLDTDRVQFGPVVALNPATLLPLPEEGAPHDCLEILAETHGTRPDLTDQPIPDADHTWYTDGSSFLQEGQRKAGAAVTTETEVIWAGALPAGTSAQRAELIALTQALKMAEGKRLNVYTDSRYAFATAHIHGEIYRRRGWLTSEGREIKNKSEILALLKALFLPKRLSIIHCLGHQKGDSAEARGNRLADQAAREAAIKTPPDTSTLLIAGKRTADGSEFEKRTADGSEFESPKKKAKVE

SEQ ID NO: 2154 - protein, 2094 aa, synthetic construct
MPAAKRVKLDGGDKKYSIGLDIGTNSVGWAVITDEYKVPSKKFKVLGNTDRHSIKKNLIGALLFDSGETAEATRLKRTARRRYTRRKNRICYLQEIFSNEMAKVDDSFFHRLEESFLVEEDKKHERHPIFGNIVDEVAYHEKYPTIYHLRKKLVDSTDKADLRLIYLALAHMIKFRGHFLIEGDLNPDNSDVDKLFIQLVQTYNQLFEENPINASGVDAKAILSARLSKSRRLENLIAQLPGEKKNGLFGNLIALSLGLTPNFKSNFDLAEDAKLQLSKDTYDDDLDNLLAQIGDQYADLFLAAKNLSDAILLSDILRVNTEITKAPLSASMIKRYDEHHQDLTLLKALVRQQLPEKYKEIFFDQSKNGYAGYIDGGASQEEFYKFIKPILEKMDGTEELLVKLNREDLLRKQRTFDNGSIPHQIHLGELHAILRRQEDFYPFLKDNREKIEKILTFRIPYYVGPLARGNSRFAWMTRKSEETITPWNFEEVVDKGASAQSFIERMTNFDKNLPNEKVLPKHSLLYEYFTVYNELTKVKYVTEGMRKPAFLSGEQKKAIVDLLFKTNRKVTVKQLKEDYFKKIECFDSVEISGVEDRFNASLGTYHDLLKIIKDKDFLDNEENEDILEDIVLTLTLFEDREMIEERLKTYAHLFDDKVMKQLKRRRYTGWGRLSRKLINGIRDKQSGKTILDFLKSDGFANRNFMQLIHDDSLTFKEDIQKAQVSGQGDSLHEHIANLAGSPAIKKGILQTVKVVDELVKVMGRHKPENIVIEMARENQTTQKGQKNSRERMKRIEEGIKELGSQILKEHPVENTQLQNEKLYLYYLQNGRDMYVDQELDINRLSDYDVDHIVPQSFLKDDSIDNKVLTRSDKARGKSDNVPSEEVVKKMKNYWRQLLNAKLITQRKFDNLTKAERGGLSELDKAGFIKRQLVETRQITKHVAQILDSRMNTKYDENDKLIREVKVITLKSKLVSDFRKDFQFYKVREINNYHHAHDAYLNAVVGTALIKKYPKLESEFVYGDYKVYDVRKMIAKSEQEIGKATAKYFFYSNIMNFFKTEITLANGEIRKRPLIETNGETGEIVWDKGRDFATVRKVLSMPQVNIVKKTEVQTGGFSKESILPKRNSDKLIARKKDWDPKKYGGFDSPTVAYSVLVVAKVEKGKSKKLKSVKELLGITIMERSSFEKNPIDFLEAKGYKEVKKDLIIKLPKYSLFELENGRKRMLASAGELQKGNELALPSKYVNFLYLASHYEKLKGSPEDNEQKQLFVEQHKHYLDEIIEQISEFSKRVILADANLDKVLSAYNKHRDKPIREQAENIIHLFTLTNLGAPAAFKYFDTTIDRKRYTSTKEVLDATLIHQSITGLYETRIDLSQLGGDGGGGGPAPGGSGGLGIEDEYRLHETSTEPDVSLGSTWLSDFPQAWAETGGMGLAVRQAPLIIPLKATSTPVSIQQYPMSHEARLGIKPHIQRLLDQGILVPCQSPWNTPLLPVKKPGTNDYRPVQDLREVNKRVEDIHPTVPNPYNLLSGLPPSHQWYTVLDLKDAFFCLRLHPTSQPLFAFEWRDPGMGISGQLTWTRLPQGFKNSPTLFNEALHRDLADFRIQHPDLILLQYVDDILLAATSELDCQQGTRALLQTLGDLGYRASAKKAQICQKQVKYLGYLLREGQRWLTEARKETVMGQPVPKTPRQLREFLGKAGFCRLFIPGFAEMAAPLYPLTKPGTLFSWGPDQQKAYQEIKQALLTAPALGLPDLTKPFELFVDEKQGYAKGVLTQKLGPWRRPVAYLSKKLDPVAAGWPPCLRMVAAIAVLTKDAGKLTMGQPLVILAPHAVEALVKQPPDRWLSNARMTHYQAMLLDTDRVQFGPVVALNPATLLPLPEEGAPHDCLEILAETHGTRPDLTDQPIPDADHTWYTDGSSFLQEGQRKAGAAVTTETEVIWAGALPAGTSAQRAELIALTQALKMAEGKRLNVYTDSRYAFATAHIHGEIYRRRGWLTSEGREIKNKSEILALLKALFLPKRLSIIHCLGHQKGDSAEARGNRLADQAAREAAIKTPPDTSTLLIAGKRTADGSEFEKRTADGSEFESPKKKAKVE

SEQ ID NO: 2155 - protein, 2097 aa, synthetic construct; identical to SEQ ID NO: 2056

SEQ ID NO: 2156 - protein, 2094 aa, synthetic construct
MPAAKRVKLDGGDKKYSIGLDIGTNSVGWAVITDEYKVPSKKFKVLGNTDRHSIKKNLIGALLFDSGETAEATRLKRTARRRYTRRKNRICYLQEIFSNEMAKVDDSFFHRLEESFLVEEDKKHERHPIFGNIVDEVAYHEKYPTIYHLRKKLVDSTDKADLRLIYLALAHMIKFRGHFLIEGDLNPDNSDVDKLFIQLVQTYNQLFEENPINASGVDAKAILSARLSKSRRLENLIAQLPGEKKNGLFGNLIALSLGLTPNFKSNFDLAEDAKLQLSKDTYDDDLDNLLAQIGDQYADLFLAAKNLSDAILLSDILRVNTEITKAPLSASMIKRYDEHHQDLTLLKALVRQQLPEKYKEIFFDQSKNGYAGYIDGGASQEEFYKFIKPILEKMDGTEELLVKLNREDLLRKQRTFDNGSIPHQIHLGELHAILRRQEDFYPFLKDNREKIEKILTFRIPYYVGPLARGNSRFAWMTRKSEETITPWNFEEVVDKGASAQSFIERMTNFDKNLPNEKVLPKHSLLYEYFTVYNELTKVKYVTEGMRKPAFLSGEQKKAIVDLLFKTNRKVTVKQLKEDYFKKIECFDSVEISGVEDRFNASLGTYHDLLKIIKDKDFLDNEENEDILEDIVLTLTLFEDREMIEERLKTYAHLFDDKVMKQLKRRRYTGWGRLSRKLINGIRDKQSGKTILDFLKSDGFANRNFMQLIHDDSLTFKEDIQKAQVSGQGDSLHEHIANLAGSPAIKKGILQTVKVVDELVKVMGRHKPENIVIEMARENQTTQKGQKNSRERMKRIEEGIKELGSQILKEHPVENTQLQNEKLYLYYLQNGRDMYVDQELDINRLSDYDVDHIVPQSFLKDDSIDNKVLTRSDKARGKSDNVPSEEVVKKMKNYWRQLLNAKLITQRKFDNLTKAERGGLSELDKAGFIKRQLVETRQITKHVAQILDSRMNTKYDENDKLIREVKVITLKSKLVSDFRKDFQFYKVREINNYHHAHDAYLNAVVGTALIKKYPKLESEFVYGDYKVYDVRKMIAKSEQEIGKATAKYFFYSNIMNFFKTEITLANGEIRKRPLIETNGETGEIVWDKGRDFATVRKVLSMPQVNIVKKTEVQTGGFSKESILPKRNSDKLIARKKDWDPKKYGGFDSPTVAYSVLVVAKVEKGKSKKLKSVKELLGITIMERSSFEKNPIDFLEAKGYKEVKKDLIIKLPKYSLFELENGRKRMLASAGELQKGNELALPSKYVNFLYLASHYEKLKGSPEDNEQKQLFVEQHKHYLDEIIEQISEFSKRVILADANLDKVLSAYNKHRDKPIREQAENIIHLFTLTNLGAPAAFKYFDTTIDRKRYTSTKEVLDATLIHQSITGLYETRIDLSQLGGDGGGSSPAPGGSGGLGIEDEYRLHETSTEPDVSLGSTWLSDFPQAWAETGGMGLAVRQAPLIIPLKATSTPVSIQQYPMSHEARLGIKPHIQRLLDQGILVPCQSPWNTPLLPVKKPGTNDYRPVQDLREVNKRVEDIHPTVPNPYNLLSGLPPSHQWYTVLDLKDAFFCLRLHPTSQPLFAFEWRDPGMGISGQLTWTRLPQGFKNSPTLFNEALHRDLADFRIQHPDLILLQYVDDILLAATSELDCQQGTRALLQTLGDLGYRASAKKAQICQKQVKYLGYLLREGQRWLTEARKETVMGQPVPKTPRQLREFLGKAGFCRLFIPGFAEMAAPLYPLTKPGTLFSWGPDQQKAYQEIKQALLTAPALGLPDLTKPFELFVDEKQGYAKGVLTQKLGPWRRPVAYLSKKLDPVAAGWPPCLRMVAAIAVLTKDAGKLTMGQPLVILAPHAVEALVKQPPDRWLSNARMTHYQAMLLDTDRVQFGPVVALNPATLLPLPEEGAPHDCLEILAETHGTRPDLTDQPIPDADHTWYTDGSSFLQEGQRKAGAAVTTETEVIWAGALPAGTSAQRAELIALTQALKMAEGKRLNVYTDSRYAFATAHIHGEIYRRRGWLTSEGREIKNKSEILALLKALFLPKRLSIIHCLGHQKGDSAEARGNRLADQAAREAAIKTPPDTSTLLIAGKRTADGSEFEKRTADGSEFESPKKKAKVE

SEQ ID NO: 2157 - protein, 2095 aa, synthetic construct
MPAAKRVKLDGGDKKYSIGLDIGTNSVGWAVITDEYKVPSKKFKVLGNTDRHSIKKNLIGALLFDSGETAEATRLKRTARRRYTRRKNRICYLQEIFSNEMAKVDDSFFHRLEESFLVEEDKKHERHPIFGNIVDEVAYHEKYPTIYHLRKKLVDSTDKADLRLIYLALAHMIKFRGHFLIEGDLNPDNSDVDKLFIQLVQTYNQLFEENPINASGVDAKAILSARLSKSRRLENLIAQLPGEKKNGLFGNLIALSLGLTPNFKSNFDLAEDAKLQLSKDTYDDDLDNLLAQIGDQYADLFLAAKNLSDAILLSDILRVNTEITKAPLSASMIKRYDEHHQDLTLLKALVRQQLPEKYKEIFFDQSKNGYAGYIDGGASQEEFYKFIKPILEKMDGTEELLVKLNREDLLRKQRTFDNGSIPHQIHLGELHAILRRQEDFYPFLKDNREKIEKILTFRIPYYVGPLARGNSRFAWMTRKSEETITPWNFEEVVDKGASAQSFIERMTNFDKNLPNEKVLPKHSLLYEYFTVYNELTKVKYVTEGMRKPAFLSGEQKKAIVDLLFKTNRKVTVKQLKEDYFKKIECFDSVEISGVEDRFNASLGTYHDLLKIIKDKDFLDNEENEDILEDIVLTLTLFEDREMIEERLKTYAHLFDDKVMKQLKRRRYTGWGRLSRKLINGIRDKQSGKTILDFLKSDGFANRNFMQLIHDDSLTFKEDIQKAQVSGQGDSLHEHIANLAGSPAIKKGILQTVKVVDELVKVMGRHKPENIVIEMARENQTTQKGQKNSRERMKRIEEGIKELGSQILKEHPVENTQLQNEKLYLYYLQNGRDMYVDQELDINRLSDYDVDHIVPQSFLKDDSIDNKVLTRSDKARGKSDNVPSEEVVKKMKNYWRQLLNAKLITQRKFDNLTKAERGGLSELDKAGFIKRQLVETRQITKHVAQILDSRMNTKYDENDKLIREVKVITLKSKLVSDFRKDFQFYKVREINNYHHAHDAYLNAVVGTALIKKYPKLESEFVYGDYKVYDVRKMIAKSEQEIGKATAKYFFYSNIMNFFKTEITLANGEIRKRPLIETNGETGEIVWDKGRDFATVRKVLSMPQVNIVKKTEVQTGGFSKESILPKRNSDKLIARKKDWDPKKYGGFDSPTVAYSVLVVAKVEKGKSKKLKSVKELLGITIMERSSFEKNPIDFLEAKGYKEVKKDLIIKLPKYSLFELENGRKRMLASAGELQKGNELALPSKYVNFLYLASHYEKLKGSPEDNEQKQLFVEQHKHYLDEIIEQISEFSKRVILADANLDKVLSAYNKHRDKPIREQAENIIHLFTLTNLGAPAAFKYFDTTIDRKRYTSTKEVLDATLIHQSITGLYETRIDLSQLGGDGGGGGGSGGGGSGGLGIEDEYRLHETSTEPDVSLGSTWLSDFPQAWAETGGMGLAVRQAPLIIPLKATSTPVSIQQYPMSHEARLGIKPHIQRLLDQGILVPCQSPWNTPLLPVKKPGTNDYRPVQDLREVNKRVEDIHPTVPNPYNLLSGLPPSHQWYTVLDLKDAFFCLRLHPTSQPLFAFEWRDPGMGISGQLTWTRLPQGFKNSPTLFNEALHRDLADFRIQHPDLILLQYVDDILLAATSELDCQQGTRALLQTLGDLGYRASAKKAQICQKQVKYLGYLLREGQRWLTEARKETVMGQPVPKTPRQLREFLGKAGFCRLFIPGFAEMAAPLYPLTKPGTLFSWGPDQQKAYQEIKQALLTAPALGLPDLTKPFELFVDEKQGYAKGVLTQKLGPWRRPVAYLSKKLDPVAAGWPPCLRMVAAIAVLTKDAGKLTMGQPLVILAPHAVEALVKQPPDRWLSNARMTHYQAMLLDTDRVQFGPVVALNPATLLPLPEEGAPHDCLEILAETHGTRPDLTDQPIPDADHTWYTDGSSFLQEGQRKAGAAVTTETEVIWAGALPAGTSAQRAELIALTQALKMAEGKRLNVYTDSRYAFATAHIHGEIYRRRGWLTSEGREIKNKSEILALLKALFLPKRLSIIHCLGHQKGDSAEARGNRLADQAAREAAIKTPPDTSTLLIAGKRTADGSEFEKRTADGSEFESPKKKAKVE

SEQ ID NO: 2158 - protein, 2091 aa, synthetic construct
MPAAKRVKLDGGDKKYSIGLDIGTNSVGWAVITDEYKVPSKKFKVLGNTDRHSIKKNLIGALLFDSGETAEATRLKRTARRRYTRRKNRICYLQEIFSNEMAKVDDSFFHRLEESFLVEEDKKHERHPIFGNIVDEVAYHEKYPTIYHLRKKLVDSTDKADLRLIYLALAHMIKFRGHFLIEGDLNPDNSDVDKLFIQLVQTYNQLFEENPINASGVDAKAILSARLSKSRRLENLIAQLPGEKKNGLFGNLIALSLGLTPNFKSNFDLAEDAKLQLSKDTYDDDLDNLLAQIGDQYADLFLAAKNLSDAILLSDILRVNTEITKAPLSASMIKRYDEHHQDLTLLKALVRQQLPEKYKEIFFDQSKNGYAGYIDGGASQEEFYKFIKPILEKMDGTEELLVKLNREDLLRKQRTFDNGSIPHQIHLGELHAILRRQEDFYPFLKDNREKIEKILTFRIPYYVGPLARGNSRFAWMTRKSEETITPWNFEEVVDKGASAQSFIERMTNFDKNLPNEKVLPKHSLLYEYFTVYNELTKVKYVTEGMRKPAFLSGEQKKAIVDLLFKTNRKVTVKQLKEDYFKKIECFDSVEISGVEDRFNASLGTYHDLLKIIKDKDFLDNEENEDILEDIVLTLTLFEDREMIEERLKTYAHLFDDKVMKQLKRRRYTGWGRLSRKLINGIRDKQSGKTILDFLKSDGFANRNFMQLIHDDSLTFKEDIQKAQVSGQGDSLHEHIANLAGSPAIKKGILQTVKVVDELVKVMGRHKPENIVIEMARENQTTQKGQKNSRERMKRIEEGIKELGSQILKEHPVENTQLQNEKLYLYYLQNGRDMYVDQELDINRLSDYDVDHIVPQSFLKDDSIDNKVLTRSDKARGKSDNVPSEEVVKKMKNYWRQLLNAKLITQRKFDNLTKAERGGLSELDKAGFIKRQLVETRQITKHVAQILDSRMNTKYDENDKLIREVKVITLKSKLVSDFRKDFQFYKVREINNYHHAHDAYLNAVVGTALIKKYPKLESEFVYGDYKVYDVRKMIAKSEQEIGKATAKYFFYSNIMNFFKTEITLANGEIRKRPLIETNGETGEIVWDKGRDFATVRKVLSMPQVNIVKKTEVQTGGFSKESILPKRNSDKLIARKKDWDPKKYGGFDSPTVAYSVLVVAKVEKGKSKKLKSVKELLGITIMERSSFEKNPIDFLEAKGYKEVKKDLIIKLPKYSLFELENGRKRMLASAGELQKGNELALPSKYVNFLYLASHYEKLKGSPEDNEQKQLFVEQHKHYLDEIIEQISEFSKRVILADANLDKVLSAYNKHRDKPIREQAENIIHLFTLTNLGAPAAFKYFDTTIDRKRYTSTKEVLDATLIHQSITGLYETRIDLSQLGGDGGGGSGSSGGLGIEDEYRLHETSTEPDVSLGSTWLSDFPQAWAETGGMGLAVRQAPLIIPLKATSTPVSIQQYPMSHEARLGIKPHIQRLLDQGILVPCQSPWNTPLLPVKKPGTNDYRPVQDLREVNKRVEDIHPTVPNPYNLLSGLPPSHQWYTVLDLKDAFFCLRLHPTSQPLFAFEWRDPGMGISGQLTWTRLPQGFKNSPTLFNEALHRDLADFRIQHPDLILLQYVDDILLAATSELDCQQGTRALLQTLGDLGYRASAKKAQICQKQVKYLGYLLREGQRWLTEARKETVMGQPVPKTPRQLREFLGKAGFCRLFIPGFAEMAAPLYPLTKPGTLFSWGPDQQKAYQEIKQALLTAPALGLPDLTKPFELFVDEKQGYAKGVLTQKLGPWRRPVAYLSKKLDPVAAGWPPCLRMVAAIAVLTKDAGKLTMGQPLVILAPHAVEALVKQPPDRWLSNARMTHYQAMLLDTDRVQFGPVVALNPATLLPLPEEGAPHDCLEILAETHGTRPDLTDQPIPDADHTWYTDGSSFLQEGQRKAGAAVTTETEVIWAGALPAGTSAQRAELIALTQALKMAEGKRLNVYTDSRYAFATAHIHGEIYRRRGWLTSEGREIKNKSEILALLKALFLPKRLSIIHCLGHQKGDSAEARGNRLADQAAREAAIKTPPDTSTLLIAGKRTADGSEFEKRTADGSEFESPKKKAKVE

SEQ ID NO: 2159 - protein, 2096 aa, synthetic construct; identical to SEQ ID NO: 2055

SEQ ID NO: 2160 - protein, 2094 aa, synthetic construct
MPAAKRVKLDGGDKKYSIGLDIGTNSVGWAVITDEYKVPSKKFKVLGNTDRHSIKKNLIGALLFDSGETAEATRLKRTARRRYTRRKNRICYLQEIFSNEMAKVDDSFFHRLEESFLVEEDKKHERHPIFGNIVDEVAYHEKYPTIYHLRKKLVDSTDKADLRLIYLALAHMIKFRGHFLIEGDLNPDNSDVDKLFIQLVQTYNQLFEENPINASGVDAKAILSARLSKSRRLENLIAQLPGEKKNGLFGNLIALSLGLTPNFKSNFDLAEDAKLQLSKDTYDDDLDNLLAQIGDQYADLFLAAKNLSDAILLSDILRVNTEITKAPLSASMIKRYDEHHQDLTLLKALVRQQLPEKYKEIFFDQSKNGYAGYIDGGASQEEFYKFIKPILEKMDGTEELLVKLNREDLLRKQRTFDNGSIPHQIHLGELHAILRRQEDFYPFLKDNREKIEKILTFRIPYYVGPLARGNSRFAWMTRKSEETITPWNFEEVVDKGASAQSFIERMTNFDKNLPNEKVLPKHSLLYEYFTVYNELTKVKYVTEGMRKPAFLSGEQKKAIVDLLFKTNRKVTVKQLKEDYFKKIECFDSVEISGVEDRFNASLGTYHDLLKIIKDKDFLDNEENEDILEDIVLTLTLFEDREMIEERLKTYAHLFDDKVMKQLKRRRYTGWGRLSRKLINGIRDKQSGKTILDFLKSDGFANRNFMQLIHDDSLTFKEDIQKAQVSGQGDSLHEHIANLAGSPAIKKGILQTVKVVDELVKVMGRHKPENIVIEMARENQTTQKGQKNSRERMKRIEEGIKELGSQILKEHPVENTQLQNEKLYLYYLQNGRDMYVDQELDINRLSDYDVDHIVPQSFLKDDSIDNKVLTRSDKARGKSDNVPSEEVVKKMKNYWRQLLNAKLITQRKFDNLTKAERGGLSELDKAGFIKRQLVETRQITKHVAQILDSRMNTKYDENDKLIREVKVITLKSKLVSDFRKDFQFYKVREINNYHHAHDAYLNAVVGTALIKKYPKLESEFVYGDYKVYDVRKMIAKSEQEIGKATAKYFFYSNIMNFFKTEITLANGEIRKRPLIETNGETGEIVWDKGRDFATVRKVLSMPQVNIVKKTEVQTGGFSKESILPKRNSDKLIARKKDWDPKKYGGFDSPTVAYSVLVVAKVEKGKSKKLKSVKELLGITIMERSSFEKNPIDFLEAKGYKEVKKDLIIKLPKYSLFELENGRKRMLASAGELQKGNELALPSKYVNFLYLASHYEKLKGSPEDNEQKQLFVEQHKHYLDEIIEQISEFSKRVILADANLDKVLSAYNKHRDKPIREQAENIIHLFTLTNLGAPAAFKYFDTTIDRKRYTSTKEVLDATLIHQSITGLYETRIDLSQLGGDGGGGGGGSGSSGGLGIEDEYRLHETSTEPDVSLGSTWLSDFPQAWAETGGMGLAVRQAPLIIPLKATSTPVSIQQYPMSHEARLGIKPHIQRLLDQGILVPCQSPWNTPLLPVKKPGTNDYRPVQDLREVNKRVEDIHPTVPNPYNLLSGLPPSHQWYTVLDLKDAFFCLRLHPTSQPLFAFEWRDPGMGISGQLTWTRLPQGFKNSPTLFNEALHRDLADFRIQHPDLILLQYVDDILLAATSELDCQQGTRALLQTLGDLGYRASAKKAQICQKQVKYLGYLLREGQRWLTEARKETVMGQPVPKTPRQLREFLGKAGFCRLFIPGFAEMAAPLYPLTKPGTLFSWGPDQQKAYQEIKQALLTAPALGLPDLTKPFELFVDEKQGYAKGVLTQKLGPWRRPVAYLSKKLDPVAAGWPPCLRMVAAIAVLTKDAGKLTMGQPLVILAPHAVEALVKQPPDRWLSNARMTHYQAMLLDTDRVQFGPVVALNPATLLPLPEEGAPHDCLEILAETHGTRPDLTDQPIPDADHTWYTDGSSFLQEGQRKAGAAVTTETEVIWAGALPAGTSAQRAELIALTQALKMAEGKRLNVYTDSRYAFATAHIHGEIYRRRGWLTSEGREIKNKSEILALLKALFLPKRLSIIHCLGHQKGDSAEARGNRLADQAAREAAIKTPPDTSTLLIAGKRTADGSEFEKRTADGSEFESPKKKAKVE

SEQ ID NO: 2161 - protein, 2096 aa, synthetic construct
MPAAKRVKLDGGDKKYSIGLDIGTNSVGWAVITDEYKVPSKKFKVLGNTDRHSIKKNLIGALLFDSGETAEATRLKRTARRRYTRRKNRICYLQEIFSNEMAKVDDSFFHRLEESFLVEEDKKHERHPIFGNIVDEVAYHEKYPTIYHLRKKLVDSTDKADLRLIYLALAHMIKFRGHFLIEGDLNPDNSDVDKLFIQLVQTYNQLFEENPINASGVDAKAILSARLSKSRRLENLIAQLPGEKKNGLFGNLIALSLGLTPNFKSNFDLAEDAKLQLSKDTYDDDLDNLLAQIGDQYADLFLAAKNLSDAILLSDILRVNTEITKAPLSASMIKRYDEHHQDLTLLKALVRQQLPEKYKEIFFDQSKNGYAGYIDGGASQEEFYKFIKPILEKMDGTEELLVKLNREDLLRKQRTFDNGSIPHQIHLGELHAILRRQEDFYPFLKDNREKIEKILTFRIPYYVGPLARGNSRFAWMTRKSEETITPWNFEEVVDKGASAQSFIERMTNFDKNLPNEKVLPKHSLLYEYFTVYNELTKVKYVTEGMRKPAFLSGEQKKAIVDLLFKTNRKVTVKQLKEDYFKKIECFDSVEISGVEDRFNASLGTYHDLLKIIKDKDFLDNEENEDILEDIVLTLTLFEDREMIEERLKTYAHLFDDKVMKQLKRRRYTGWGRLSRKLINGIRDKQSGKTILDFLKSDGFANRNFMQLIHDDSLTFKEDIQKAQVSGQGDSLHEHIANLAGSPAIKKGILQTVKVVDELVKVMGRHKPENIVIEMARENQTTQKGQKNSRERMKRIEEGIKELGSQILKEHPVENTQLQNEKLYLYYLQNGRDMYVDQELDINRLSDYDVDHIVPQSFLKDDSIDNKVLTRSDKARGKSDNVPSEEVVKKMKNYWRQLLNAKLITQRKFDNLTKAERGGLSELDKAGFIKRQLVETRQITKHVAQILDSRMNTKYDENDKLIREVKVITLKSKLVSDFRKDFQFYKVREINNYHHAHDAYLNAVVGTALIKKYPKLESEFVYGDYKVYDVRKMIAKSEQEIGKATAKYFFYSNIMNFFKTEITLANGEIRKRPLIETNGETGEIVWDKGRDFATVRKVLSMPQVNIVKKTEVQTGGFSKESILPKRNSDKLIARKKDWDPKKYGGFDSPTVAYSVLVVAKVEKGKSKKLKSVKELLGITIMERSSFEKNPIDFLEAKGYKEVKKDLIIKLPKYSLFELENGRKRMLASAGELQKGNELALPSKYVNFLYLASHYEKLKGSPEDNEQKQLFVEQHKHYLDEIIEQISEFSKRVILADANLDKVLSAYNKHRDKPIREQAENIIHLFTLTNLGAPAAFKYFDTTIDRKRYTSTKEVLDATLIHQSITGLYETRIDLSQLGGDGGEAAAKGGGGGSGGLGIEDEYRLHETSTEPDVSLGSTWLSDFPQAWAETGGMGLAVRQAPLIIPLKATSTPVSIQQYPMSHEARLGIKPHIQRLLDQGILVPCQSPWNTPLLPVKKPGTNDYRPVQDLREVNKRVEDIHPTVPNPYNLLSGLPPSHQWYTVLDLKDAFFCLRLHPTSQPLFAFEWRDPGMGISGQLTWTRLPQGFKNSPTLFNEALHRDLADFRIQHPDLILLQYVDDILLAATSELDCQQGTRALLQTLGDLGYRASAKKAQICQKQVKYLGYLLREGQRWLTEARKETVMGQPVPKTPRQLREFLGKAGFCRLFIPGFAEMAAPLYPLTKPGTLFSWGPDQQKAYQEIKQALLTAPALGLPDLTKPFELFVDEKQGYAKGVLTQKLGPWRRPVAYLSKKLDPVAAGWPPCLRMVAAIAVLTKDAGKLTMGQPLVILAPHAVEALVKQPPDRWLSNARMTHYQAMLLDTDRVQFGPVVALNPATLLPLPEEGAPHDCLEILAETHGTRPDLTDQPIPDADHTWYTDGSSFLQEGQRKAGAAVTTETEVIWAGALPAGTSAQRAELIALTQALKMAEGKRLNVYTDSRYAFATAHIHGEIYRRRGWLTSEGREIKNKSEILALLKALFLPKRLSIIHCLGHQKGDSAEARGNRLADQAAREAAIKTPPDTSTLLIAGKRTADGSEFEKRTADGSEFESPKKKAKVE

SEQ ID NO: 2162 - protein, 2091 aa, synthetic construct
MPAAKRVKLDGGDKKYSIGLDIGTNSVGWAVITDEYKVPSKKFKVLGNTDRHSIKKNLIGALLFDSGETAEATRLKRTARRRYTRRKNRICYLQEIFSNEMAKVDDSFFHRLEESFLVEEDKKHERHPIFGNIVDEVAYHEKYPTIYHLRKKLVDSTDKADLRLIYLALAHMIKFRGHFLIEGDLNPDNSDVDKLFIQLVQTYNQLFEENPINASGVDAKAILSARLSKSRRLENLIAQLPGEKKNGLFGNLIALSLGLTPNFKSNFDLAEDAKLQLSKDTYDDDLDNLLAQIGDQYADLFLAAKNLSDAILLSDILRVNTEITKAPLSASMIKRYDEHHQDLTLLKALVRQQLPEKYKEIFFDQSKNGYAGYIDGGASQEEFYKFIKPILEKMDGTEELLVKLNREDLLRKQRTFDNGSIPHQIHLGELHAILRRQEDFYPFLKDNREKIEKILTFRIPYYVGPLARGNSRFAWMTRKSEETITPWNFEEVVDKGASAQSFIERMTNFDKNLPNEKVLPKHSLLYEYFTVYNELTKVKYVTEGMRKPAFLSGEQKKAIVDLLFKTNRKVTVKQLKEDYFKKIECFDSVEISGVEDRFNASLGTYHDLLKIIKDKDFLDNEENEDILEDIVLTLTLFEDREMIEERLKTYAHLFDDKVMKQLKRRRYTGWGRLSRKLINGIRDKQSGKTILDFLKSDGFANRNFMQLIHDDSLTFKEDIQKAQVSGQGDSLHEHIANLAGSPAIKKGILQTVKVVDELVKVMGRHKPENIVIEMARENQTTQKGQKNSRERMKRIEEGIKELGSQILKEHPVENTQLQNEKLYLYYLQNGRDMYVDQELDINRLSDYDVDHIVPQSFLKDDSIDNKVLTRSDKARGKSDNVPSEEVVKKMKNYWRQLLNAKLITQRKFDNLTKAERGGLSELDKAGFIKRQLVETRQITKHVAQILDSRMNTKYDENDKLIREVKVITLKSKLVSDFRKDFQFYKVREINNYHHAHDAYLNAVVGTALIKKYPKLESEFVYGDYKVYDVRKMIAKSEQEIGKATAKYFFYSNIMNFFKTEITLANGEIRKRPLIETNGETGEIVWDKGRDFATVRKVLSMPQVNIVKKTEVQTGGFSKESILPKRNSDKLIARKKDWDPKKYGGFDSPTVAYSVLVVAKVEKGKSKKLKSVKELLGITIMERSSFEKNPIDFLEAKGYKEVKKDLIIKLPKYSLFELENGRKRMLASAGELQKGNELALPSKYVNFLYLASHYEKLKGSPEDNEQKQLFVEQHKHYLDEIIEQISEFSKRVILADANLDKVLSAYNKHRDKPIREQAENIIHLFTLTNLGAPAAFKYFDTTIDRKRYTSTKEVLDATLIHQSITGLYETRIDLSQLGGDGGPAPGGSGGLGIEDEYRLHETSTEPDVSLGSTWLSDFPQAWAETGGMGLAVRQAPLIIPLKATSTPVSIQQYPMSHEARLGIKPHIQRLLDQGILVPCQSPWNTPLLPVKKPGTNDYRPVQDLREVNKRVEDIHPTVPNPYNLLSGLPPSHQWYTVLDLKDAFFCLRLHPTSQPLFAFEWRDPGMGISGQLTWTRLPQGFKNSPTLFNEALHRDLADFRIQHPDLILLQYVDDILLAATSELDCQQGTRALLQTLGDLGYRASAKKAQICQKQVKYLGYLLREGQRWLTEARKETVMGQPVPKTPRQLREFLGKAGFCRLFIPGFAEMAAPLYPLTKPGTLFSWGPDQQKAYQEIKQALLTAPALGLPDLTKPFELFVDEKQGYAKGVLTQKLGPWRRPVAYLSKKLDPVAAGWPPCLRMVAAIAVLTKDAGKLTMGQPLVILAPHAVEALVKQPPDRWLSNARMTHYQAMLLDTDRVQFGPVVALNPATLLPLPEEGAPHDCLEILAETHGTRPDLTDQPIPDADHTWYTDGSSFLQEGQRKAGAAVTTETEVIWAGALPAGTSAQRAELIALTQALKMAEGKRLNVYTDSRYAFATAHIHGEIYRRRGWLTSEGREIKNKSEILALLKALFLPKRLSIIHCLGHQKGDSAEARGNRLADQAAREAAIKTPPDTSTLLIAGKRTADGSEFEKRTADGSEFESPKKKAKVE

SEQ ID NO: 2163 - protein, 2096 aa, synthetic construct
MPAAKRVKLDGGDKKYSIGLDIGTNSVGWAVITDEYKVPSKKFKVLGNTDRHSIKKNLIGALLFDSGETAEATRLKRTARRRYTRRKNRICYLQEIFSNEMAKVDDSFFHRLEESFLVEEDKKHERHPIFGNIVDEVAYHEKYPTIYHLRKKLVDSTDKADLRLIYLALAHMIKFRGHFLIEGDLNPDNSDVDKLFIQLVQTYNQLFEENPINASGVDAKAILSARLSKSRRLENLIAQLPGEKKNGLFGNLIALSLGLTPNFKSNFDLAEDAKLQLSKDTYDDDLDNLLAQIGDQYADLFLAAKNLSDAILLSDILRVNTEITKAPLSASMIKRYDEHHQDLTLLKALVRQQLPEKYKEIFFDQSKNGYAGYIDGGASQEEFYKFIKPILEKMDGTEELLVKLNREDLLRKQRTFDNGSIPHQIHLGELHAILRRQEDFYPFLKDNREKIEKILTFRIPYYVGPLARGNSRFAWMTRKSEETITPWNFEEVVDKGASAQSFIERMTNFDKNLPNEKVLPKHSLLYEYFTVYNELTKVKYVTEGMRKPAFLSGEQKKAIVDLLFKTNRKVTVKQLKEDYFKKIECFDSVEISGVEDRFNASLGTYHDLLKIIKDKDFLDNEENEDILEDIVLTLTLFEDREMIEERLKTYAHLFDDKVMKQLKRRRYTGWGRLSRKLINGIRDKQSGKTILDFLKSDGFANRNFMQLIHDDSLTFKEDIQKAQVSGQGDSLHEHIANLAGSPAIKKGILQTVKVVDELVKVMGRHKPENIVIEMARENQTTQKGQKNSRERMKRIEEGIKELGSQILKEHPVENTQLQNEKLYLYYLQNGRDMYVDQELDINRLSDYDVDHIVPQSFLKDDSIDNKVLTRSDKARGKSDNVPSEEVVKKMKNYWRQLLNAKLITQRKFDNLTKAERGGLSELDKAGFIKRQLVETRQITKHVAQILDSRMNTKYDENDKLIREVKVITLKSKLVSDFRKDFQFYKVREINNYHHAHDAYLNAVVGTALIKKYPKLESEFVYGDYKVYDVRKMIAKSEQEIGKATAKYFFYSNIMNFFKTEITLANGEIRKRPLIETNGETGEIVWDKGRDFATVRKVLSMPQVNIVKKTEVQTGGFSKESILPKRNSDKLIARKKDWDPKKYGGFDSPTVAYSVLVVAKVEKGKSKKLKSVKELLGITIMERSSFEKNPIDFLEAKGYKEVKKDLIIKLPKYSLFELENGRKRMLASAGELQKGNELALPSKYVNFLYLASHYEKLKGSPEDNEQKQLFVEQHKHYLDEIIEQISEFSKRVILADANLDKVLSAYNKHRDKPIREQAENIIHLFTLTNLGAPAAFKYFDTTIDRKRYTSTKEVLDATLIHQSITGLYETRIDLSQLGGDGGEAAAKPAPGSSGGLGIEDEYRLHETSTEPDVSLGSTWLSDFPQAWAETGGMGLAVRQAPLIIPLKATSTPVSIQQYPMSHEARLGIKPHIQRLLDQGILVPCQSPWNTPLLPVKKPGTNDYRPVQDLREVNKRVEDIHPTVPNPYNLLSGLPPSHQWYTVLDLKDAFFCLRLHPTSQPLFAFEWRDPGMGISGQLTWTRLPQGFKNSPTLFNEALHRDLADFRIQHPDLILLQYVDDILLAATSELDCQQGTRALLQTLGDLGYRASAKKAQICQKQVKYLGYLLREGQRWLTEARKETVMGQPVPKTPRQLREFLGKAGFCRLFIPGFAEMAAPLYPLTKPGTLFSWGPDQQKAYQEIKQALLTAPALGLPDLTKPFELFVDEKQGYAKGVLTQKLGPWRRPVAYLSKKLDPVAAGWPPCLRMVAAIAVLTKDAGKLTMGQPLVILAPHAVEALVKQPPDRWLSNARMTHYQAMLLDTDRVQFGPVVALNPATLLPLPEEGAPHDCLEILAETHGTRPDLTDQPIPDADHTWYTDGSSFLQEGQRKAGAAVTTETEVIWAGALPAGTSAQRAELIALTQALKMAEGKRLNVYTDSRYAFATAHIHGEIYRRRGWLTSEGREIKNKSEILALLKALFLPKRLSIIHCLGHQKGDSAEARGNRLADQAAREAAIKTPPDTSTLLIAGKRTADGSEFEKRTADGSEFESPKKKAKVE

SEQ ID NO: 2164 - protein, 2100 aa, synthetic construct
MPAAKRVKLDGGDKKYSIGLDIGTNSVGWAVITDEYKVPSKKFKVLGNTDRHSIKKNLIGALLFDSGETAEATRLKRTARRRYTRRKNRICYLQEIFSNEMAKVDDSFFHRLEESFLVEEDKKHERHPIFGNIVDEVAYHEKYPTIYHLRKKLVDSTDKADLRLIYLALAHMIKFRGHFLIEGDLNPDNSDVDKLFIQLVQTYNQLFEENPINASGVDAKAILSARLSKSRRLENLIAQLPGEKKNGLFGNLIALSLGLTPNFKSNFDLAEDAKLQLSKDTYDDDLDNLLAQIGDQYADLFLAAKNLSDAILLSDILRVNTEITKAPLSASMIKRYDEHHQDLTLLKALVRQQLPEKYKEIFFDQSKNGYAGYIDGGASQEEFYKFIKPILEKMDGTEELLVKLNREDLLRKQRTFDNGSIPHQIHLGELHAILRRQEDFYPFLKDNREKIEKILTFRIPYYVGPLARGNSRFAWMTRKSEETITPWNFEEVVDKGASAQSFIERMTNFDKNLPNEKVLPKHSLLYEYFTVYNELTKVKYVTEGMRKPAFLSGEQKKAIVDLLFKTNRKVTVKQLKEDYFKKIECFDSVEISGVEDRFNASLGTYHDLLKIIKDKDFLDNEENEDILEDIVLTLTLFEDREMIEERLKTYAHLFDDKVMKQLKRRRYTGWGRLSRKLINGIRDKQSGKTILDFLKSDGFANRNFMQLIHDDSLTFKEDIQKAQVSGQGDSLHEHIANLAGSPAIKKGILQTVKVVDELVKVMGRHKPENIVIEMARENQTTQKGQKNSRERMKRIEEGIKELGSQILKEHPVENTQLQNEKLYLYYLQNGRDMYVDQELDINRLSDYDVDHIVPQSFLKDDSIDNKVLTRSDKARGKSDNVPSEEVVKKMKNYWRQLLNAKLITQRKFDNLTKAERGGLSELDKAGFIKRQLVETRQITKHVAQILDSRMNTKYDENDKLIREVKVITLKSKLVSDFRKDFQFYKVREINNYHHAHDAYLNAVVGTALIKKYPKLESEFVYGDYKVYDVRKMIAKSEQEIGKATAKYFFYSNIMNFFKTEITLANGEIRKRPLIETNGETGEIVWDKGRDFATVRKVLSMPQVNIVKKTEVQTGGFSKESILPKRNSDKLIARKKDWDPKKYGGFDSPTVAYSVLVVAKVEKGKSKKLKSVKELLGITIMERSSFEKNPIDFLEAKGYKEVKKDLIIKLPKYSLFELENGRKRMLASAGELQKGNELALPSKYVNFLYLASHYEKLKGSPEDNEQKQLFVEQHKHYLDEIIEQISEFSKRVILADANLDKVLSAYNKHRDKPIREQAENIIHLFTLTNLGAPAAFKYFDTTIDRKRYTSTKEVLDATLIHQSITGLYETRIDLSQLGGDGGGSSGSSGSSGSSGSSGGLGIEDEYRLHETSTEPDVSLGSTWLSDFPQAWAETGGMGLAVRQAPLIIPLKATSTPVSIQQYPMSHEARLGIKPHIQRLLDQGILVPCQSPWNTPLLPVKKPGTNDYRPVQDLREVNKRVEDIHPTVPNPYNLLSGLPPSHQWYTVLDLKDAFFCLRLHPTSQPLFAFEWRDPGMGISGQLTWTRLPQGFKNSPTLFNEALHRDLADFRIQHPDLILLQYVDDILLAATSELDCQQGTRALLQTLGDLGYRASAKKAQICQKQVKYLGYLLREGQRWLTEARKETVMGQPVPKTPRQLREFLGKAGFCRLFIPGFAEMAAPLYPLTKPGTLFSWGPDQQKAYQEIKQALLTAPALGLPDLTKPFELFVDEKQGYAKGVLTQKLGPWRRPVAYLSKKLDPVAAGWPPCLRMVAAIAVLTKDAGKLTMGQPLVILAPHAVEALVKQPPDRWLSNARMTHYQAMLLDTDRVQFGPVVALNPATLLPLPEEGAPHDCLEILAETHGTRPDLTDQPIPDADHTWYTDGSSFLQEGQRKAGAAVTTETEVIWAGALPAGTSAQRAELIALTQALKMAEGKRLNVYTDSRYAFATAHIHGEIYRRRGWLTSEGREIKNKSEILALLKALFLPKRLSIIHCLGHQKGDSAEARGNRLADQAAREAAIKTPPDTSTLLIAGKRTADGSEFEKRTADGSEFESPKKKAKVE

SEQ ID NO: 2165 - protein, 2094 aa, synthetic construct
MPAAKRVKLDGGDKKYSIGLDIGTNSVGWAVITDEYKVPSKKFKVLGNTDRHSIKKNLIGALLFDSGETAEATRLKRTARRRYTRRKNRICYLQEIFSNEMAKVDDSFFHRLEESFLVEEDKKHERHPIFGNIVDEVAYHEKYPTIYHLRKKLVDSTDKADLRLIYLALAHMIKFRGHFLIEGDLNPDNSDVDKLFIQLVQTYNQLFEENPINASGVDAKAILSARLSKSRRLENLIAQLPGEKKNGLFGNLIALSLGLTPNFKSNFDLAEDAKLQLSKDTYDDDLDNLLAQIGDQYADLFLAAKNLSDAILLSDILRVNTEITKAPLSASMIKRYDEHHQDLTLLKALVRQQLPEKYKEIFFDQSKNGYAGYIDGGASQEEFYKFIKPILEKMDGTEELLVKLNREDLLRKQRTFDNGSIPHQIHLGELHAILRRQEDFYPFLKDNREKIEKILTFRIPYYVGPLARGNSRFAWMTRKSEETITPWNFEEVVDKGASAQSFIERMTNFDKNLPNEKVLPKHSLLYEYFTVYNELTKVKYVTEGMRKPAFLSGEQKKAIVDLLFKTNRKVTVKQLKEDYFKKIECFDSVEISGVEDRFNASLGTYHDLLKIIKDKDFLDNEENEDILEDIVLTLTLFEDREMIEERLKTYAHLFDDKVMKQLKRRRYTGWGRLSRKLINGIRDKQSGKTILDFLKSDGFANRNFMQLIHDDSLTFKEDIQKAQVSGQGDSLHEHIANLAGSPAIKKGILQTVKVVDELVKVMGRHKPENIVIEMARENQTTQKGQKNSRERMKRIEEGIKELGSQILKEHPVENTQLQNEKLYLYYLQNGRDMYVDQELDINRLSDYDVDHIVPQSFLKDDSIDNKVLTRSDKARGKSDNVPSEEVVKKMKNYWRQLLNAKLITQRKFDNLTKAERGGLSELDKAGFIKRQLVETRQITKHVAQILDSRMNTKYDENDKLIREVKVITLKSKLVSDFRKDFQFYKVREINNYHHAHDAYLNAVVGTALIKKYPKLESEFVYGDYKVYDVRKMIAKSEQEIGKATAKYFFYSNIMNFFKTEITLANGEIRKRPLIETNGETGEIVWDKGRDFATVRKVLSMPQVNIVKKTEVQTGGFSKESILPKRNSDKLIARKKDWDPKKYGGFDSPTVAYSVLVVAKVEKGKSKKLKSVKELLGITIMERSSFEKNPIDFLEAKGYKEVKKDLIIKLPKYSLFELENGRKRMLASAGELQKGNELALPSKYVNFLYLASHYEKLKGSPEDNEQKQLFVEQHKHYLDEIIEQISEFSKRVILADANLDKVLSAYNKHRDKPIREQAENIIHLFTLTNLGAPAAFKYFDTTIDRKRYTSTKEVLDATLIHQSITGLYETRIDLSQLGGDGGGSSGGSGGGGGLGIEDEYRLHETSTEPDVSLGSTWLSDFPQAWAETGGMGLAVRQAPLIIPLKATSTPVSIQQYPMSHEARLGIKPHIQRLLDQGILVPCQSPWNTPLLPVKKPGTNDYRPVQDLREVNKRVEDIHPTVPNPYNLLSGLPPSHQWYTVLDLKDAFFCLRLHPTSQPLFAFEWRDPGMGISGQLTWTRLPQGFKNSPTLFNEALHRDLADFRIQHPDLILLQYVDDILLAATSELDCQQGTRALLQTLGDLGYRASAKKAQICQKQVKYLGYLLREGQRWLTEARKETVMGQPVPKTPRQLREFLGKAGFCRLFIPGFAEMAAPLYPLTKPGTLFSWGPDQQKAYQEIKQALLTAPALGLPDLTKPFELFVDEKQGYAKGVLTQKLGPWRRPVAYLSKKLDPVAAGWPPCLRMVAAIAVLTKDAGKLTMGQPLVILAPHAVEALVKQPPDRWLSNARMTHYQAMLLDTDRVQFGPVVALNPATLLPLPEEGAPHDCLEILAETHGTRPDLTDQPIPDADHTWYTDGSSFLQEGQRKAGAAVTTETEVIWAGALPAGTSAQRAELIALTQALKMAEGKRLNVYTDSRYAFATAHIHGEIYRRRGWLTSEGREIKNKSEILALLKALFLPKRLSIIHCLGHQKGDSAEARGNRLADQAAREAAIKTPPDTSTLLIAGKRTADGSEFEKRTADGSEFESPKKKAKVE

SEQ ID NO: 2166 - protein, 2094 aa, synthetic construct; identical to SEQ ID NO: 2051

SEQ ID NO: 2167 - protein, 2092 aa, synthetic construct
MPAAKRVKLDGGDKKYSIGLDIGTNSVGWAVITDEYKVPSKKFKVLGNTDRHSIKKNLIGALLFDSGETAEATRLKRTARRRYTRRKNRICYLQEIFSNEMAKVDDSFFHRLEESFLVEEDKKHERHPIFGNIVDEVAYHEKYPTIYHLRKKLVDSTDKADLRLIYLALAHMIKFRGHFLIEGDLNPDNSDVDKLFIQLVQTYNQLFEENPINASGVDAKAILSARLSKSRRLENLIAQLPGEKKNGLFGNLIALSLGLTPNFKSNFDLAEDAKLQLSKDTYDDDLDNLLAQIGDQYADLFLAAKNLSDAILLSDILRVNTEITKAPLSASMIKRYDEHHQDLTLLKALVRQQLPEKYKEIFFDQSKNGYAGYIDGGASQEEFYKFIKPILEKMDGTEELLVKLNREDLLRKQRTFDNGSIPHQIHLGELHAILRRQEDFYPFLKDNREKIEKILTFRIPYYVGPLARGNSRFAWMTRKSEETITPWNFEEVVDKGASAQSFIERMTNFDKNLPNEKVLPKHSLLYEYFTVYNELTKVKYVTEGMRKPAFLSGEQKKAIVDLLFKTNRKVTVKQLKEDYFKKIECFDSVEISGVEDRFNASLGTYHDLLKIIKDKDFLDNEENEDILEDIVLTLTLFEDREMIEERLKTYAHLFDDKVMKQLKRRRYTGWGRLSRKLINGIRDKQSGKTILDFLKSDGFANRNFMQLIHDDSLTFKEDIQKAQVSGQGDSLHEHIANLAGSPAIKKGILQTVKVVDELVKVMGRHKPENIVIEMARENQTTQKGQKNSRERMKRIEEGIKELGSQILKEHPVENTQLQNEKLYLYYLQNGRDMYVDQELDINRLSDYDVDHIVPQSFLKDDSIDNKVLTRSDKARGKSDNVPSEEVVKKMKNYWRQLLNAKLITQRKFDNLTKAERGGLSELDKAGFIKRQLVETRQITKHVAQILDSRMNTKYDENDKLIREVKVITLKSKLVSDFRKDFQFYKVREINNYHHAHDAYLNAVVGTALIKKYPKLESEFVYGDYKVYDVRKMIAKSEQEIGKATAKYFFYSNIMNFFKTEITLANGEIRKRPLIETNGETGEIVWDKGRDFATVRKVLSMPQVNIVKKTEVQTGGFSKESILPKRNSDKLIARKKDWDPKKYGGFDSPTVAYSVLVVAKVEKGKSKKLKSVKELLGITIMERSSFEKNPIDFLEAKGYKEVKKDLIIKLPKYSLFELENGRKRMLASAGELQKGNELALPSKYVNFLYLASHYEKLKGSPEDNEQKQLFVEQHKHYLDEIIEQISEFSKRVILADANLDKVLSAYNKHRDKPIREQAENIIHLFTLTNLGAPAAFKYFDTTIDRKRYTSTKEVLDATLIHQSITGLYETRIDLSQLGGDGGPAPAPAPGGLGIEDEYRLHETSTEPDVSLGSTWLSDFPQAWAETGGMGLAVRQAPLIIPLKATSTPVSIQQYPMSHEARLGIKPHIQRLLDQGILVPCQSPWNTPLLPVKKPGTNDYRPVQDLREVNKRVEDIHPTVPNPYNLLSGLPPSHQWYTVLDLKDAFFCLRLHPTSQPLFAFEWRDPGMGISGQLTWTRLPQGFKNSPTLFNEALHRDLADFRIQHPDLILLQYVDDILLAATSELDCQQGTRALLQTLGDLGYRASAKKAQICQKQVKYLGYLLREGQRWLTEARKETVMGQPVPKTPRQLREFLGKAGFCRLFIPGFAEMAAPLYPLTKPGTLFSWGPDQQKAYQEIKQALLTAPALGLPDLTKPFELFVDEKQGYAKGVLTQKLGPWRRPVAYLSKKLDPVAAGWPPCLRMVAAIAVLTKDAGKLTMGQPLVILAPHAVEALVKQPPDRWLSNARMTHYQAMLLDTDRVQFGPVVALNPATLLPLPEEGAPHDCLEILAETHGTRPDLTDQPIPDADHTWYTDGSSFLQEGQRKAGAAVTTETEVIWAGALPAGTSAQRAELIALTQALKMAEGKRLNVYTDSRYAFATAHIHGEIYRRRGWLTSEGREIKNKSEILALLKALFLPKRLSIIHCLGHQKGDSAEARGNRLADQAAREAAIKTPPDTSTLLIAGKRTADGSEFEKRTADGSEFESPKKKAKVE

SEQ ID NO: 2168 - protein, 2096 aa, synthetic construct
MPAAKRVKLDGGDKKYSIGLDIGTNSVGWAVITDEYKVPSKKFKVLGNTDRHSIKKNLIGALLFDSGETAEATRLKRTARRRYTRRKNRICYLQEIFSNEMAKVDDSFFHRLEESFLVEEDKKHERHPIFGNIVDEVAYHEKYPTIYHLRKKLVDSTDKADLRLIYLALAHMIKFRGHFLIEGDLNPDNSDVDKLFIQLVQTYNQLFEENPINASGVDAKAILSARLSKSRRLENLIAQLPGEKKNGLFGNLIALSLGLTPNFKSNFDLAEDAKLQLSKDTYDDDLDNLLAQIGDQYADLFLAAKNLSDAILLSDILRVNTEITKAPLSASMIKRYDEHHQDLTLLKALVRQQLPEKYKEIFFDQSKNGYAGYIDGGASQEEFYKFIKPILEKMDGTEELLVKLNREDLLRKQRTFDNGSIPHQIHLGELHAILRRQEDFYPFLKDNREKIEKILTFRIPYYVGPLARGNSRFAWMTRKSEETITPWNFEEVVDKGASAQSFIERMTNFDKNLPNEKVLPKHSLLYEYFTVYNELTKVKYVTEGMRKPAFLSGEQKKAIVDLLFKTNRKVTVKQLKEDYFKKIECFDSVEISGVEDRFNASLGTYHDLLKIIKDKDFLDNEENEDILEDIVLTLTLFEDREMIEERLKTYAHLFDDKVMKQLKRRRYTGWGRLSRKLINGIRDKQSGKTILDFLKSDGFANRNFMQLIHDDSLTFKEDIQKAQVSGQGDSLHEHIANLAGSPAIKKGILQTVKVVDELVKVMGRHKPENIVIEMARENQTTQKGQKNSRERMKRIEEGIKELGSQILKEHPVENTQLQNEKLYLYYLQNGRDMYVDQELDINRLSDYDVDHIVPQSFLKDDSIDNKVLTRSDKARGKSDNVPSEEVVKKMKNYWRQLLNAKLITQRKFDNLTKAERGGLSELDKAGFIKRQLVETRQITKHVAQILDSRMNTKYDENDKLIREVKVITLKSKLVSDFRKDFQFYKVREINNYHHAHDAYLNAVVGTALIKKYPKLESEFVYGDYKVYDVRKMIAKSEQEIGKATAKYFFYSNIMNFFKTEITLANGEIRKRPLIETNGETGEIVWDKGRDFATVRKVLSMPQVNIVKKTEVQTGGFSKESILPKRNSDKLIARKKDWDPKKYGGFDSPTVAYSVLVVAKVEKGKSKKLKSVKELLGITIMERSSFEKNPIDFLEAKGYKEVKKDLIIKLPKYSLFELENGRKRMLASAGELQKGNELALPSKYVNFLYLASHYEKLKGSPEDNEQKQLFVEQHKHYLDEIIEQISEFSKRVILADANLDKVLSAYNKHRDKPIREQAENIIHLFTLTNLGAPAAFKYFDTTIDRKRYTSTKEVLDATLIHQSITGLYETRIDLSQLGGDGGGGSEAAAKGSSGGLGIEDEYRLHETSTEPDVSLGSTWLSDFPQAWAETGGMGLAVRQAPLIIPLKATSTPVSIQQYPMSHEARLGIKPHIQRLLDQGILVPCQSPWNTPLLPVKKPGTNDYRPVQDLREVNKRVEDIHPTVPNPYNLLSGLPPSHQWYTVLDLKDAFFCLRLHPTSQPLFAFEWRDPGMGISGQLTWTRLPQGFKNSPTLFNEALHRDLADFRIQHPDLILLQYVDDILLAATSELDCQQGTRALLQTLGDLGYRASAKKAQICQKQVKYLGYLLREGQRWLTEARKETVMGQPVPKTPRQLREFLGKAGFCRLFIPGFAEMAAPLYPLTKPGTLFSWGPDQQKAYQEIKQALLTAPALGLPDLTKPFELFVDEKQGYAKGVLTQKLGPWRRPVAYLSKKLDPVAAGWPPCLRMVAAIAVLTKDAGKLTMGQPLVILAPHAVEALVKQPPDRWLSNARMTHYQAMLLDTDRVQFGPVVALNPATLLPLPEEGAPHDCLEILAETHGTRPDLTDQPIPDADHTWYTDGSSFLQEGQRKAGAAVTTETEVIWAGALPAGTSAQRAELIALTQALKMAEGKRLNVYTDSRYAFATAHIHGEIYRRRGWLTSEGREIKNKSEILALLKALFLPKRLSIIHCLGHQKGDSAEARGNRLADQAAREAAIKTPPDTSTLLIAGKRTADGSEFEKRTADGSEFESPKKKAKVE

SEQ ID NO: 2169 - protein, 2090 aa, synthetic construct
MPAAKRVKLDGGDKKYSIGLDIGTNSVGWAVITDEYKVPSKKFKVLGNTDRHSIKKNLIGALLFDSGETAEATRLKRTARRRYTRRKNRICYLQEIFSNEMAKVDDSFFHRLEESFLVEEDKKHERHPIFGNIVDEVAYHEKYPTIYHLRKKLVDSTDKADLRLIYLALAHMIKFRGHFLIEGDLNPDNSDVDKLFIQLVQTYNQLFEENPINASGVDAKAILSARLSKSRRLENLIAQLPGEKKNGLFGNLIALSLGLTPNFKSNFDLAEDAKLQLSKDTYDDDLDNLLAQIGDQYADLFLAAKNLSDAILLSDILRVNTEITKAPLSASMIKRYDEHHQDLTLLKALVRQQLPEKYKEIFFDQSKNGYAGYIDGGASQEEFYKFIKPILEKMDGTEELLVKLNREDLLRKQRTFDNGSIPHQIHLGELHAILRRQEDFYPFLKDNREKIEKILTFRIPYYVGPLARGNSRFAWMTRKSEETITPWNFEEVVDKGASAQSFIERMTNFDKNLPNEKVLPKHSLLYEYFTVYNELTKVKYVTEGMRKPAFLSGEQKKAIVDLLFKTNRKVTVKQLKEDYFKKIECFDSVEISGVEDRFNASLGTYHDLLKIIKDKDFLDNEENEDILEDIVLTLTLFEDREMIEERLKTYAHLFDDKVMKQLKRRRYTGWGRLSRKLINGIRDKQSGKTILDFLKSDGFANRNFMQLIHDDSLTFKEDIQKAQVSGQGDSLHEHIANLAGSPAIKKGILQTVKVVDELVKVMGRHKPENIVIEMARENQTTQKGQKNSRERMKRIEEGIKELGSQILKEHPVENTQLQNEKLYLYYLQNGRDMYVDQELDINRLSDYDVDHIVPQSFLKDDSIDNKVLTRSDKARGKSDNVPSEEVVKKMKNYWRQLLNAKLITQRKFDNLTKAERGGLSELDKAGFIKRQLVETRQITKHVAQILDSRMNTKYDENDKLIREVKVITLKSKLVSDFRKDFQFYKVREINNYHHAHDAYLNAVVGTALIKKYPKLESEFVYGDYKVYDVRKMIAKSEQEIGKATAKYFFYSNIMNFFKTEITLANGEIRKRPLIETNGETGEIVWDKGRDFATVRKVLSMPQVNIVKKTEVQTGGFSKESILPKRNSDKLIARKKDWDPKKYGGFDSPTVAYSVLVVAKVEKGKSKKLKSVKELLGITIMERSSFEKNPIDFLEAKGYKEVKKDLIIKLPKYSLFELENGRKRMLASAGELQKGNELALPSKYVNFLYLASHYEKLKGSPEDNEQKQLFVEQHKHYLDEIIEQISEFSKRVILADANLDKVLSAYNKHRDKPIREQAENIIHLFTLTNLGAPAAFKYFDTTIDRKRYTSTKEVLDATLIHQSITGLYETRIDLSQLGGDGGGGGGGGGLGIEDEYRLHETSTEPDVSLGSTWLSDFPQAWAETGGMGLAVRQAPLIIPLKATSTPVSIQQYPMSHEARLGIKPHIQRLLDQGILVPCQSPWNTPLLPVKKPGTNDYRPVQDLREVNKRVEDIHPTVPNPYNLLSGLPPSHQWYTVLDLKDAFFCLRLHPTSQPLFAFEWRDPGMGISGQLTWTRLPQGFKNSPTLFNEALHRDLADFRIQHPDLILLQYVDDILLAATSELDCQQGTRALLQTLGDLGYRASAKKAQICQKQVKYLGYLLREGQRWLTEARKETVMGQPVPKTPRQLREFLGKAGFCRLFIPGFAEMAAPLYPLTKPGTLFSWGPDQQKAYQEIKQALLTAPALGLPDLTKPFELFVDEKQGYAKGVLTQKLGPWRRPVAYLSKKLDPVAAGWPPCLRMVAAIAVLTKDAGKLTMGQPLVILAPHAVEALVKQPPDRWLSNARMTHYQAMLLDTDRVQFGPVVALNPATLLPLPEEGAPHDCLEILAETHGTRPDLTDQPIPDADHTWYTDGSSFLQEGQRKAGAAVTTETEVIWAGALPAGTSAQRAELIALTQALKMAEGKRLNVYTDSRYAFATAHIHGEIYRRRGWLTSEGREIKNKSEILALLKALFLPKRLSIIHCLGHQKGDSAEARGNRLADQAAREAAIKTPPDTSTLLIAGKRTADGSEFEKRTADGSEFESPKKKAKVE

SEQ ID NO: 2170 - protein, 2091 aa, synthetic construct
MPAAKRVKLDGGDKKYSIGLDIGTNSVGWAVITDEYKVPSKKFKVLGNTDRHSIKKNLIGALLFDSGETAEATRLKRTARRRYTRRKNRICYLQEIFSNEMAKVDDSFFHRLEESFLVEEDKKHERHPIFGNIVDEVAYHEKYPTIYHLRKKLVDSTDKADLRLIYLALAHMIKFRGHFLIEGDLNPDNSDVDKLFIQLVQTYNQLFEENPINASGVDAKAILSARLSKSRRLENLIAQLPGEKKNGLFGNLIALSLGLTPNFKSNFDLAEDAKLQLSKDTYDDDLDNLLAQIGDQYADLFLAAKNLSDAILLSDILRVNTEITKAPLSASMIKRYDEHHQDLTLLKALVRQQLPEKYKEIFFDQSKNGYAGYIDGGASQEEFYKFIKPILEKMDGTEELLVKLNREDLLRKQRTFDNGSIPHQIHLGELHAILRRQEDFYPFLKDNREKIEKILTFRIPYYVGPLARGNSRFAWMTRKSEETITPWNFEEVVDKGASAQSFIERMTNFDKNLPNEKVLPKHSLLYEYFTVYNELTKVKYVTEGMRKPAFLSGEQKKAIVDLLFKTNRKVTVKQLKEDYFKKIECFDSVEISGVEDRFNASLGTYHDLLKIIKDKDFLDNEENEDILEDIVLTLTLFEDREMIEERLKTYAHLFDDKVMKQLKRRRYTGWGRLSRKLINGIRDKQSGKTILDFLKSDGFANRNFMQLIHDDSLTFKEDIQKAQVSGQGDSLHEHIANLAGSPAIKKGILQTVKVVDELVKVMGRHKPENIVIEMARENQTTQKGQKNSRERMKRIEEGIKELGSQILKEHPVENTQLQNEKLYLYYLQNGRDMYVDQELDINRLSDYDVDHIVPQSFLKDDSIDNKVLTRSDKARGKSDNVPSEEVVKKMKNYWRQLLNAKLITQRKFDNLTKAERGGLSELDKAGFIKRQLVETRQITKHVAQILDSRMNTKYDENDKLIREVKVITLKSKLVSDFRKDFQFYKVREINNYHHAHDAYLNAVVGTALIKKYPKLESEFVYGDYKVYDVRKMIAKSEQEIGKATAKYFFYSNIMNFFKTEITLANGEIRKRPLIETNGETGEIVWDKGRDFATVRKVLSMPQVNIVKKTEVQTGGFSKESILPKRNSDKLIARKKDWDPKKYGGFDSPTVAYSVLVVAKVEKGKSKKLKSVKELLGITIMERSSFEKNPIDFLEAKGYKEVKKDLIIKLPKYSLFELENGRKRMLASAGELQKGNELALPSKYVNFLYLASHYEKLKGSPEDNEQKQLFVEQHKHYLDEIIEQISEFSKRVILADANLDKVLSAYNKHRDKPIREQAENIIHLFTLTNLGAPAAFKYFDTTIDRKRYTSTKEVLDATLIHQSITGLYETRIDLSQLGGDGGGSSGGGGGLGIEDEYRLHETSTEPDVSLGSTWLSDFPQAWAETGGMGLAVRQAPLIIPLKATSTPVSIQQYPMSHEARLGIKPHIQRLLDQGILVPCQSPWNTPLLPVKKPGTNDYRPVQDLREVNKRVEDIHPTVPNPYNLLSGLPPSHQWYTVLDLKDAFFCLRLHPTSQPLFAFEWRDPGMGISGQLTWTRLPQGFKNSPTLFNEALHRDLADFRIQHPDLILLQYVDDILLAATSELDCQQGTRALLQTLGDLGYRASAKKAQICQKQVKYLGYLLREGQRWLTEARKETVMGQPVPKTPRQLREFLGKAGFCRLFIPGFAEMAAPLYPLTKPGTLFSWGPDQQKAYQEIKQALLTAPALGLPDLTKPFELFVDEKQGYAKGVLTQKLGPWRRPVAYLSKKLDPVAAGWPPCLRMVAAIAVLTKDAGKLTMGQPLVILAPHAVEALVKQPPDRWLSNARMTHYQAMLLDTDRVQFGPVVALNPATLLPLPEEGAPHDCLEILAETHGTRPDLTDQPIPDADHTWYTDGSSFLQEGQRKAGAAVTTETEVIWAGALPAGTSAQRAELIALTQALKMAEGKRLNVYTDSRYAFATAHIHGEIYRRRGWLTSEGREIKNKSEILALLKALFLPKRLSIIHCLGHQKGDSAEARGNRLADQAAREAAIKTPPDTSTLLIAGKRTADGSEFEKRTADGSEFESPKKKAKVE

SEQ ID NO: 2171 - protein, 2091 aa, synthetic construct
MPAAKRVKLDGGDKKYSIGLDIGTNSVGWAVITDEYKVPSKKFKVLGNTDRHSIKKNLIGALLFDSGETAEATRLKRTARRRYTRRKNRICYLQEIFSNEMAKVDDSFFHRLEESFLVEEDKKHERHPIFGNIVDEVAYHEKYPTIYHLRKKLVDSTDKADLRLIYLALAHMIKFRGHFLIEGDLNPDNSDVDKLFIQLVQTYNQLFEENPINASGVDAKAILSARLSKSRRLENLIAQLPGEKKNGLFGNLIALSLGLTPNFKSNFDLAEDAKLQLSKDTYDDDLDNLLAQIGDQYADLFLAAKNLSDAILLSDILRVNTEITKAPLSASMIKRYDEHHQDLTLLKALVRQQLPEKYKEIFFDQSKNGYAGYIDGGASQEEFYKFIKPILEKMDGTEELLVKLNREDLLRKQRTFDNGSIPHQIHLGELHAILRRQEDFYPFLKDNREKIEKILTFRIPYYVGPLARGNSRFAWMTRKSEETITPWNFEEVVDKGASAQSFIERMTNFDKNLPNEKVLPKHSLLYEYFTVYNELTKVKYVTEGMRKPAFLSGEQKKAIVDLLFKTNRKVTVKQLKEDYFKKIECFDSVEISGVEDRFNASLGTYHDLLKIIKDKDFLDNEENEDILEDIVLTLTLFEDREMIEERLKTYAHLFDDKVMKQLKRRRYTGWGRLSRKLINGIRDKQSGKTILDFLKSDGFANRNFMQLIHDDSLTFKEDIQKAQVSGQGDSLHEHIANLAGSPAIKKGILQTVKVVDELVKVMGRHKPENIVIEMARENQTTQKGQKNSRERMKRIEEGIKELGSQILKEHPVENTQLQNEKLYLYYLQNGRDMYVDQELDINRLSDYDVDHIVPQSFLKDDSIDNKVLTRSDKARGKSDNVPSEEVVKKMKNYWRQLLNAKLITQRKFDNLTKAERGGLSELDKAGFIKRQLVETRQITKHVAQILDSRMNTKYDENDKLIREVKVITLKSKLVSDFRKDFQFYKVREINNYHHAHDAYLNAVVGTALIKKYPKLESEFVYGDYKVYDVRKMIAKSEQEIGKATAKYFFYSNIMNFFKTEITLANGEIRKRPLIETNGETGEIVWDKGRDFATVRKVLSMPQVNIVKKTEVQTGGFSKESILPKRNSDKLIARKKDWDPKKYGGFDSPTVAYSVLVVAKVEKGKSKKLKSVKELLGITIMERSSFEKNPIDFLEAKGYKEVKKDLIIKLPKYSLFELENGRKRMLASAGELQKGNELALPSKYVNFLYLASHYEKLKGSPEDNEQKQLFVEQHKHYLDEIIEQISEFSKRVILADANLDKVLSAYNKHRDKPIREQAENIIHLFTLTNLGAPAAFKYFDTTIDRKRYTSTKEVLDATLIHQSITGLYETRIDLSQLGGDGGGSSGGSGGLGIEDEYRLHETSTEPDVSLGSTWLSDFPQAWAETGGMGLAVRQAPLIIPLKATSTPVSIQQYPMSHEARLGIKPHIQRLLDQGILVPCQSPWNTPLLPVKKPGTNDYRPVQDLREVNKRVEDIHPTVPNPYNLLSGLPPSHQWYTVLDLKDAFFCLRLHPTSQPLFAFEWRDPGMGISGQLTWTRLPQGFKNSPTLFNEALHRDLADFRIQHPDLILLQYVDDILLAATSELDCQQGTRALLQTLGDLGYRASAKKAQICQKQVKYLGYLLREGQRWLTEARKETVMGQPVPKTPRQLREFLGKAGFCRLFIPGFAEMAAPLYPLTKPGTLFSWGPDQQKAYQEIKQALLTAPALGLPDLTKPFELFVDEKQGYAKGVLTQKLGPWRRPVAYLSKKLDPVAAGWPPCLRMVAAIAVLTKDAGKLTMGQPLVILAPHAVEALVKQPPDRWLSNARMTHYQAMLLDTDRVQFGPVVALNPATLLPLPEEGAPHDCLEILAETHGTRPDLTDQPIPDADHTWYTDGSSFLQEGQRKAGAAVTTETEVIWAGALPAGTSAQRAELIALTQALKMAEGKRLNVYTDSRYAFATAHIHGEIYRRRGWLTSEGREIKNKSEILALLKALFLPKRLSIIHCLGHQKGDSAEARGNRLADQAAREAAIKTPPDTSTLLIAGKRTADGSEFEKRTADGSEFESPKKKAKVE

SEQ ID NO: 2172 - protein, 2094 aa, synthetic construct
MPAAKRVKLDGGDKKYSIGLDIGTNSVGWAVITDEYKVPSKKFKVLGNTDRHSIKKNLIGALLFDSGETAEATRLKRTARRRYTRRKNRICYLQEIFSNEMAKVDDSFFHRLEESFLVEEDKKHERHPIFGNIVDEVAYHEKYPTIYHLRKKLVDSTDKADLRLIYLALAHMIKFRGHFLIEGDLNPDNSDVDKLFIQLVQTYNQLFEENPINASGVDAKAILSARLSKSRRLENLIAQLPGEKKNGLFGNLIALSLGLTPNFKSNFDLAEDAKLQLSKDTYDDDLDNLLAQIGDQYADLFLAAKNLSDAILLSDILRVNTEITKAPLSASMIKRYDEHHQDLTLLKALVRQQLPEKYKEIFFDQSKNGYAGYIDGGASQEEFYKFIKPILEKMDGTEELLVKLNREDLLRKQRTFDNGSIPHQIHLGELHAILRRQEDFYPFLKDNREKIEKILTFRIPYYVGPLARGNSRFAWMTRKSEETITPWNFEEVVDKGASAQSFIERMTNFDKNLPNEKVLPKHSLLYEYFTVYNELTKVKYVTEGMRKPAFLSGEQKKAIVDLLFKTNRKVTVKQLKEDYFKKIECFDSVEISGVEDRFNASLGTYHDLLKIIKDKDFLDNEENEDILEDIVLTLTLFEDREMIEERLKTYAHLFDDKVMKQLKRRRYTGWGRLSRKLINGIRDKQSGKTILDFLKSDGFANRNFMQLIHDDSLTFKEDIQKAQVSGQGDSLHEHIANLAGSPAIKKGILQTVKVVDELVKVMGRHKPENIVIEMARENQTTQKGQKNSRERMKRIEEGIKELGSQILKEHPVENTQLQNEKLYLYYLQNGRDMYVDQELDINRLSDYDVDHIVPQSFLKDDSIDNKVLTRSDKARGKSDNVPSEEVVKKMKNYWRQLLNAKLITQRKFDNLTKAERGGLSELDKAGFIKRQLVETRQITKHVAQILDSRMNTKYDENDKLIREVKVITLKSKLVSDFRKDFQFYKVREINNYHHAHDAYLNAVVGTALIKKYPKLESEFVYGDYKVYDVRKMIAKSEQEIGKATAKYFFYSNIMNFFKTEITLANGEIRKRPLIETNGETGEIVWDKGRDFATVRKVLSMPQVNIVKKTEVQTGGFSKESILPKRNSDKLIARKKDWDPKKYGGFDSPTVAYSVLVVAKVEKGKSKKLKSVKELLGITIMERSSFEKNPIDFLEAKGYKEVKKDLIIKLPKYSLFELENGRKRMLASAGELQKGNELALPSKYVNFLYLASHYEKLKGSPEDNEQKQLFVEQHKHYLDEIIEQISEFSKRVILADANLDKVLSAYNKHRDKPIREQAENIIHLFTLTNLGAPAAFKYFDTTIDRKRYTSTKEVLDATLIHQSITGLYETRIDLSQLGGDGGGGSGGGGSSGGLGIEDEYRLHETSTEPDVSLGSTWLSDFPQAWAETGGMGLAVRQAPLIIPLKATSTPVSIQQYPMSHEARLGIKPHIQRLLDQGILVPCQSPWNTPLLPVKKPGTNDYRPVQDLREVNKRVEDIHPTVPNPYNLLSGLPPSHQWYTVLDLKDAFFCLRLHPTSQPLFAFEWRDPGMGISGQLTWTRLPQGFKNSPTLFNEALHRDLADFRIQHPDLILLQYVDDILLAATSELDCQQGTRALLQTLGDLGYRASAKKAQICQKQVKYLGYLLREGQRWLTEARKETVMGQPVPKTPRQLREFLGKAGFCRLFIPGFAEMAAPLYPLTKPGTLFSWGPDQQKAYQEIKQALLTAPALGLPDLTKPFELFVDEKQGYAKGVLTQKLGPWRRPVAYLSKKLDPVAAGWPPCLRMVAAIAVLTKDAGKLTMGQPLVILAPHAVEALVKQPPDRWLSNARMTHYQAMLLDTDRVQFGPVVALNPATLLPLPEEGAPHDCLEILAETHGTRPDLTDQPIPDADHTWYTDGSSFLQEGQRKAGAAVTTETEVIWAGALPAGTSAQRAELIALTQALKMAEGKRLNVYTDSRYAFATAHIHGEIYRRRGWLTSEGREIKNKSEILALLKALFLPKRLSIIHCLGHQKGDSAEARGNRLADQAAREAAIKTPPDTSTLLIAGKRTADGSEFEKRTADGSEFESPKKKAKVE

SEQ ID NO: 2173 - protein, 2096 aa, synthetic construct
MPAAKRVKLDGGDKKYSIGLDIGTNSVGWAVITDEYKVPSKKFKVLGNTDRHSIKKNLIGALLFDSGETAEATRLKRTARRRYTRRKNRICYLQEIFSNEMAKVDDSFFHRLEESFLVEEDKKHERHPIFGNIVDEVAYHEKYPTIYHLRKKLVDSTDKADLRLIYLALAHMIKFRGHFLIEGDLNPDNSDVDKLFIQLVQTYNQLFEENPINASGVDAKAILSARLSKSRRLENLIAQLPGEKKNGLFGNLIALSLGLTPNFKSNFDLAEDAKLQLSKDTYDDDLDNLLAQIGDQYADLFLAAKNLSDAILLSDILRVNTEITKAPLSASMIKRYDEHHQDLTLLKALVRQQLPEKYKEIFFDQSKNGYAGYIDGGASQEEFYKFIKPILEKMDGTEELLVKLNREDLLRKQRTFDNGSIPHQIHLGELHAILRRQEDFYPFLKDNREKIEKILTFRIPYYVGPLARGNSRFAWMTRKSEETITPWNFEEVVDKGASAQSFIERMTNFDKNLPNEKVLPKHSLLYEYFTVYNELTKVKYVTEGMRKPAFLSGEQKKAIVDLLFKTNRKVTVKQLKEDYFKKIECFDSVEISGVEDRFNASLGTYHDLLKIIKDKDFLDNEENEDILEDIVLTLTLFEDREMIEERLKTYAHLFDDKVMKQLKRRRYTGWGRLSRKLINGIRDKQSGKTILDFLKSDGFANRNFMQLIHDDSLTFKEDIQKAQVSGQGDSLHEHIANLAGSPAIKKGILQTVKVVDELVKVMGRHKPENIVIEMARENQTTQKGQKNSRERMKRIEEGIKELGSQILKEHPVENTQLQNEKLYLYYLQNGRDMYVDQELDINRLSDYDVDHIVPQSFLKDDSIDNKVLTRSDKARGKSDNVPSEEVVKKMKNYWRQLLNAKLITQRKFDNLTKAERGGLSELDKAGFIKRQLVETRQITKHVAQILDSRMNTKYDENDKLIREVKVITLKSKLVSDFRKDFQFYKVREINNYHHAHDAYLNAVVGTALIKKYPKLESEFVYGDYKVYDVRKMIAKSEQEIGKATAKYFFYSNIMNFFKTEITLANGEIRKRPLIETNGETGEIVWDKGRDFATVRKVLSMPQVNIVKKTEVQTGGFSKESILPKRNSDKLIARKKDWDPKKYGGFDSPTVAYSVLVVAKVEKGKSKKLKSVKELLGITIMERSSFEKNPIDFLEAKGYKEVKKDLIIKLPKYSLFELENGRKRMLASAGELQKGNELALPSKYVNFLYLASHYEKLKGSPEDNEQKQLFVEQHKHYLDEIIEQISEFSKRVILADANLDKVLSAYNKHRDKPIREQAENIIHLFTLTNLGAPAAFKYFDTTIDRKRYTSTKEVLDATLIHQSITGLYETRIDLSQLGGDGGEAAAKGGGGSSGGLGIEDEYRLHETSTEPDVSLGSTWLSDFPQAWAETGGMGLAVRQAPLIIPLKATSTPVSIQQYPMSHEARLGIKPHIQRLLDQGILVPCQSPWNTPLLPVKKPGTNDYRPVQDLREVNKRVEDIHPTVPNPYNLLSGLPPSHQWYTVLDLKDAFFCLRLHPTSQPLFAFEWRDPGMGISGQLTWTRLPQGFKNSPTLFNEALHRDLADFRIQHPDLILLQYVDDILLAATSELDCQQGTRALLQTLGDLGYRASAKKAQICQKQVKYLGYLLREGQRWLTEARKETVMGQPVPKTPRQLREFLGKAGFCRLFIPGFAEMAAPLYPLTKPGTLFSWGPDQQKAYQEIKQALLTAPALGLPDLTKPFELFVDEKQGYAKGVLTQKLGPWRRPVAYLSKKLDPVAAGWPPCLRMVAAIAVLTKDAGKLTMGQPLVILAPHAVEALVKQPPDRWLSNARMTHYQAMLLDTDRVQFGPVVALNPATLLPLPEEGAPHDCLEILAETHGTRPDLTDQPIPDADHTWYTDGSSFLQEGQRKAGAAVTTETEVIWAGALPAGTSAQRAELIALTQALKMAEGKRLNVYTDSRYAFATAHIHGEIYRRRGWLTSEGREIKNKSEILALLKALFLPKRLSIIHCLGHQKGDSAEARGNRLADQAAREAAIKTPPDTSTLLIAGKRTADGSEFEKRTADGSEFESPKKKAKVE

SEQ ID NO: 2174 - protein, 2096 aa, synthetic construct
MPAAKRVKLDGGDKKYSIGLDIGTNSVGWAVITDEYKVPSKKFKVLGNTDRHSIKKNLIGALLFDSGETAEATRLKRTARRRYTRRKNRICYLQEIFSNEMAKVDDSFFHRLEESFLVEEDKKHERHPIFGNIVDEVAYHEKYPTIYHLRKKLVDSTDKADLRLIYLALAHMIKFRGHFLIEGDLNPDNSDVDKLFIQLVQTYNQLFEENPINASGVDAKAILSARLSKSRRLENLIAQLPGEKKNGLFGNLIALSLGLTPNFKSNFDLAEDAKLQLSKDTYDDDLDNLLAQIGDQYADLFLAAKNLSDAILLSDILRVNTEITKAPLSASMIKRYDEHHQDLTLLKALVRQQLPEKYKEIFFDQSKNGYAGYIDGGASQEEFYKFIKPILEKMDGTEELLVKLNREDLLRKQRTFDNGSIPHQIHLGELHAILRRQEDFYPFLKDNREKIEKILTFRIPYYVGPLARGNSRFAWMTRKSEETITPWNFEEVVDKGASAQSFIERMTNFDKNLPNEKVLPKHSLLYEYFTVYNELTKVKYVTEGMRKPAFLSGEQKKAIVDLLFKTNRKVTVKQLKEDYFKKIECFDSVEISGVEDRFNASLGTYHDLLKIIKDKDFLDNEENEDILEDIVLTLTLFEDREMIEERLKTYAHLFDDKVMKQLKRRRYTGWGRLSRKLINGIRDKQSGKTILDFLKSDGFANRNFMQLIHDDSLTFKEDIQKAQVSGQGDSLHEHIANLAGSPAIKKGILQTVKVVDELVKVMGRHKPENIVIEMARENQTTQKGQKNSRERMKRIEEGIKELGSQILKEHPVENTQLQNEKLYLYYLQNGRDMYVDQELDINRLSDYDVDHIVPQSFLKDDSIDNKVLTRSDKARGKSDNVPSEEVVKKMKNYWRQLLNAKLITQRKFDNLTKAERGGLSELDKAGFIKRQLVETRQITKHVAQILDSRMNTKYDENDKLIREVKVITLKSKLVSDFRKDFQFYKVREINNYHHAHDAYLNAVVGTALIKKYPKLESEFVYGDYKVYDVRKMIAKSEQEIGKATAKYFFYSNIMNFFKTEITLANGEIRKRPLIETNGETGEIVWDKGRDFATVRKVLSMPQVNIVKKTEVQTGGFSKESILPKRNSDKLIARKKDWDPKKYGGFDSPTVAYSVLVVAKVEKGKSKKLKSVKELLGITIMERSSFEKNPIDFLEAKGYKEVKKDLIIKLPKYSLFELENGRKRMLASAGELQKGNELALPSKYVNFLYLASHYEKLKGSPEDNEQKQLFVEQHKHYLDEIIEQISEFSKRVILADANLDKVLSAYNKHRDKPIREQAENIIHLFTLTNLGAPAAFKYFDTTIDRKRYTSTKEVLDATLIHQSITGLYETRIDLSQLGGDGGGGGEAAAKGSSGGLGIEDEYRLHETSTEPDVSLGSTWLSDFPQAWAETGGMGLAVRQAPLIIPLKATSTPVSIQQYPMSHEARLGIKPHIQRLLDQGILVPCQSPWNTPLLPVKKPGTNDYRPVQDLREVNKRVEDIHPTVPNPYNLLSGLPPSHQWYTVLDLKDAFFCLRLHPTSQPLFAFEWRDPGMGISGQLTWTRLPQGFKNSPTLFNEALHRDLADFRIQHPDLILLQYVDDILLAATSELDCQQGTRALLQTLGDLGYRASAKKAQICQKQVKYLGYLLREGQRWLTEARKETVMGQPVPKTPRQLREFLGKAGFCRLFIPGFAEMAAPLYPLTKPGTLFSWGPDQQKAYQEIKQALLTAPALGLPDLTKPFELFVDEKQGYAKGVLTQKLGPWRRPVAYLSKKLDPVAAGWPPCLRMVAAIAVLTKDAGKLTMGQPLVILAPHAVEALVKQPPDRWLSNARMTHYQAMLLDTDRVQFGPVVALNPATLLPLPEEGAPHDCLEILAETHGTRPDLTDQPIPDADHTWYTDGSSFLQEGQRKAGAAVTTETEVIWAGALPAGTSAQRAELIALTQALKMAEGKRLNVYTDSRYAFATAHIHGEIYRRRGWLTSEGREIKNKSEILALLKALFLPKRLSIIHCLGHQKGDSAEARGNRLADQAAREAAIKTPPDTSTLLIAGKRTADGSEFEKRTADGSEFESPKKKAKVE

SEQ ID NO: 2175 - protein, 2096 aa, synthetic construct
MPAAKRVKLDGGDKKYSIGLDIGTNSVGWAVITDEYKVPSKKFKVLGNTDRHSIKKNLIGALLFDSGETAEATRLKRTARRRYTRRKNRICYLQEIFSNEMAKVDDSFFHRLEESFLVEEDKKHERHPIFGNIVDEVAYHEKYPTIYHLRKKLVDSTDKADLRLIYLALAHMIKFRGHFLIEGDLNPDNSDVDKLFIQLVQTYNQLFEENPINASGVDAKAILSARLSKSRRLENLIAQLPGEKKNGLFGNLIALSLGLTPNFKSNFDLAEDAKLQLSKDTYDDDLDNLLAQIGDQYADLFLAAKNLSDAILLSDILRVNTEITKAPLSASMIKRYDEHHQDLTLLKALVRQQLPEKYKEIFFDQSKNGYAGYIDGGASQEEFYKFIKPILEKMDGTEELLVKLNREDLLRKQRTFDNGSIPHQIHLGELHAILRRQEDFYPFLKDNREKIEKILTFRIPYYVGPLARGNSRFAWMTRKSEETITPWNFEEVVDKGASAQSFIERMTNFDKNLPNEKVLPKHSLLYEYFTVYNELTKVKYVTEGMRKPAFLSGEQKKAIVDLLFKTNRKVTVKQLKEDYFKKIECFDSVEISGVEDRFNASLGTYHDLLKIIKDKDFLDNEENEDILEDIVLTLTLFEDREMIEERLKTYAHLFDDKVMKQLKRRRYTGWGRLSRKLINGIRDKQSGKTILDFLKSDGFANRNFMQLIHDDSLTFKEDIQKAQVSGQGDSLHEHIANLAGSPAIKKGILQTVKVVDELVKVMGRHKPENIVIEMARENQTTQKGQKNSRERMKRIEEGIKELGSQILKEHPVENTQLQNEKLYLYYLQNGRDMYVDQELDINRLSDYDVDHIVPQSFLKDDSIDNKVLTRSDKARGKSDNVPSEEVVKKMKNYWRQLLNAKLITQRKFDNLTKAERGGLSELDKAGFIKRQLVETRQITKHVAQILDSRMNTKYDENDKLIREVKVITLKSKLVSDFRKDFQFYKVREINNYHHAHDAYLNAVVGTALIKKYPKLESEFVYGDYKVYDVRKMIAKSEQEIGKATAKYFFYSNIMNFFKTEITLANGEIRKRPLIETNGETGEIVWDKGRDFATVRKVLSMPQVNIVKKTEVQTGGFSKESILPKRNSDKLIARKKDWDPKKYGGFDSPTVAYSVLVVAKVEKGKSKKLKSVKELLGITIMERSSFEKNPIDFLEAKGYKEVKKDLIIKLPKYSLFELENGRKRMLASAGELQKGNELALPSKYVNFLYLASHYEKLKGSPEDNEQKQLFVEQHKHYLDEIIEQISEFSKRVILADANLDKVLSAYNKHRDKPIREQAENIIHLFTLTNLGAPAAFKYFDTTIDRKRYTSTKEVLDATLIHQSITGLYETRIDLSQLGGDGGGGSGGGEAAAKGGLGIEDEYRLHETSTEPDVSLGSTWLSDFPQAWAETGGMGLAVRQAPLIIPLKATSTPVSIQQYPMSHEARLGIKPHIQRLLDQGILVPCQSPWNTPLLPVKKPGTNDYRPVQDLREVNKRVEDIHPTVPNPYNLLSGLPPSHQWYTVLDLKDAFFCLRLHPTSQPLFAFEWRDPGMGISGQLTWTRLPQGFKNSPTLFNEALHRDLADFRIQHPDLILLQYVDDILLAATSELDCQQGTRALLQTLGDLGYRASAKKAQICQKQVKYLGYLLREGQRWLTEARKETVMGQPVPKTPRQLREFLGKAGFCRLFIPGFAEMAAPLYPLTKPGTLFSWGPDQQKAYQEIKQALLTAPALGLPDLTKPFELFVDEKQGYAKGVLTQKLGPWRRPVAYLSKKLDPVAAGWPPCLRMVAAIAVLTKDAGKLTMGQPLVILAPHAVEALVKQPPDRWLSNARMTHYQAMLLDTDRVQFGPVVALNPATLLPLPEEGAPHDCLEILAETHGTRPDLTDQPIPDADHTWYTDGSSFLQEGQRKAGAAVTTETEVIWAGALPAGTSAQRAELIALTQALKMAEGKRLNVYTDSRYAFATAHIHGEIYRRRGWLTSEGREIKNKSEILALLKALFLPKRLSIIHCLGHQKGDSAEARGNRLADQAAREAAIKTPPDTSTLLIAGKRTADGSEFEKRTADGSEFESPKKKAKVE

SEQ ID NO: 2176 - protein, 2091 aa, synthetic construct
MPAAKRVKLDGGDKKYSIGLDIGTNSVGWAVITDEYKVPSKKFKVLGNTDRHSIKKNLIGALLFDSGETAEATRLKRTARRRYTRRKNRICYLQEIFSNEMAKVDDSFFHRLEESFLVEEDKKHERHPIFGNIVDEVAYHEKYPTIYHLRKKLVDSTDKADLRLIYLALAHMIKFRGHFLIEGDLNPDNSDVDKLFIQLVQTYNQLFEENPINASGVDAKAILSARLSKSRRLENLIAQLPGEKKNGLFGNLIALSLGLTPNFKSNFDLAEDAKLQLSKDTYDDDLDNLLAQIGDQYADLFLAAKNLSDAILLSDILRVNTEITKAPLSASMIKRYDEHHQDLTLLKALVRQQLPEKYKEIFFDQSKNGYAGYIDGGASQEEFYKFIKPILEKMDGTEELLVKLNREDLLRKQRTFDNGSIPHQIHLGELHAILRRQEDFYPFLKDNREKIEKILTFRIPYYVGPLARGNSRFAWMTRKSEETITPWNFEEVVDKGASAQSFIERMTNFDKNLPNEKVLPKHSLLYEYFTVYNELTKVKYVTEGMRKPAFLSGEQKKAIVDLLFKTNRKVTVKQLKEDYFKKIECFDSVEISGVEDRFNASLGTYHDLLKIIKDKDFLDNEENEDILEDIVLTLTLFEDREMIEERLKTYAHLFDDKVMKQLKRRRYTGWGRLSRKLINGIRDKQSGKTILDFLKSDGFANRNFMQLIHDDSLTFKEDIQKAQVSGQGDSLHEHIANLAGSPAIKKGILQTVKVVDELVKVMGRHKPENIVIEMARENQTTQKGQKNSRERMKRIEEGIKELGSQILKEHPVENTQLQNEKLYLYYLQNGRDMYVDQELDINRLSDYDVDHIVPQSFLKDDSIDNKVLTRSDKARGKSDNVPSEEVVKKMKNYWRQLLNAKLITQRKFDNLTKAERGGLSELDKAGFIKRQLVETRQITKHVAQILDSRMNTKYDENDKLIREVKVITLKSKLVSDFRKDFQFYKVREINNYHHAHDAYLNAVVGTALIKKYPKLESEFVYGDYKVYDVRKMIAKSEQEIGKATAKYFFYSNIMNFFKTEITLANGEIRKRPLIETNGETGEIVWDKGRDFATVRKVLSMPQVNIVKKTEVQTGGFSKESILPKRNSDKLIARKKDWDPKKYGGFDSPTVAYSVLVVAKVEKGKSKKLKSVKELLGITIMERSSFEKNPIDFLEAKGYKEVKKDLIIKLPKYSLFELENGRKRMLASAGELQKGNELALPSKYVNFLYLASHYEKLKGSPEDNEQKQLFVEQHKHYLDEIIEQISEFSKRVILADANLDKVLSAYNKHRDKPIREQAENIIHLFTLTNLGAPAAFKYFDTTIDRKRYTSTKEVLDATLIHQSITGLYETRIDLSQLGGDGGGSSGSSGGLGIEDEYRLHETSTEPDVSLGSTWLSDFPQAWAETGGMGLAVRQAPLIIPLKATSTPVSIQQYPMSHEARLGIKPHIQRLLDQGILVPCQSPWNTPLLPVKKPGTNDYRPVQDLREVNKRVEDIHPTVPNPYNLLSGLPPSHQWYTVLDLKDAFFCLRLHPTSQPLFAFEWRDPGMGISGQLTWTRLPQGFKNSPTLFNEALHRDLADFRIQHPDLILLQYVDDILLAATSELDCQQGTRALLQTLGDLGYRASAKKAQICQKQVKYLGYLLREGQRWLTEARKETVMGQPVPKTPRQLREFLGKAGFCRLFIPGFAEMAAPLYPLTKPGTLFSWGPDQQKAYQEIKQALLTAPALGLPDLTKPFELFVDEKQGYAKGVLTQKLGPWRRPVAYLSKKLDPVAAGWPPCLRMVAAIAVLTKDAGKLTMGQPLVILAPHAVEALVKQPPDRWLSNARMTHYQAMLLDTDRVQFGPVVALNPATLLPLPEEGAPHDCLEILAETHGTRPDLTDQPIPDADHTWYTDGSSFLQEGQRKAGAAVTTETEVIWAGALPAGTSAQRAELIALTQALKMAEGKRLNVYTDSRYAFATAHIHGEIYRRRGWLTSEGREIKNKSEILALLKALFLPKRLSIIHCLGHQKGDSAEARGNRLADQAAREAAIKTPPDTSTLLIAGKRTADGSEFEKRTADGSEFESPKKKAKVE

SEQ ID NO: 2177 - protein, 2096 aa, synthetic construct
MPAAKRVKLDGGDKKYSIGLDIGTNSVGWAVITDEYKVPSKKFKVLGNTDRHSIKKNLIGALLFDSGETAEATRLKRTARRRYTRRKNRICYLQEIFSNEMAKVDDSFFHRLEESFLVEEDKKHERHPIFGNIVDEVAYHEKYPTIYHLRKKLVDSTDKADLRLIYLALAHMIKFRGHFLIEGDLNPDNSDVDKLFIQLVQTYNQLFEENPINASGVDAKAILSARLSKSRRLENLIAQLPGEKKNGLFGNLIALSLGLTPNFKSNFDLAEDAKLQLSKDTYDDDLDNLLAQIGDQYADLFLAAKNLSDAILLSDILRVNTEITKAPLSASMIKRYDEHHQDLTLLKALVRQQLPEKYKEIFFDQSKNGYAGYIDGGASQEEFYKFIKPILEKMDGTEELLVKLNREDLLRKQRTFDNGSIPHQIHLGELHAILRRQEDFYPFLKDNREKIEKILTFRIPYYVGPLARGNSRFAWMTRKSEETITPWNFEEVVDKGASAQSFIERMTNFDKNLPNEKVLPKHSLLYEYFTVYNELTKVKYVTEGMRKPAFLSGEQKKAIVDLLFKTNRKVTVKQLKEDYFKKIECFDSVEISGVEDRFNASLGTYHDLLKIIKDKDFLDNEENEDILEDIVLTLTLFEDREMIEERLKTYAHLFDDKVMKQLKRRRYTGWGRLSRKLINGIRDKQSGKTILDFLKSDGFANRNFMQLIHDDSLTFKEDIQKAQVSGQGDSLHEHIANLAGSPAIKKGILQTVKVVDELVKVMGRHKPENIVIEMARENQTTQKGQKNSRERMKRIEEGIKELGSQILKEHPVENTQLQNEKLYLYYLQNGRDMYVDQELDINRLSDYDVDHIVPQSFLKDDSIDNKVLTRSDKARGKSDNVPSEEVVKKMKNYWRQLLNAKLITQRKFDNLTKAERGGLSELDKAGFIKRQLVETRQITKHVAQILDSRMNTKYDENDKLIREVKVITLKSKLVSDFRKDFQFYKVREINNYHHAHDAYLNAVVGTALIKKYPKLESEFVYGDYKVYDVRKMIAKSEQEIGKATAKYFFYSNIMNFFKTEITLANGEIRKRPLIETNGETGEIVWDKGRDFATVRKVLSMPQVNIVKKTEVQTGGFSKESILPKRNSDKLIARKKDWDPKKYGGFDSPTVAYSVLVVAKVEKGKSKKLKSVKELLGITIMERSSFEKNPIDFLEAKGYKEVKKDLIIKLPKYSLFELENGRKRMLASAGELQKGNELALPSKYVNFLYLASHYEKLKGSPEDNEQKQLFVEQHKHYLDEIIEQISEFSKRVILADANLDKVLSAYNKHRDKPIREQAENIIHLFTLTNLGAPAAFKYFDTTIDRKRYTSTKEVLDATLIHQSITGLYETRIDLSQLGGDGGGSSEAAAKGGSGGLGIEDEYRLHETSTEPDVSLGSTWLSDFPQAWAETGGMGLAVRQAPLIIPLKATSTPVSIQQYPMSHEARLGIKPHIQRLLDQGILVPCQSPWNTPLLPVKKPGTNDYRPVQDLREVNKRVEDIHPTVPNPYNLLSGLPPSHQWYTVLDLKDAFFCLRLHPTSQPLFAFEWRDPGMGISGQLTWTRLPQGFKNSPTLFNEALHRDLADFRIQHPDLILLQYVDDILLAATSELDCQQGTRALLQTLGDLGYRASAKKAQICQKQVKYLGYLLREGQRWLTEARKETVMGQPVPKTPRQLREFLGKAGFCRLFIPGFAEMAAPLYPLTKPGTLFSWGPDQQKAYQEIKQALLTAPALGLPDLTKPFELFVDEKQGYAKGVLTQKLGPWRRPVAYLSKKLDPVAAGWPPCLRMVAAIAVLTKDAGKLTMGQPLVILAPHAVEALVKQPPDRWLSNARMTHYQAMLLDTDRVQFGPVVALNPATLLPLPEEGAPHDCLEILAETHGTRPDLTDQPIPDADHTWYTDGSSFLQEGQRKAGAAVTTETEVIWAGALPAGTSAQRAELIALTQALKMAEGKRLNVYTDSRYAFATAHIHGEIYRRRGWLTSEGREIKNKSEILALLKALFLPKRLSIIHCLGHQKGDSAEARGNRLADQAAREAAIKTPPDTSTLLIAGKRTADGSEFEKRTADGSEFESPKKKAKVE

SEQ ID NO: 2178 - protein, 2096 aa, synthetic construct
MPAAKRVKLDGGDKKYSIGLDIGTNSVGWAVITDEYKVPSKKFKVLGNTDRHSIKKNLIGALLFDSGETAEATRLKRTARRRYTRRKNRICYLQEIFSNEMAKVDDSFFHRLEESFLVEEDKKHERHPIFGNIVDEVAYHEKYPTIYHLRKKLVDSTDKADLRLIYLALAHMIKFRGHFLIEGDLNPDNSDVDKLFIQLVQTYNQLFEENPINASGVDAKAILSARLSKSRRLENLIAQLPGEKKNGLFGNLIALSLGLTPNFKSNFDLAEDAKLQLSKDTYDDDLDNLLAQIGDQYADLFLAAKNLSDAILLSDILRVNTEITKAPLSASMIKRYDEHHQDLTLLKALVRQQLPEKYKEIFFDQSKNGYAGYIDGGASQEEFYKFIKPILEKMDGTEELLVKLNREDLLRKQRTFDNGSIPHQIHLGELHAILRRQEDFYPFLKDNREKIEKILTFRIPYYVGPLARGNSRFAWMTRKSEETITPWNFEEVVDKGASAQSFIERMTNFDKNLPNEKVLPKHSLLYEYFTVYNELTKVKYVTEGMRKPAFLSGEQKKAIVDLLFKTNRKVTVKQLKEDYFKKIECFDSVEISGVEDRFNASLGTYHDLLKIIKDKDFLDNEENEDILEDIVLTLTLFEDREMIEERLKTYAHLFDDKVMKQLKRRRYTGWGRLSRKLINGIRDKQSGKTILDFLKSDGFANRNFMQLIHDDSLTFKEDIQKAQVSGQGDSLHEHIANLAGSPAIKKGILQTVKVVDELVKVMGRHKPENIVIEMARENQTTQKGQKNSRERMKRIEEGIKELGSQILKEHPVENTQLQNEKLYLYYLQNGRDMYVDQELDINRLSDYDVDHIVPQSFLKDDSIDNKVLTRSDKARGKSDNVPSEEVVKKMKNYWRQLLNAKLITQRKFDNLTKAERGGLSELDKAGFIKRQLVETRQITKHVAQILDSRMNTKYDENDKLIREVKVITLKSKLVSDFRKDFQFYKVREINNYHHAHDAYLNAVVGTALIKKYPKLESEFVYGDYKVYDVRKMIAKSEQEIGKATAKYFFYSNIMNFFKTEITLANGEIRKRPLIETNGETGEIVWDKGRDFATVRKVLSMPQVNIVKKTEVQTGGFSKESILPKRNSDKLIARKKDWDPKKYGGFDSPTVAYSVLVVAKVEKGKSKKLKSVKELLGITIMERSSFEKNPIDFLEAKGYKEVKKDLIIKLPKYSLFELENGRKRMLASAGELQKGNELALPSKYVNFLYLASHYEKLKGSPEDNEQKQLFVEQHKHYLDEIIEQISEFSKRVILADANLDKVLSAYNKHRDKPIREQAENIIHLFTLTNLGAPAAFKYFDTTIDRKRYTSTKEVLDATLIHQSITGLYETRIDLSQLGGDGGPAPGGGEAAAKGGLGIEDEYRLHETSTEPDVSLGSTWLSDFPQAWAETGGMGLAVRQAPLIIPLKATSTPVSIQQYPMSHEARLGIKPHIQRLLDQGILVPCQSPWNTPLLPVKKPGTNDYRPVQDLREVNKRVEDIHPTVPNPYNLLSGLPPSHQWYTVLDLKDAFFCLRLHPTSQPLFAFEWRDPGMGISGQLTWTRLPQGFKNSPTLFNEALHRDLADFRIQHPDLILLQYVDDILLAATSELDCQQGTRALLQTLGDLGYRASAKKAQICQKQVKYLGYLLREGQRWLTEARKETVMGQPVPKTPRQLREFLGKAGFCRLFIPGFAEMAAPLYPLTKPGTLFSWGPDQQKAYQEIKQALLTAPALGLPDLTKPFELFVDEKQGYAKGVLTQKLGPWRRPVAYLSKKLDPVAAGWPPCLRMVAAIAVLTKDAGKLTMGQPLVILAPHAVEALVKQPPDRWLSNARMTHYQAMLLDTDRVQFGPVVALNPATLLPLPEEGAPHDCLEILAETHGTRPDLTDQPIPDADHTWYTDGSSFLQEGQRKAGAAVTTETEVIWAGALPAGTSAQRAELIALTQALKMAEGKRLNVYTDSRYAFATAHIHGEIYRRRGWLTSEGREIKNKSEILALLKALFLPKRLSIIHCLGHQKGDSAEARGNRLADQAAREAAIKTPPDTSTLLIAGKRTADGSEFEKRTADGSEFESPKKKAKVE

SEQ ID NO: 2179 - protein, 2091 aa, synthetic construct
MPAAKRVKLDGGDKKYSIGLDIGTNSVGWAVITDEYKVPSKKFKVLGNTDRHSIKKNLIGALLFDSGETAEATRLKRTARRRYTRRKNRICYLQEIFSNEMAKVDDSFFHRLEESFLVEEDKKHERHPIFGNIVDEVAYHEKYPTIYHLRKKLVDSTDKADLRLIYLALAHMIKFRGHFLIEGDLNPDNSDVDKLFIQLVQTYNQLFEENPINASGVDAKAILSARLSKSRRLENLIAQLPGEKKNGLFGNLIALSLGLTPNFKSNFDLAEDAKLQLSKDTYDDDLDNLLAQIGDQYADLFLAAKNLSDAILLSDILRVNTEITKAPLSASMIKRYDEHHQDLTLLKALVRQQLPEKYKEIFFDQSKNGYAGYIDGGASQEEFYKFIKPILEKMDGTEELLVKLNREDLLRKQRTFDNGSIPHQIHLGELHAILRRQEDFYPFLKDNREKIEKILTFRIPYYVGPLARGNSRFAWMTRKSEETITPWNFEEVVDKGASAQSFIERMTNFDKNLPNEKVLPKHSLLYEYFTVYNELTKVKYVTEGMRKPAFLSGEQKKAIVDLLFKTNRKVTVKQLKEDYFKKIECFDSVEISGVEDRFNASLGTYHDLLKIIKDKDFLDNEENEDILEDIVLTLTLFEDREMIEERLKTYAHLFDDKVMKQLKRRRYTGWGRLSRKLINGIRDKQSGKTILDFLKSDGFANRNFMQLIHDDSLTFKEDIQKAQVSGQGDSLHEHIANLAGSPAIKKGILQTVKVVDELVKVMGRHKPENIVIEMARENQTTQKGQKNSRERMKRIEEGIKELGSQILKEHPVENTQLQNEKLYLYYLQNGRDMYVDQELDINRLSDYDVDHIVPQSFLKDDSIDNKVLTRSDKARGKSDNVPSEEVVKKMKNYWRQLLNAKLITQRKFDNLTKAERGGLSELDKAGFIKRQLVETRQITKHVAQILDSRMNTKYDENDKLIREVKVITLKSKLVSDFRKDFQFYKVREINNYHHAHDAYLNAVVGTALIKKYPKLESEFVYGDYKVYDVRKMIAKSEQEIGKATAKYFFYSNIMNFFKTEITLANGEIRKRPLIETNGETGEIVWDKGRDFATVRKVLSMPQVNIVKKTEVQTGGFSKESILPKRNSDKLIARKKDWDPKKYGGFDSPTVAYSVLVVAKVEKGKSKKLKSVKELLGITIMERSSFEKNPIDFLEAKGYKEVKKDLIIKLPKYSLFELENGRKRMLASAGELQKGNELALPSKYVNFLYLASHYEKLKGSPEDNEQKQLFVEQHKHYLDEIIEQISEFSKRVILADANLDKVLSAYNKHRDKPIREQAENIIHLFTLTNLGAPAAFKYFDTTIDRKRYTSTKEVLDATLIHQSITGLYETRIDLSQLGGDGGGGGGSSGGLGIEDEYRLHETSTEPDVSLGSTWLSDFPQAWAETGGMGLAVRQAPLIIPLKATSTPVSIQQYPMSHEARLGIKPHIQRLLDQGILVPCQSPWNTPLLPVKKPGTNDYRPVQDLREVNKRVEDIHPTVPNPYNLLSGLPPSHQWYTVLDLKDAFFCLRLHPTSQPLFAFEWRDPGMGISGQLTWTRLPQGFKNSPTLFNEALHRDLADFRIQHPDLILLQYVDDILLAATSELDCQQGTRALLQTLGDLGYRASAKKAQICQKQVKYLGYLLREGQRWLTEARKETVMGQPVPKTPRQLREFLGKAGFCRLFIPGFAEMAAPLYPLTKPGTLFSWGPDQQKAYQEIKQALLTAPALGLPDLTKPFELFVDEKQGYAKGVLTQKLGPWRRPVAYLSKKLDPVAAGWPPCLRMVAAIAVLTKDAGKLTMGQPLVILAPHAVEALVKQPPDRWLSNARMTHYQAMLLDTDRVQFGPVVALNPATLLPLPEEGAPHDCLEILAETHGTRPDLTDQPIPDADHTWYTDGSSFLQEGQRKAGAAVTTETEVIWAGALPAGTSAQRAELIALTQALKMAEGKRLNVYTDSRYAFATAHIHGEIYRRRGWLTSEGREIKNKSEILALLKALFLPKRLSIIHCLGHQKGDSAEARGNRLADQAAREAAIKTPPDTSTLLIAGKRTADGSEFEKRTADGSEFESPKKKAKVE

SEQ ID NO: 2180 - protein, 2094 aa, synthetic construct
MPAAKRVKLDGGDKKYSIGLDIGTNSVGWAVITDEYKVPSKKFKVLGNTDRHSIKKNLIGALLFDSGETAEATRLKRTARRRYTRRKNRICYLQEIFSNEMAKVDDSFFHRLEESFLVEEDKKHERHPIFGNIVDEVAYHEKYPTIYHLRKKLVDSTDKADLRLIYLALAHMIKFRGHFLIEGDLNPDNSDVDKLFIQLVQTYNQLFEENPINASGVDAKAILSARLSKSRRLENLIAQLPGEKKNGLFGNLIALSLGLTPNFKSNFDLAEDAKLQLSKDTYDDDLDNLLAQIGDQYADLFLAAKNLSDAILLSDILRVNTEITKAPLSASMIKRYDEHHQDLTLLKALVRQQLPEKYKEIFFDQSKNGYAGYIDGGASQEEFYKFIKPILEKMDGTEELLVKLNREDLLRKQRTFDNGSIPHQIHLGELHAILRRQEDFYPFLKDNREKIEKILTFRIPYYVGPLARGNSRFAWMTRKSEETITPWNFEEVVDKGASAQSFIERMTNFDKNLPNEKVLPKHSLLYEYFTVYNELTKVKYVTEGMRKPAFLSGEQKKAIVDLLFKTNRKVTVKQLKEDYFKKIECFDSVEISGVEDRFNASLGTYHDLLKIIKDKDFLDNEENEDILEDIVLTLTLFEDREMIEERLKTYAHLFDDKVMKQLKRRRYTGWGRLSRKLINGIRDKQSGKTILDFLKSDGFANRNFMQLIHDDSLTFKEDIQKAQVSGQGDSLHEHIANLAGSPAIKKGILQTVKVVDELVKVMGRHKPENIVIEMARENQTTQKGQKNSRERMKRIEEGIKELGSQILKEHPVENTQLQNEKLYLYYLQNGRDMYVDQELDINRLSDYDVDHIVPQSFLKDDSIDNKVLTRSDKARGKSDNVPSEEVVKKMKNYWRQLLNAKLITQRKFDNLTKAERGGLSELDKAGFIKRQLVETRQITKHVAQILDSRMNTKYDENDKLIREVKVITLKSKLVSDFRKDFQFYKVREINNYHHAHDAYLNAVVGTALIKKYPKLESEFVYGDYKVYDVRKMIAKSEQEIGKATAKYFFYSNIMNFFKTEITLANGEIRKRPLIETNGETGEIVWDKGRDFATVRKVLSMPQVNIVKKTEVQTGGFSKESILPKRNSDKLIARKKDWDPKKYGGFDSPTVAYSVLVVAKVEKGKSKKLKSVKELLGITIMERSSFEKNPIDFLEAKGYKEVKKDLIIKLPKYSLFELENGRKRMLASAGELQKGNELALPSKYVNFLYLASHYEKLKGSPEDNEQKQLFVEQHKHYLDEIIEQISEFSKRVILADANLDKVLSAYNKHRDKPIREQAENIIHLFTLTNLGAPAAFKYFDTTIDRKRYTSTKEVLDATLIHQSITGLYETRIDLSQLGGDGGGGGPAPGSSGGLGIEDEYRLHETSTEPDVSLGSTWLSDFPQAWAETGGMGLAVRQAPLIIPLKATSTPVSIQQYPMSHEARLGIKPHIQRLLDQGILVPCQSPWNTPLLPVKKPGTNDYRPVQDLREVNKRVEDIHPTVPNPYNLLSGLPPSHQWYTVLDLKDAFFCLRLHPTSQPLFAFEWRDPGMGISGQLTWTRLPQGFKNSPTLFNEALHRDLADFRIQHPDLILLQYVDDILLAATSELDCQQGTRALLQTLGDLGYRASAKKAQICQKQVKYLGYLLREGQRWLTEARKETVMGQPVPKTPRQLREFLGKAGFCRLFIPGFAEMAAPLYPLTKPGTLFSWGPDQQKAYQEIKQALLTAPALGLPDLTKPFELFVDEKQGYAKGVLTQKLGPWRRPVAYLSKKLDPVAAGWPPCLRMVAAIAVLTKDAGKLTMGQPLVILAPHAVEALVKQPPDRWLSNARMTHYQAMLLDTDRVQFGPVVALNPATLLPLPEEGAPHDCLEILAETHGTRPDLTDQPIPDADHTWYTDGSSFLQEGQRKAGAAVTTETEVIWAGALPAGTSAQRAELIALTQALKMAEGKRLNVYTDSRYAFATAHIHGEIYRRRGWLTSEGREIKNKSEILALLKALFLPKRLSIIHCLGHQKGDSAEARGNRLADQAAREAAIKTPPDTSTLLIAGKRTADGSEFEKRTADGSEFESPKKKAKVE

SEQ ID NO: 2181 - protein, 2118 aa, synthetic construct
MPAAKRVKLDGGDKKYSIGLDIGTNSVGWAVITDEYKVPSKKFKVLGNTDRHSIKKNLIGALLFDSGETAEATRLKRTARRRYTRRKNRICYLQEIFSNEMAKVDDSFFHRLEESFLVEEDKKHERHPIFGNIVDEVAYHEKYPTIYHLRKKLVDSTDKADLRLIYLALAHMIKFRGHFLIEGDLNPDNSDVDKLFIQLVQTYNQLFEENPINASGVDAKAILSARLSKSRRLENLIAQLPGEKKNGLFGNLIALSLGLTPNFKSNFDLAEDAKLQLSKDTYDDDLDNLLAQIGDQYADLFLAAKNLSDAILLSDILRVNTEITKAPLSASMIKRYDEHHQDLTLLKALVRQQLPEKYKEIFFDQSKNGYAGYIDGGASQEEFYKFIKPILEKMDGTEELLVKLNREDLLRKQRTFDNGSIPHQIHLGELHAILRRQEDFYPFLKDNREKIEKILTFRIPYYVGPLARGNSRFAWMTRKSEETITPWNFEEVVDKGASAQSFIERMTNFDKNLPNEKVLPKHSLLYEYFTVYNELTKVKYVTEGMRKPAFLSGEQKKAIVDLLFKTNRKVTVKQLKEDYFKKIECFDSVEISGVEDRFNASLGTYHDLLKIIKDKDFLDNEENEDILEDIVLTLTLFEDREMIEERLKTYAHLFDDKVMKQLKRRRYTGWGRLSRKLINGIRDKQSGKTILDFLKSDGFANRNFMQLIHDDSLTFKEDIQKAQVSGQGDSLHEHIANLAGSPAIKKGILQTVKVVDELVKVMGRHKPENIVIEMARENQTTQKGQKNSRERMKRIEEGIKELGSQILKEHPVENTQLQNEKLYLYYLQNGRDMYVDQELDINRLSDYDVDHIVPQSFLKDDSIDNKVLTRSDKARGKSDNVPSEEVVKKMKNYWRQLLNAKLITQRKFDNLTKAERGGLSELDKAGFIKRQLVETRQITKHVAQILDSRMNTKYDENDKLIREVKVITLKSKLVSDFRKDFQFYKVREINNYHHAHDAYLNAVVGTALIKKYPKLESEFVYGDYKVYDVRKMIAKSEQEIGKATAKYFFYSNIMNFFKTEITLANGEIRKRPLIETNGETGEIVWDKGRDFATVRKVLSMPQVNIVKKTEVQTGGFSKESILPKRNSDKLIARKKDWDPKKYGGFDSPTVAYSVLVVAKVEKGKSKKLKSVKELLGITIMERSSFEKNPIDFLEAKGYKEVKKDLIIKLPKYSLFELENGRKRMLASAGELQKGNELALPSKYVNFLYLASHYEKLKGSPEDNEQKQLFVEQHKHYLDEIIEQISEFSKRVILADANLDKVLSAYNKHRDKPIREQAENIIHLFTLTNLGAPAAFKYFDTTIDRKRYTSTKEVLDATLIHQSITGLYETRIDLSQLGGDGGSGGSSGGSSGSETPGTSESATPESSGGSSGGSSGGLGIEDEYRLHETSTEPDVSLGSTWLSDFPQAWAETGGMGLAVRQAPLIIPLKATSTPVSIQQYPMSHEARLGIKPHIQRLLDQGILVPCQSPWNTPLLPVKKPGTNDYRPVQDLREVNKRVEDIHPTVPNPYNLLSGLPPSHQWYTVLDLKDAFFCLRLHPTSQPLFAFEWRDPGMGISGQLTWTRLPQGFKNSPTLFNEALHRDLADFRIQHPDLILLQYVDDILLAATSELDCQQGTRALLQTLGDLGYRASAKKAQICQKQVKYLGYLLREGQRWLTEARKETVMGQPVPKTPRQLREFLGKAGFCRLFIPGFAEMAAPLYPLTKPGTLFSWGPDQQKAYQEIKQALLTAPALGLPDLTKPFELFVDEKQGYAKGVLTQKLGPWRRPVAYLSKKLDPVAAGWPPCLRMVAAIAVLTKDAGKLTMGQPLVILAPHAVEALVKQPPDRWLSNARMTHYQAMLLDTDRVQFGPVVALNPATLLPLPEEGAPHDCLEILAETHGTRPDLTDQPIPDADHTWYTDGSSFLQEGQRKAGAAVTTETEVIWAGALPAGTSAQRAELIALTQALKMAEGKRLNVYTDSRYAFATAHIHGEIYRRRGWLTSEGREIKNKSEILALLKALFLPKRLSIIHCLGHQKGDSAEARGNRLADQAAREAAIKTPPDTSTLLIAGKRTADGSEFEKRTADGSEFESPKKKAKVE

SEQ ID NO: 2182 - protein, 2096 aa, synthetic construct
MPAAKRVKLDGGDKKYSIGLDIGTNSVGWAVITDEYKVPSKKFKVLGNTDRHSIKKNLIGALLFDSGETAEATRLKRTARRRYTRRKNRICYLQEIFSNEMAKVDDSFFHRLEESFLVEEDKKHERHPIFGNIVDEVAYHEKYPTIYHLRKKLVDSTDKADLRLIYLALAHMIKFRGHFLIEGDLNPDNSDVDKLFIQLVQTYNQLFEENPINASGVDAKAILSARLSKSRRLENLIAQLPGEKKNGLFGNLIALSLGLTPNFKSNFDLAEDAKLQLSKDTYDDDLDNLLAQIGDQYADLFLAAKNLSDAILLSDILRVNTEITKAPLSASMIKRYDEHHQDLTLLKALVRQQLPEKYKEIFFDQSKNGYAGYIDGGASQEEFYKFIKPILEKMDGTEELLVKLNREDLLRKQRTFDNGSIPHQIHLGELHAILRRQEDFYPFLKDNREKIEKILTFRIPYYVGPLARGNSRFAWMTRKSEETITPWNFEEVVDKGASAQSFIERMTNFDKNLPNEKVLPKHSLLYEYFTVYNELTKVKYVTEGMRKPAFLSGEQKKAIVDLLFKTNRKVTVKQLKEDYFKKIECFDSVEISGVEDRFNASLGTYHDLLKIIKDKDFLDNEENEDILEDIVLTLTLFEDREMIEERLKTYAHLFDDKVMKQLKRRRYTGWGRLSRKLINGIRDKQSGKTILDFLKSDGFANRNFMQLIHDDSLTFKEDIQKAQVSGQGDSLHEHIANLAGSPAIKKGILQTVKVVDELVKVMGRHKPENIVIEMARENQTTQKGQKNSRERMKRIEEGIKELGSQILKEHPVENTQLQNEKLYLYYLQNGRDMYVDQELDINRLSDYDVDHIVPQSFLKDDSIDNKVLTRSDKARGKSDNVPSEEVVKKMKNYWRQLLNAKLITQRKFDNLTKAERGGLSELDKAGFIKRQLVETRQITKHVAQILDSRMNTKYDENDKLIREVKVITLKSKLVSDFRKDFQFYKVREINNYHHAHDAYLNAVVGTALIKKYPKLESEFVYGDYKVYDVRKMIAKSEQEIGKATAKYFFYSNIMNFFKTEITLANGEIRKRPLIETNGETGEIVWDKGRDFATVRKVLSMPQVNIVKKTEVQTGGFSKESILPKRNSDKLIARKKDWDPKKYGGFDSPTVAYSVLVVAKVEKGKSKKLKSVKELLGITIMERSSFEKNPIDFLEAKGYKEVKKDLIIKLPKYSLFELENGRKRMLASAGELQKGNELALPSKYVNFLYLASHYEKLKGSPEDNEQKQLFVEQHKHYLDEIIEQISEFSKRVILADANLDKVLSAYNKHRDKPIREQAENIIHLFTLTNLGAPAAFKYFDTTIDRKRYTSTKEVLDATLIHQSITGLYETRIDLSQLGGDGGGSSGGGEAAAKGGTLGIEDEYRLHETSTEPDVSLGSTWLSDFPQAWAETGGMGLAVRQAPLIIPLKATSTPVSIQQYPMSHEARLGIKPHIQRLLDQGILVPCQSPWNTPLLPVKKPGTNDYRPVQDLREVNKRVEDIHPTVPNPYNLLSGLPPSHQWYTVLDLKDAFFCLRLHPTSQPLFAFEWRDPGMGISGQLTWTRLPQGFKNSPTLFDEALHRDLADFRIQHPDLILLQYVDDILLAATSELDCQQGTRALLQTLGDLGYRASAKKAQICQKQVKYLGYLLREGQRWLTEARKETVMGQPVPKTPRQLREFLGTAGFCRLWIPGFAEMAAPLYPLTKTGTLFSWGPDQQKAYQEIKQALLTAPALGLPDLTKPFELFVDEKQGYAKGVLTQKLGPWRRPVAYLSKKLDPVAAGWPPCLRMVAAIAVLTKDAGKLTMGQPLVILAPHAVEALVKQPPDRWLSNARMTHYQAMLLDTDRVQFGPVVALNPATLLPLPEEGAPHDCLEILAETHGTRPDLTDQPIPDADHTWYTDGSSFLQEGQRKAGAAVTTETEVIWAGALPAGTSAQRAELIALTQALKMAEGKRLNVYTDSRYAFATAHIHGEIYRRRGLLTSEGREIKNKSEILALLKALFLPKRLSIIHCLGHQKGDSAEARGNRLADQAAREAAIKTPPDTSTLLAGKRTADGSEFEKRTADGSEFESPKKKAKVE

SEQ ID NO: 2183 - protein, 2091 aa, synthetic construct
MPAAKRVKLDGGDKKYSIGLDIGTNSVGWAVITDEYKVPSKKFKVLGNTDRHSIKKNLIGALLFDSGETAEATRLKRTARRRYTRRKNRICYLQEIFSNEMAKVDDSFFHRLEESFLVEEDKKHERHPIFGNIVDEVAYHEKYPTIYHLRKKLVDSTDKADLRLIYLALAHMIKFRGHFLIEGDLNPDNSDVDKLFIQLVQTYNQLFEENPINASGVDAKAILSARLSKSRRLENLIAQLPGEKKNGLFGNLIALSLGLTPNFKSNFDLAEDAKLQLSKDTYDDDLDNLLAQIGDQYADLFLAAKNLSDAILLSDILRVNTEITKAPLSASMIKRYDEHHQDLTLLKALVRQQLPEKYKEIFFDQSKNGYAGYIDGGASQEEFYKFIKPILEKMDGTEELLVKLNREDLLRKQRTFDNGSIPHQIHLGELHAILRRQEDFYPFLKDNREKIEKILTFRIPYYVGPLARGNSRFAWMTRKSEETITPWNFEEVVDKGASAQSFIERMTNFDKNLPNEKVLPKHSLLYEYFTVYNELTKVKYVTEGMRKPAFLSGEQKKAIVDLLFKTNRKVTVKQLKEDYFKKIECFDSVEISGVEDRFNASLGTYHDLLKIIKDKDFLDNEENEDILEDIVLTLTLFEDREMIEERLKTYAHLFDDKVMKQLKRRRYTGWGRLSRKLINGIRDKQSGKTILDFLKSDGFANRNFMQLIHDDSLTFKEDIQKAQVSGQGDSLHEHIANLAGSPAIKKGILQTVKVVDELVKVMGRHKPENIVIEMARENQTTQKGQKNSRERMKRIEEGIKELGSQILKEHPVENTQLQNEKLYLYYLQNGRDMYVDQELDINRLSDYDVDHIVPQSFLKDDSIDNKVLTRSDKARGKSDNVPSEEVVKKMKNYWRQLLNAKLITQRKFDNLTKAERGGLSELDKAGFIKRQLVETRQITKHVAQILDSRMNTKYDENDKLIREVKVITLKSKLVSDFRKDFQFYKVREINNYHHAHDAYLNAVVGTALIKKYPKLESEFVYGDYKVYDVRKMIAKSEQEIGKATAKYFFYSNIMNFFKTEITLANGEIRKRPLIETNGETGEIVWDKGRDFATVRKVLSMPQVNIVKKTEVQTGGFSKESILPKRNSDKLIARKKDWDPKKYGGFDSPTVAYSVLVVAKVEKGKSKKLKSVKELLGITIMERSSFEKNPIDFLEAKGYKEVKKDLIIKLPKYSLFELENGRKRMLASAGELQKGNELALPSKYVNFLYLASHYEKLKGSPEDNEQKQLFVEQHKHYLDEIIEQISEFSKRVILADANLDKVLSAYNKHRDKPIREQAENIIHLFTLTNLGAPAAFKYFDTTIDRKRYTSTKEVLDATLIHQSITGLYETRIDLSQLGGDGGGSSPAPGGTLGIEDEYRLHETSTEPDVSLGSTWLSDFPQAWAETGGMGLAVRQAPLIIPLKATSTPVSIQQYPMSHEARLGIKPHIQRLLDQGILVPCQSPWNTPLLPVKKPGTNDYRPVQDLREVNKRVEDIHPTVPNPYNLLSGLPPSHQWYTVLDLKDAFFCLRLHPTSQPLFAFEWRDPGMGISGQLTWTRLPQGFKNSPTLFDEALHRDLADFRIQHPDLILLQYVDDILLAATSELDCQQGTRALLQTLGDLGYRASAKKAQICQKQVKYLGYLLREGQRWLTEARKETVMGQPVPKTPRQLREFLGTAGFCRLWIPGFAEMAAPLYPLTKTGTLFSWGPDQQKAYQEIKQALLTAPALGLPDLTKPFELFVDEKQGYAKGVLTQKLGPWRRPVAYLSKKLDPVAAGWPPCLRMVAAIAVLTKDAGKLTMGQPLVILAPHAVEALVKQPPDRWLSNARMTHYQAMLLDTDRVQFGPVVALNPATLLPLPEEGAPHDCLEILAETHGTRPDLTDQPIPDADHTWYTDGSSFLQEGQRKAGAAVTTETEVIWAGALPAGTSAQRAELIALTQALKMAEGKRLNVYTDSRYAFATAHIHGEIYRRRGLLTSEGREIKNKSEILALLKALFLPKRLSIIHCLGHQKGDSAEARGNRLADQAAREAAIKTPPDTSTLLAGKRTADGSEFEKRTADGSEFESPKKKAKVE

SEQ ID NO: 2184 - protein, 2096 aa, synthetic construct
MPAAKRVKLDGGDKKYSIGLDIGTNSVGWAVITDEYKVPSKKFKVLGNTDRHSIKKNLIGALLFDSGETAEATRLKRTARRRYTRRKNRICYLQEIFSNEMAKVDDSFFHRLEESFLVEEDKKHERHPIFGNIVDEVAYHEKYPTIYHLRKKLVDSTDKADLRLIYLALAHMIKFRGHFLIEGDLNPDNSDVDKLFIQLVQTYNQLFEENPINASGVDAKAILSARLSKSRRLENLIAQLPGEKKNGLFGNLIALSLGLTPNFKSNFDLAEDAKLQLSKDTYDDDLDNLLAQIGDQYADLFLAAKNLSDAILLSDILRVNTEITKAPLSASMIKRYDEHHQDLTLLKALVRQQLPEKYKEIFFDQSKNGYAGYIDGGASQEEFYKFIKPILEKMDGTEELLVKLNREDLLRKQRTFDNGSIPHQIHLGELHAILRRQEDFYPFLKDNREKIEKILTFRIPYYVGPLARGNSRFAWMTRKSEETITPWNFEEVVDKGASAQSFIERMTNFDKNLPNEKVLPKHSLLYEYFTVYNELTKVKYVTEGMRKPAFLSGEQKKAIVDLLFKTNRKVTVKQLKEDYFKKIECFDSVEISGVEDRFNASLGTYHDLLKIIKDKDFLDNEENEDILEDIVLTLTLFEDREMIEERLKTYAHLFDDKVMKQLKRRRYTGWGRLSRKLINGIRDKQSGKTILDFLKSDGFANRNFMQLIHDDSLTFKEDIQKAQVSGQGDSLHEHIANLAGSPAIKKGILQTVKVVDELVKVMGRHKPENIVIEMARENQTTQKGQKNSRERMKRIEEGIKELGSQILKEHPVENTQLQNEKLYLYYLQNGRDMYVDQELDINRLSDYDVDHIVPQSFLKDDSIDNKVLTRSDKARGKSDNVPSEEVVKKMKNYWRQLLNAKLITQRKFDNLTKAERGGLSELDKAGFIKRQLVETRQITKHVAQILDSRMNTKYDENDKLIREVKVITLKSKLVSDFRKDFQFYKVREINNYHHAHDAYLNAVVGTALIKKYPKLESEFVYGDYKVYDVRKMIAKSEQEIGKATAKYFFYSNIMNFFKTEITLANGEIRKRPLIETNGETGEIVWDKGRDFATVRKVLSMPQVNIVKKTEVQTGGFSKESILPKRNSDKLIARKKDWDPKKYGGFDSPTVAYSVLVVAKVEKGKSKKLKSVKELLGITIMERSSFEKNPIDFLEAKGYKEVKKDLIIKLPKYSLFELENGRKRMLASAGELQKGNELALPSKYVNFLYLASHYEKLKGSPEDNEQKQLFVEQHKHYLDEIIEQISEFSKRVILADANLDKVLSAYNKHRDKPIREQAENIIHLFTLTNLGAPAAFKYFDTTIDRKRYTSTKEVLDATLIHQSITGLYETRIDLSQLGGDGGGGGEAAAKGGSGGTLGIEDEYRLHETSTEPDVSLGSTWLSDFPQAWAETGGMGLAVRQAPLIIPLKATSTPVSIQQYPMSHEARLGIKPHIQRLLDQGILVPCQSPWNTPLLPVKKPGTNDYRPVQDLREVNKRVEDIHPTVPNPYNLLSGLPPSHQWYTVLDLKDAFFCLRLHPTSQPLFAFEWRDPGMGISGQLTWTRLPQGFKNSPTLFDEALHRDLADFRIQHPDLILLQYVDDILLAATSELDCQQGTRALLQTLGDLGYRASAKKAQICQKQVKYLGYLLREGQRWLTEARKETVMGQPVPKTPRQLREFLGTAGFCRLWIPGFAEMAAPLYPLTKTGTLFSWGPDQQKAYQEIKQALLTAPALGLPDLTKPFELFVDEKQGYAKGVLTQKLGPWRRPVAYLSKKLDPVAAGWPPCLRMVAAIAVLTKDAGKLTMGQPLVILAPHAVEALVKQPPDRWLSNARMTHYQAMLLDTDRVQFGPVVALNPATLLPLPEEGAPHDCLEILAETHGTRPDLTDQPIPDADHTWYTDGSSFLQEGQRKAGAAVTTETEVIWAGALPAGTSAQRAELIALTQALKMAEGKRLNVYTDSRYAFATAHIHGEIYRRRGLLTSEGREIKNKSEILALLKALFLPKRLSIIHCLGHQKGDSAEARGNRLADQAAREAAIKTPPDTSTLLAGKRTADGSEFEKRTADGSEFESPKKKAKVE

SEQ ID NO: 2185 - protein, 2096 aa, synthetic construct
MPAAKRVKLDGGDKKYSIGLDIGTNSVGWAVITDEYKVPSKKFKVLGNTDRHSIKKNLIGALLFDSGETAEATRLKRTARRRYTRRKNRICYLQEIFSNEMAKVDDSFFHRLEESFLVEEDKKHERHPIFGNIVDEVAYHEKYPTIYHLRKKLVDSTDKADLRLIYLALAHMIKFRGHFLIEGDLNPDNSDVDKLFIQLVQTYNQLFEENPINASGVDAKAILSARLSKSRRLENLIAQLPGEKKNGLFGNLIALSLGLTPNFKSNFDLAEDAKLQLSKDTYDDDLDNLLAQIGDQYADLFLAAKNLSDAILLSDILRVNTEITKAPLSASMIKRYDEHHQDLTLLKALVRQQLPEKYKEIFFDQSKNGYAGYIDGGASQEEFYKFIKPILEKMDGTEELLVKLNREDLLRKQRTFDNGSIPHQIHLGELHAILRRQEDFYPFLKDNREKIEKILTFRIPYYVGPLARGNSRFAWMTRKSEETITPWNFEEVVDKGASAQSFIERMTNFDKNLPNEKVLPKHSLLYEYFTVYNELTKVKYVTEGMRKPAFLSGEQKKAIVDLLFKTNRKVTVKQLKEDYFKKIECFDSVEISGVEDRFNASLGTYHDLLKIIKDKDFLDNEENEDILEDIVLTLTLFEDREMIEERLKTYAHLFDDKVMKQLKRRRYTGWGRLSRKLINGIRDKQSGKTILDFLKSDGFANRNFMQLIHDDSLTFKEDIQKAQVSGQGDSLHEHIANLAGSPAIKKGILQTVKVVDELVKVMGRHKPENIVIEMARENQTTQKGQKNSRERMKRIEEGIKELGSQILKEHPVENTQLQNEKLYLYYLQNGRDMYVDQELDINRLSDYDVDHIVPQSFLKDDSIDNKVLTRSDKARGKSDNVPSEEVVKKMKNYWRQLLNAKLITQRKFDNLTKAERGGLSELDKAGFIKRQLVETRQITKHVAQILDSRMNTKYDENDKLIREVKVITLKSKLVSDFRKDFQFYKVREINNYHHAHDAYLNAVVGTALIKKYPKLESEFVYGDYKVYDVRKMIAKSEQEIGKATAKYFFYSNIMNFFKTEITLANGEIRKRPLIETNGETGEIVWDKGRDFATVRKVLSMPQVNIVKKTEVQTGGFSKESILPKRNSDKLIARKKDWDPKKYGGFDSPTVAYSVLVVAKVEKGKSKKLKSVKELLGITIMERSSFEKNPIDFLEAKGYKEVKKDLIIKLPKYSLFELENGRKRMLASAGELQKGNELALPSKYVNFLYLASHYEKLKGSPEDNEQKQLFVEQHKHYLDEIIEQISEFSKRVILADANLDKVLSAYNKHRDKPIREQAENIIHLFTLTNLGAPAAFKYFDTTIDRKRYTSTKEVLDATLIHQSITGLYETRIDLSQLGGDGGEAAAKPAPGSSGGTLGIEDEYRLHETSTEPDVSLGSTWLSDFPQAWAETGGMGLAVRQAPLIIPLKATSTPVSIQQYPMSHEARLGIKPHIQRLLDQGILVPCQSPWNTPLLPVKKPGTNDYRPVQDLREVNKRVEDIHPTVPNPYNLLSGLPPSHQWYTVLDLKDAFFCLRLHPTSQPLFAFEWRDPGMGISGQLTWTRLPQGFKNSPTLFDEALHRDLADFRIQHPDLILLQYVDDILLAATSELDCQQGTRALLQTLGDLGYRASAKKAQICQKQVKYLGYLLREGQRWLTEARKETVMGQPVPKTPRQLREFLGTAGFCRLWIPGFAEMAAPLYPLTKTGTLFSWGPDQQKAYQEIKQALLTAPALGLPDLTKPFELFVDEKQGYAKGVLTQKLGPWRRPVAYLSKKLDPVAAGWPPCLRMVAAIAVLTKDAGKLTMGQPLVILAPHAVEALVKQPPDRWLSNARMTHYQAMLLDTDRVQFGPVVALNPATLLPLPEEGAPHDCLEILAETHGTRPDLTDQPIPDADHTWYTDGSSFLQEGQRKAGAAVTTETEVIWAGALPAGTSAQRAELIALTQALKMAEGKRLNVYTDSRYAFATAHIHGEIYRRRGLLTSEGREIKNKSEILALLKALFLPKRLSIIHCLGHQKGDSAEARGNRLADQAAREAAIKTPPDTSTLLAGKRTADGSEFEKRTADGSEFESPKKKAKVE

SEQ ID NO: 2186 - protein, 2096 aa, synthetic construct; identical to SEQ ID NO: 2069

SEQ ID NO: 2187 - protein, 2096 aa, synthetic construct
MPAAKRVKLDGGDKKYSIGLDIGTNSVGWAVITDEYKVPSKKFKVLGNTDRHSIKKNLIGALLFDSGETAEATRLKRTARRRYTRRKNRICYLQEIFSNEMAKVDDSFFHRLEESFLVEEDKKHERHPIFGNIVDEVAYHEKYPTIYHLRKKLVDSTDKADLRLIYLALAHMIKFRGHFLIEGDLNPDNSDVDKLFIQLVQTYNQLFEENPINASGVDAKAILSARLSKSRRLENLIAQLPGEKKNGLFGNLIALSLGLTPNFKSNFDLAEDAKLQLSKDTYDDDLDNLLAQIGDQYADLFLAAKNLSDAILLSDILRVNTEITKAPLSASMIKRYDEHHQDLTLLKALVRQQLPEKYKEIFFDQSKNGYAGYIDGGASQEEFYKFIKPILEKMDGTEELLVKLNREDLLRKQRTFDNGSIPHQIHLGELHAILRRQEDFYPFLKDNREKIEKILTFRIPYYVGPLARGNSRFAWMTRKSEETITPWNFEEVVDKGASAQSFIERMTNFDKNLPNEKVLPKHSLLYEYFTVYNELTKVKYVTEGMRKPAFLSGEQKKAIVDLLFKTNRKVTVKQLKEDYFKKIECFDSVEISGVEDRFNASLGTYHDLLKIIKDKDFLDNEENEDILEDIVLTLTLFEDREMIEERLKTYAHLFDDKVMKQLKRRRYTGWGRLSRKLINGIRDKQSGKTILDFLKSDGFANRNFMQLIHDDSLTFKEDIQKAQVSGQGDSLHEHIANLAGSPAIKKGILQTVKVVDELVKVMGRHKPENIVIEMARENQTTQKGQKNSRERMKRIEEGIKELGSQILKEHPVENTQLQNEKLYLYYLQNGRDMYVDQELDINRLSDYDVDHIVPQSFLKDDSIDNKVLTRSDKARGKSDNVPSEEVVKKMKNYWRQLLNAKLITQRKFDNLTKAERGGLSELDKAGFIKRQLVETRQITKHVAQILDSRMNTKYDENDKLIREVKVITLKSKLVSDFRKDFQFYKVREINNYHHAHDAYLNAVVGTALIKKYPKLESEFVYGDYKVYDVRKMIAKSEQEIGKATAKYFFYSNIMNFFKTEITLANGEIRKRPLIETNGETGEIVWDKGRDFATVRKVLSMPQVNIVKKTEVQTGGFSKESILPKRNSDKLIARKKDWDPKKYGGFDSPTVAYSVLVVAKVEKGKSKKLKSVKELLGITIMERSSFEKNPIDFLEAKGYKEVKKDLIIKLPKYSLFELENGRKRMLASAGELQKGNELALPSKYVNFLYLASHYEKLKGSPEDNEQKQLFVEQHKHYLDEIIEQISEFSKRVILADANLDKVLSAYNKHRDKPIREQAENIIHLFTLTNLGAPAAFKYFDTTIDRKRYTSTKEVLDATLIHQSITGLYETRIDLSQLGGDGGPAPAPAPAPAPGGTLGIEDEYRLHETSTEPDVSLGSTWLSDFPQAWAETGGMGLAVRQAPLIIPLKATSTPVSIQQYPMSHEARLGIKPHIQRLLDQGILVPCQSPWNTPLLPVKKPGTNDYRPVQDLREVNKRVEDIHPTVPNPYNLLSGLPPSHQWYTVLDLKDAFFCLRLHPTSQPLFAFEWRDPGMGISGQLTWTRLPQGFKNSPTLFNEALHRDLADFRIQHPDLILLQYVDDILLAATSELDCQQGTRALLQTLGDLGYRASAKKAQICQKQVKYLGYLLREGQRWLTEARKETVMGQPVPKTPRQLREFLGTAGFCRLWIPGFAEMAAPLYPLTKPGTLFSWGPDQQKAYQEIKQALLTAPALGLPDLTKPFELFVDEKQGYAKGVLTQKLGPWRRPVAYLSKKLDPVAAGWPPCLRMVAAIAVLTKDAGKLTMGQPLVILAPHAVEALVKQPPDRWLSNARMTHYQAMLLDTDRVQFGPVVALNPATLLPLPEEGAPHDCLEILAETHGTRPDLTDQPIPDADHTWYTDGSSFLQEGQRKAGAAVTTETEVIWAGALPAGTSAQRAELIALTQALKMAEGKRLNVYTDSRYAFATAHIHGEIYRRRGWLTSEGREIKNKSEILALLKALFLPKRLSIIHCLGHQKGDSAEARGNRLADQAAREAAIKTPPDTSTLLAGKRTADGSEFEKRTADGSEFESPKKKAKVE

SEQ ID NO: 2188 - protein, 2110 aa, synthetic construct
MPAAKRVKLDGGDKKYSIGLDIGTNSVGWAVITDEYKVPSKKFKVLGNTDRHSIKKNLIGALLFDSGETAEATRLKRTARRRYTRRKNRICYLQEIFSNEMAKVDDSFFHRLEESFLVEEDKKHERHPIFGNIVDEVAYHEKYPTIYHLRKKLVDSTDKADLRLIYLALAHMIKFRGHFLIEGDLNPDNSDVDKLFIQLVQTYNQLFEENPINASGVDAKAILSARLSKSRRLENLIAQLPGEKKNGLFGNLIALSLGLTPNFKSNFDLAEDAKLQLSKDTYDDDLDNLLAQIGDQYADLFLAAKNLSDAILLSDILRVNTEITKAPLSASMIKRYDEHHQDLTLLKALVRQQLPEKYKEIFFDQSKNGYAGYIDGGASQEEFYKFIKPILEKMDGTEELLVKLNREDLLRKQRTFDNGSIPHQIHLGELHAILRRQEDFYPFLKDNREKIEKILTFRIPYYVGPLARGNSRFAWMTRKSEETITPWNFEEVVDKGASAQSFIERMTNFDKNLPNEKVLPKHSLLYEYFTVYNELTKVKYVTEGMRKPAFLSGEQKKAIVDLLFKTNRKVTVKQLKEDYFKKIECFDSVEISGVEDRFNASLGTYHDLLKIIKDKDFLDNEENEDILEDIVLTLTLFEDREMIEERLKTYAHLFDDKVMKQLKRRRYTGWGRLSRKLINGIRDKQSGKTILDFLKSDGFANRNFMQLIHDDSLTFKEDIQKAQVSGQGDSLHEHIANLAGSPAIKKGILQTVKVVDELVKVMGRHKPENIVIEMARENQTTQKGQKNSRERMKRIEEGIKELGSQILKEHPVENTQLQNEKLYLYYLQNGRDMYVDQELDINRLSDYDVDHIVPQSFLKDDSIDNKVLTRSDKARGKSDNVPSEEVVKKMKNYWRQLLNAKLITQRKFDNLTKAERGGLSELDKAGFIKRQLVETRQITKHVAQILDSRMNTKYDENDKLIREVKVITLKSKLVSDFRKDFQFYKVREINNYHHAHDAYLNAVVGTALIKKYPKLESEFVYGDYKVYDVRKMIAKSEQEIGKATAKYFFYSNIMNFFKTEITLANGEIRKRPLIETNGETGEIVWDKGRDFATVRKVLSMPQVNIVKKTEVQTGGFSKESILPKRNSDKLIARKKDWDPKKYGGFDSPTVAYSVLVVAKVEKGKSKKLKSVKELLGITIMERSSFEKNPIDFLEAKGYKEVKKDLIIKLPKYSLFELENGRKRMLASAGELQKGNELALPSKYVNFLYLASHYEKLKGSPEDNEQKQLFVEQHKHYLDEIIEQISEFSKRVILADANLDKVLSAYNKHRDKPIREQAENIIHLFTLTNLGAPAAFKYFDTTIDRKRYTSTKEVLDATLIHQSITGLYETRIDLSQLGGDGGEAAAKEAAAKEAAAKEAAAKEAAAKGGTLGIEDEYRLHETSTEPDVSLGSTWLSDFPQAWAETGGMGLAVRQAPLIIPLKATSTPVSIQQYPMSHEARLGIKPHIQRLLDQGILVPCQSPWNTPLLPVKKPGTNDYRPVQDLREVNKRVEDIHPTVPNPYNLLSGLPPSHQWYTVLDLKDAFFCLRLHPTSQPLFAFEWRDPGMGISGQLTWTRLPQGFKNSPTLFNEALHRDLADFRIQHPDLILLQYVDDILLAATSELDCQQGTRALLQTLGDLGYRASAKKAQICQKQVKYLGYLLREGQRWLTEARKETVMGQPVPKTPRQLREFLGTAGFCRLWIPGFAEMAAPLYPLTKPGTLFSWGPDQQKAYQEIKQALLTAPALGLPDLTKPFELFVDEKQGYAKGVLTQKLGPWRRPVAYLSKKLDPVAAGWPPCLRMVAAIAVLTKDAGKLTMGQPLVILAPHAVEALVKQPPDRWLSNARMTHYQAMLLDTDRVQFGPVVALNPATLLPLPEEGAPHDCLEILAETHGTRPDLTDQPIPDADHTWYTDGSSFLQEGQRKAGAAVTTETEVIWAGALPAGTSAQRAELIALTQALKMAEGKRLNVYTDSRYAFATAHIHGEIYRRRGWLTSEGREIKNKSEILALLKALFLPKRLSIIHCLGHQKGDSAEARGNRLADQAAREAAIKTPPDTSTLLAGKRTADGSEFEKRTADGSEFESPKKKAKVE

SEQ ID NO: 2189 - protein, 2115 aa, synthetic construct
MPAAKRVKLDGGDKKYSIGLDIGTNSVGWAVITDEYKVPSKKFKVLGNTDRHSIKKNLIGALLFDSGETAEATRLKRTARRRYTRRKNRICYLQEIFSNEMAKVDDSFFHRLEESFLVEEDKKHERHPIFGNIVDEVAYHEKYPTIYHLRKKLVDSTDKADLRLIYLALAHMIKFRGHFLIEGDLNPDNSDVDKLFIQLVQTYNQLFEENPINASGVDAKAILSARLSKSRRLENLIAQLPGEKKNGLFGNLIALSLGLTPNFKSNFDLAEDAKLQLSKDTYDDDLDNLLAQIGDQYADLFLAAKNLSDAILLSDILRVNTEITKAPLSASMIKRYDEHHQDLTLLKALVRQQLPEKYKEIFFDQSKNGYAGYIDGGASQEEFYKFIKPILEKMDGTEELLVKLNREDLLRKQRTFDNGSIPHQIHLGELHAILRRQEDFYPFLKDNREKIEKILTFRIPYYVGPLARGNSRFAWMTRKSEETITPWNFEEVVDKGASAQSFIERMTNFDKNLPNEKVLPKHSLLYEYFTVYNELTKVKYVTEGMRKPAFLSGEQKKAIVDLLFKTNRKVTVKQLKEDYFKKIECFDSVEISGVEDRFNASLGTYHDLLKIIKDKDFLDNEENEDILEDIVLTLTLFEDREMIEERLKTYAHLFDDKVMKQLKRRRYTGWGRLSRKLINGIRDKQSGKTILDFLKSDGFANRNFMQLIHDDSLTFKEDIQKAQVSGQGDSLHEHIANLAGSPAIKKGILQTVKVVDELVKVMGRHKPENIVIEMARENQTTQKGQKNSRERMKRIEEGIKELGSQILKEHPVENTQLQNEKLYLYYLQNGRDMYVDQELDINRLSDYDVDHIVPQSFLKDDSIDNKVLTRSDKARGKSDNVPSEEVVKKMKNYWRQLLNAKLITQRKFDNLTKAERGGLSELDKAGFIKRQLVETRQITKHVAQILDSRMNTKYDENDKLIREVKVITLKSKLVSDFRKDFQFYKVREINNYHHAHDAYLNAVVGTALIKKYPKLESEFVYGDYKVYDVRKMIAKSEQEIGKATAKYFFYSNIMNFFKTEITLANGEIRKRPLIETNGETGEIVWDKGRDFATVRKVLSMPQVNIVKKTEVQTGGFSKESILPKRNSDKLIARKKDWDPKKYGGFDSPTVAYSVLVVAKVEKGKSKKLKSVKELLGITIMERSSFEKNPIDFLEAKGYKEVKKDLIIKLPKYSLFELENGRKRMLASAGELQKGNELALPSKYVNFLYLASHYEKLKGSPEDNEQKQLFVEQHKHYLDEIIEQISEFSKRVILADANLDKVLSAYNKHRDKPIREQAENIIHLFTLTNLGAPAAFKYFDTTIDRKRYTSTKEVLDATLIHQSITGLYETRIDLSQLGGDGGEAAAKEAAAKEAAAKEAAAKEAAAKEAAAKGGTLGIEDEYRLHETSTEPDVSLGSTWLSDFPQAWAETGGMGLAVRQAPLIIPLKATSTPVSIQQYPMSHEARLGIKPHIQRLLDQGILVPCQSPWNTPLLPVKKPGTNDYRPVQDLREVNKRVEDIHPTVPNPYNLLSGLPPSHQWYTVLDLKDAFFCLRLHPTSQPLFAFEWRDPGMGISGQLTWTRLPQGFKNSPTLFNEALHRDLADFRIQHPDLILLQYVDDILLAATSELDCQQGTRALLQTLGDLGYRASAKKAQICQKQVKYLGYLLREGQRWLTEARKETVMGQPVPKTPRQLREFLGTAGFCRLWIPGFAEMAAPLYPLTKPGTLFSWGPDQQKAYQEIKQALLTAPALGLPDLTKPFELFVDEKQGYAKGVLTQKLGPWRRPVAYLSKKLDPVAAGWPPCLRMVAAIAVLTKDAGKLTMGQPLVILAPHAVEALVKQPPDRWLSNARMTHYQAMLLDTDRVQFGPVVALNPATLLPLPEEGAPHDCLEILAETHGTRPDLTDQPIPDADHTWYTDGSSFLQEGQRKAGAAVTTETEVIWAGALPAGTSAQRAELIALTQALKMAEGKRLNVYTDSRYAFATAHIHGEIYRRRGWLTSEGREIKNKSEILALLKALFLPKRLSIIHCLGHQKGDSAEARGNRLADQAAREAAIKTPPDTSTLLAGKRTADGSEFEKRTADGSEFESPKKKAKVE

SEQ ID NO: 2190 - protein, 2096 aa, synthetic construct
MPAAKRVKLDGGDKKYSIGLDIGTNSVGWAVITDEYKVPSKKFKVLGNTDRHSIKKNLIGALLFDSGETAEATRLKRTARRRYTRRKNRICYLQEIFSNEMAKVDDSFFHRLEESFLVEEDKKHERHPIFGNIVDEVAYHEKYPTIYHLRKKLVDSTDKADLRLIYLALAHMIKFRGHFLIEGDLNPDNSDVDKLFIQLVQTYNQLFEENPINASGVDAKAILSARLSKSRRLENLIAQLPGEKKNGLFGNLIALSLGLTPNFKSNFDLAEDAKLQLSKDTYDDDLDNLLAQIGDQYADLFLAAKNLSDAILLSDILRVNTEITKAPLSASMIKRYDEHHQDLTLLKALVRQQLPEKYKEIFFDQSKNGYAGYIDGGASQEEFYKFIKPILEKMDGTEELLVKLNREDLLRKQRTFDNGSIPHQIHLGELHAILRRQEDFYPFLKDNREKIEKILTFRIPYYVGPLARGNSRFAWMTRKSEETITPWNFEEVVDKGASAQSFIERMTNFDKNLPNEKVLPKHSLLYEYFTVYNELTKVKYVTEGMRKPAFLSGEQKKAIVDLLFKTNRKVTVKQLKEDYFKKIECFDSVEISGVEDRFNASLGTYHDLLKIIKDKDFLDNEENEDILEDIVLTLTLFEDREMIEERLKTYAHLFDDKVMKQLKRRRYTGWGRLSRKLINGIRDKQSGKTILDFLKSDGFANRNFMQLIHDDSLTFKEDIQKAQVSGQGDSLHEHIANLAGSPAIKKGILQTVKVVDELVKVMGRHKPENIVIEMARENQTTQKGQKNSRERMKRIEEGIKELGSQILKEHPVENTQLQNEKLYLYYLQNGRDMYVDQELDINRLSDYDVDHIVPQSFLKDDSIDNKVLTRSDKARGKSDNVPSEEVVKKMKNYWRQLLNAKLITQRKFDNLTKAERGGLSELDKAGFIKRQLVETRQITKHVAQILDSRMNTKYDENDKLIREVKVITLKSKLVSDFRKDFQFYKVREINNYHHAHDAYLNAVVGTALIKKYPKLESEFVYGDYKVYDVRKMIAKSEQEIGKATAKYFFYSNIMNFFKTEITLANGEIRKRPLIETNGETGEIVWDKGRDFATVRKVLSMPQVNIVKKTEVQTGGFSKESILPKRNSDKLIARKKDWDPKKYGGFDSPTVAYSVLVVAKVEKGKSKKLKSVKELLGITIMERSSFEKNPIDFLEAKGYKEVKKDLIIKLPKYSLFELENGRKRMLASAGELQKGNELALPSKYVNFLYLASHYEKLKGSPEDNEQKQLFVEQHKHYLDEIIEQISEFSKRVILADANLDKVLSAYNKHRDKPIREQAENIIHLFTLTNLGAPAAFKYFDTTIDRKRYTSTKEVLDATLIHQSITGLYETRIDLSQLGGDGGEAAAKGSSGGSGGTLGIEDEYRLHETSTEPDVSLGSTWLSDFPQAWAETGGMGLAVRQAPLIIPLKATSTPVSIQQYPMSHEARLGIKPHIQRLLDQGILVPCQSPWNTPLLPVKKPGTNDYRPVQDLREVNKRVEDIHPTVPNPYNLLSGLPPSHQWYTVLDLKDAFFCLRLHPTSQPLFAFEWRDPGMGISGQLTWTRLPQGFKNSPTLFNEALHRDLADFRIQHPDLILLQYVDDILLAATSELDCQQGTRALLQTLGDLGYRASAKKAQICQKQVKYLGYLLREGQRWLTEARKETVMGQPVPKTPRQLREFLGTAGFCRLWIPGFAEMAAPLYPLTKPGTLFSWGPDQQKAYQEIKQALLTAPALGLPDLTKPFELFVDEKQGYAKGVLTQKLGPWRRPVAYLSKKLDPVAAGWPPCLRMVAAIAVLTKDAGKLTMGQPLVILAPHAVEALVKQPPDRWLSNARMTHYQAMLLDTDRVQFGPVVALNPATLLPLPEEGAPHDCLEILAETHGTRPDLTDQPIPDADHTWYTDGSSFLQEGQRKAGAAVTTETEVIWAGALPAGTSAQRAELIALTQALKMAEGKRLNVYTDSRYAFATAHIHGEIYRRRGWLTSEGREIKNKSEILALLKALFLPKRLSIIHCLGHQKGDSAEARGNRLADQAAREAAIKTPPDTSTLLAGKRTADGSEFEKRTADGSEFESPKKKAKVE

SEQ ID NO: 2191 - protein, 2105 aa, synthetic construct; identical to SEQ ID NO: 2070

SEQ ID NO: 2192 - protein, 2096 aa, synthetic construct
MPAAKRVKLDGGDKKYSIGLDIGTNSVGWAVITDEYKVPSKKFKVLGNTDRHSIKKNLIGALLFDSGETAEATRLKRTARRRYTRRKNRICYLQEIFSNEMAKVDDSFFHRLEESFLVEEDKKHERHPIFGNIVDEVAYHEKYPTIYHLRKKLVDSTDKADLRLIYLALAHMIKFRGHFLIEGDLNPDNSDVDKLFIQLVQTYNQLFEENPINASGVDAKAILSARLSKSRRLENLIAQLPGEKKNGLFGNLIALSLGLTPNFKSNFDLAEDAKLQLSKDTYDDDLDNLLAQIGDQYADLFLAAKNLSDAILLSDILRVNTEITKAPLSASMIKRYDEHHQDLTLLKALVRQQLPEKYKEIFFDQSKNGYAGYIDGGASQEEFYKFIKPILEKMDGTEELLVKLNREDLLRKQRTFDNGSIPHQIHLGELHAILRRQEDFYPFLKDNREKIEKILTFRIPYYVGPLARGNSRFAWMTRKSEETITPWNFEEVVDKGASAQSFIERMTNFDKNLPNEKVLPKHSLLYEYFTVYNELTKVKYVTEGMRKPAFLSGEQKKAIVDLLFKTNRKVTVKQLKEDYFKKIECFDSVEISGVEDRFNASLGTYHDLLKIIKDKDFLDNEENEDILEDIVLTLTLFEDREMIEERLKTYAHLFDDKVMKQLKRRRYTGWGRLSRKLINGIRDKQSGKTILDFLKSDGFANRNFMQLIHDDSLTFKEDIQKAQVSGQGDSLHEHIANLAGSPAIKKGILQTVKVVDELVKVMGRHKPENIVIEMARENQTTQKGQKNSRERMKRIEEGIKELGSQILKEHPVENTQLQNEKLYLYYLQNGRDMYVDQELDINRLSDYDVDHIVPQSFLKDDSIDNKVLTRSDKARGKSDNVPSEEVVKKMKNYWRQLLNAKLITQRKFDNLTKAERGGLSELDKAGFIKRQLVETRQITKHVAQILDSRMNTKYDENDKLIREVKVITLKSKLVSDFRKDFQFYKVREINNYHHAHDAYLNAVVGTALIKKYPKLESEFVYGDYKVYDVRKMIAKSEQEIGKATAKYFFYSNIMNFFKTEITLANGEIRKRPLIETNGETGEIVWDKGRDFATVRKVLSMPQVNIVKKTEVQTGGFSKESILPKRNSDKLIARKKDWDPKKYGGFDSPTVAYSVLVVAKVEKGKSKKLKSVKELLGITIMERSSFEKNPIDFLEAKGYKEVKKDLIIKLPKYSLFELENGRKRMLASAGELQKGNELALPSKYVNFLYLASHYEKLKGSPEDNEQKQLFVEQHKHYLDEIIEQISEFSKRVILADANLDKVLSAYNKHRDKPIREQAENIIHLFTLTNLGAPAAFKYFDTTIDRKRYTSTKEVLDATLIHQSITGLYETRIDLSQLGGDGGGGSPAPEAAAKGGTLGIEDEYRLHETSTEPDVSLGSTWLSDFPQAWAETGGMGLAVRQAPLIIPLKATSTPVSIQQYPMSHEARLGIKPHIQRLLDQGILVPCQSPWNTPLLPVKKPGTNDYRPVQDLREVNKRVEDIHPTVPNPYNLLSGLPPSHQWYTVLDLKDAFFCLRLHPTSQPLFAFEWRDPGMGISGQLTWTRLPQGFKNSPTLFNEALHRDLADFRIQHPDLILLQYVDDILLAATSELDCQQGTRALLQTLGDLGYRASAKKAQICQKQVKYLGYLLREGQRWLTEARKETVMGQPVPKTPRQLREFLGTAGFCRLWIPGFAEMAAPLYPLTKPGTLFSWGPDQQKAYQEIKQALLTAPALGLPDLTKPFELFVDEKQGYAKGVLTQKLGPWRRPVAYLSKKLDPVAAGWPPCLRMVAAIAVLTKDAGKLTMGQPLVILAPHAVEALVKQPPDRWLSNARMTHYQAMLLDTDRVQFGPVVALNPATLLPLPEEGAPHDCLEILAETHGTRPDLTDQPIPDADHTWYTDGSSFLQEGQRKAGAAVTTETEVIWAGALPAGTSAQRAELIALTQALKMAEGKRLNVYTDSRYAFATAHIHGEIYRRRGWLTSEGREIKNKSEILALLKALFLPKRLSIIHCLGHQKGDSAEARGNRLADQAAREAAIKTPPDTSTLLAGKRTADGSEFEKRTADGSEFESPKKKAKVE

SEQ ID NO: 2193 - protein, 2115 aa, synthetic construct
MPAAKRVKLDGGDKKYSIGLDIGTNSVGWAVITDEYKVPSKKFKVLGNTDRHSIKKNLIGALLFDSGETAEATRLKRTARRRYTRRKNRICYLQEIFSNEMAKVDDSFFHRLEESFLVEEDKKHERHPIFGNIVDEVAYHEKYPTIYHLRKKLVDSTDKADLRLIYLALAHMIKFRGHFLIEGDLNPDNSDVDKLFIQLVQTYNQLFEENPINASGVDAKAILSARLSKSRRLENLIAQLPGEKKNGLFGNLIALSLGLTPNFKSNFDLAEDAKLQLSKDTYDDDLDNLLAQIGDQYADLFLAAKNLSDAILLSDILRVNTEITKAPLSASMIKRYDEHHQDLTLLKALVRQQLPEKYKEIFFDQSKNGYAGYIDGGASQEEFYKFIKPILEKMDGTEELLVKLNREDLLRKQRTFDNGSIPHQIHLGELHAILRRQEDFYPFLKDNREKIEKILTFRIPYYVGPLARGNSRFAWMTRKSEETITPWNFEEVVDKGASAQSFIERMTNFDKNLPNEKVLPKHSLLYEYFTVYNELTKVKYVTEGMRKPAFLSGEQKKAIVDLLFKTNRKVTVKQLKEDYFKKIECFDSVEISGVEDRFNASLGTYHDLLKIIKDKDFLDNEENEDILEDIVLTLTLFEDREMIEERLKTYAHLFDDKVMKQLKRRRYTGWGRLSRKLINGIRDKQSGKTILDFLKSDGFANRNFMQLIHDDSLTFKEDIQKAQVSGQGDSLHEHIANLAGSPAIKKGILQTVKVVDELVKVMGRHKPENIVIEMARENQTTQKGQKNSRERMKRIEEGIKELGSQILKEHPVENTQLQNEKLYLYYLQNGRDMYVDQELDINRLSDYDVDHIVPQSFLKDDSIDNKVLTRSDKARGKSDNVPSEEVVKKMKNYWRQLLNAKLITQRKFDNLTKAERGGLSELDKAGFIKRQLVETRQITKHVAQILDSRMNTKYDENDKLIREVKVITLKSKLVSDFRKDFQFYKVREINNYHHAHDAYLNAVVGTALIKKYPKLESEFVYGDYKVYDVRKMIAKSEQEIGKATAKYFFYSNIMNFFKTEITLANGEIRKRPLIETNGETGEIVWDKGRDFATVRKVLSMPQVNIVKKTEVQTGGFSKESILPKRNSDKLIARKKDWDPKKYGGFDSPTVAYSVLVVAKVEKGKSKKLKSVKELLGITIMERSSFEKNPIDFLEAKGYKEVKKDLIIKLPKYSLFELENGRKRMLASAGELQKGNELALPSKYVNFLYLASHYEKLKGSPEDNEQKQLFVEQHKHYLDEIIEQISEFSKRVILADANLDKVLSAYNKHRDKPIREQAENIIHLFTLTNLGAPAAFKYFDTTIDRKRYTSTKEVLDATLIHQSITGLYETRIDLSQLGGDGGGGGGSGGGGSGGGGSGGGGSGGGGSGGGGSGGTLGIEDEYRLHETSTEPDVSLGSTWLSDFPQAWAETGGMGLAVRQAPLIIPLKATSTPVSIQQYPMSHEARLGIKPHIQRLLDQGILVPCQSPWNTPLLPVKKPGTNDYRPVQDLREVNKRVEDIHPTVPNPYNLLSGLPPSHQWYTVLDLKDAFFCLRLHPTSQPLFAFEWRDPGMGISGQLTWTRLPQGFKNSPTLFNEALHRDLADFRIQHPDLILLQYVDDILLAATSELDCQQGTRALLQTLGDLGYRASAKKAQICQKQVKYLGYLLREGQRWLTEARKETVMGQPVPKTPRQLREFLGTAGFCRLWIPGFAEMAAPLYPLTKPGTLFSWGPDQQKAYQEIKQALLTAPALGLPDLTKPFELFVDEKQGYAKGVLTQKLGPWRRPVAYLSKKLDPVAAGWPPCLRMVAAIAVLTKDAGKLTMGQPLVILAPHAVEALVKQPPDRWLSNARMTHYQAMLLDTDRVQFGPVVALNPATLLPLPEEGAPHDCLEILAETHGTRPDLTDQPIPDADHTWYTDGSSFLQEGQRKAGAAVTTETEVIWAGALPAGTSAQRAELIALTQALKMAEGKRLNVYTDSRYAFATAHIHGEIYRRRGWLTSEGREIKNKSEILALLKALFLPKRLSIIHCLGHQKGDSAEARGNRLADQAAREAAIKTPPDTSTLLAGKRTADGSEFEKRTADGSEFESPKKKAKVE

SEQ ID NO: 2194 - protein, 2131 aa, synthetic construct
MPAAKRVKLDGGDKKYSIGLDIGTNSVGWAVITDEYKVPSKKFKVLGNTDRHSIKKNLIGALLFDSGETAEATRLKRTARRRYTRRKNRICYLQEIFSNEMAKVDDSFFHRLEESFLVEEDKKHERHPIFGNIVDEVAYHEKYPTIYHLRKKLVDSTDKADLRLIYLALAHMIKFRGHFLIEGDLNPDNSDVDKLFIQLVQTYNQLFEENPINASGVDAKAILSARLSKSRRLENLIAQLPGEKKNGLFGNLIALSLGLTPNFKSNFDLAEDAKLQLSKDTYDDDLDNLLAQIGDQYADLFLAAKNLSDAILLSDILRVNTEITKAPLSASMIKRYDEHHQDLTLLKALVRQQLPEKYKEIFFDQSKNGYAGYIDGGASQEEFYKFIKPILEKMDGTEELLVKLNREDLLRKQRTFDNGSIPHQIHLGELHAILRRQEDFYPFLKDNREKIEKILTFRIPYYVGPLARGNSRFAWMTRKSEETITPWNFEEVVDKGASAQSFIERMTNFDKNLPNEKVLPKHSLLYEYFTVYNELTKVKYVTEGMRKPAFLSGEQKKAIVDLLFKTNRKVTVKQLKEDYFKKIECFDSVEISGVEDRFNASLGTYHDLLKIIKDKDFLDNEENEDILEDIVLTLTLFEDREMIEERLKTYAHLFDDKVMKQLKRRRYTGWGRLSRKLINGIRDKQSGKTILDFLKSDGFANRNFMQLIHDDSLTFKEDIQKAQVSGQGDSLHEHIANLAGSPAIKKGILQTVKVVDELVKVMGRHKPENIVIEMARENQTTQKGQKNSRERMKRIEEGIKELGSQILKEHPVENTQLQNEKLYLYYLQNGRDMYVDQELDINRLSDYDVDHIVPQSFLKDDSIDNKVLTRSDKARGKSDNVPSEEVVKKMKNYWRQLLNAKLITQRKFDNLTKAERGGLSELDKAGFIKRQLVETRQITKHVAQILDSRMNTKYDENDKLIREVKVITLKSKLVSDFRKDFQFYKVREINNYHHAHDAYLNAVVGTALIKKYPKLESEFVYGDYKVYDVRKMIAKSEQEIGKATAKYFFYSNIMNFFKTEITLANGEIRKRPLIETNGETGEIVWDKGRDFATVRKVLSMPQVNIVKKTEVQTGGFSKESILPKRNSDKLIARKKDWDPKKYGGFDSPTVAYSVLVVAKVEKGKSKKLKSVKELLGITIMERSSFEKNPIDFLEAKGYKEVKKDLIIKLPKYSLFELENGRKRMLASAGELQKGNELALPSKYVNFLYLASHYEKLKGSPEDNEQKQLFVEQHKHYLDEIIEQISEFSKRVILADANLDKVLSAYNKHRDKPIREQAENIIHLFTLTNLGAPAAFKYFDTTIDRKRYTSTKEVLDATLIHQSITGLYETRIDLSQLGGDGGAEAAAKEAAAKEAAAKEAAAKALEAEAAAKEAAAKEAAAKEAAAKAGGTLGIEDEYRLHETSTEPDVSLGSTWLSDFPQAWAETGGMGLAVRQAPLIIPLKATSTPVSIQQYPMSHEARLGIKPHIQRLLDQGILVPCQSPWNTPLLPVKKPGTNDYRPVQDLREVNKRVEDIHPTVPNPYNLLSGLPPSHQWYTVLDLKDAFFCLRLHPTSQPLFAFEWRDPGMGISGQLTWTRLPQGFKNSPTLFNEALHRDLADFRIQHPDLILLQYVDDILLAATSELDCQQGTRALLQTLGDLGYRASAKKAQICQKQVKYLGYLLREGQRWLTEARKETVMGQPVPKTPRQLREFLGTAGFCRLWIPGFAEMAAPLYPLTKPGTLFSWGPDQQKAYQEIKQALLTAPALGLPDLTKPFELFVDEKQGYAKGVLTQKLGPWRRPVAYLSKKLDPVAAGWPPCLRMVAAIAVLTKDAGKLTMGQPLVILAPHAVEALVKQPPDRWLSNARMTHYQAMLLDTDRVQFGPVVALNPATLLPLPEEGAPHDCLEILAETHGTRPDLTDQPIPDADHTWYTDGSSFLQEGQRKAGAAVTTETEVIWAGALPAGTSAQRAELIALTQALKMAEGKRLNVYTDSRYAFATAHIHGEIYRRRGWLTSEGREIKNKSEILALLKALFLPKRLSIIHCLGHQKGDSAEARGNRLADQAAREAAIKTPPDTSTLLAGKRTADGSEFEKRTADGSEFESPKKKAKVE

SEQ ID NO: 2195 - protein, 2096 aa, synthetic construct; identical to SEQ ID NO: 2076

SEQ ID NO: 2196 - protein, 2096 aa, synthetic construct
MPAAKRVKLDGGDKKYSIGLDIGTNSVGWAVITDEYKVPSKKFKVLGNTDRHSIKKNLIGALLFDSGETAEATRLKRTARRRYTRRKNRICYLQEIFSNEMAKVDDSFFHRLEESFLVEEDKKHERHPIFGNIVDEVAYHEKYPTIYHLRKKLVDSTDKADLRLIYLALAHMIKFRGHFLIEGDLNPDNSDVDKLFIQLVQTYNQLFEENPINASGVDAKAILSARLSKSRRLENLIAQLPGEKKNGLFGNLIALSLGLTPNFKSNFDLAEDAKLQLSKDTYDDDLDNLLAQIGDQYADLFLAAKNLSDAILLSDILRVNTEITKAPLSASMIKRYDEHHQDLTLLKALVRQQLPEKYKEIFFDQSKNGYAGYIDGGASQEEFYKFIKPILEKMDGTEELLVKLNREDLLRKQRTFDNGSIPHQIHLGELHAILRRQEDFYPFLKDNREKIEKILTFRIPYYVGPLARGNSRFAWMTRKSEETITPWNFEEVVDKGASAQSFIERMTNFDKNLPNEKVLPKHSLLYEYFTVYNELTKVKYVTEGMRKPAFLSGEQKKAIVDLLFKTNRKVTVKQLKEDYFKKIECFDSVEISGVEDRFNASLGTYHDLLKIIKDKDFLDNEENEDILEDIVLTLTLFEDREMIEERLKTYAHLFDDKVMKQLKRRRYTGWGRLSRKLINGIRDKQSGKTILDFLKSDGFANRNFMQLIHDDSLTFKEDIQKAQVSGQGDSLHEHIANLAGSPAIKKGILQTVKVVDELVKVMGRHKPENIVIEMARENQTTQKGQKNSRERMKRIEEGIKELGSQILKEHPVENTQLQNEKLYLYYLQNGRDMYVDQELDINRLSDYDVDHIVPQSFLKDDSIDNKVLTRSDKARGKSDNVPSEEVVKKMKNYWRQLLNAKLITQRKFDNLTKAERGGLSELDKAGFIKRQLVETRQITKHVAQILDSRMNTKYDENDKLIREVKVITLKSKLVSDFRKDFQFYKVREINNYHHAHDAYLNAVVGTALIKKYPKLESEFVYGDYKVYDVRKMIAKSEQEIGKATAKYFFYSNIMNFFKTEITLANGEIRKRPLIETNGETGEIVWDKGRDFATVRKVLSMPQVNIVKKTEVQTGGFSKESILPKRNSDKLIARKKDWDPKKYGGFDSPTVAYSVLVVAKVEKGKSKKLKSVKELLGITIMERSSFEKNPIDFLEAKGYKEVKKDLIIKLPKYSLFELENGRKRMLASAGELQKGNELALPSKYVNFLYLASHYEKLKGSPEDNEQKQLFVEQHKHYLDEIIEQISEFSKRVILADANLDKVLSAYNKHRDKPIREQAENIIHLFTLTNLGAPAAFKYFDTTIDRKRYTSTKEVLDATLIHQSITGLYETRIDLSQLGGDGGGGGGSSEAAAKGGTLGIEDEYRLHETSTEPDVSLGSTWLSDFPQAWAETGGMGLAVRQAPLIIPLKATSTPVSIQQYPMSHEARLGIKPHIQRLLDQGILVPCQSPWNTPLLPVKKPGTNDYRPVQDLREVNKRVEDIHPTVPNPYNLLSGLPPSHQWYTVLDLKDAFFCLRLHPTSQPLFAFEWRDPGMGISGQLTWTRLPQGFKNSPTLFNEALHRDLADFRIQHPDLILLQYVDDILLAATSELDCQQGTRALLQTLGDLGYRASAKKAQICQKQVKYLGYLLREGQRWLTEARKETVMGQPVPKTPRQLREFLGTAGFCRLWIPGFAEMAAPLYPLTKPGTLFSWGPDQQKAYQEIKQALLTAPALGLPDLTKPFELFVDEKQGYAKGVLTQKLGPWRRPVAYLSKKLDPVAAGWPPCLRMVAAIAVLTKDAGKLTMGQPLVILAPHAVEALVKQPPDRWLSNARMTHYQAMLLDTDRVQFGPVVALNPATLLPLPEEGAPHDCLEILAETHGTRPDLTDQPIPDADHTWYTDGSSFLQEGQRKAGAAVTTETEVIWAGALPAGTSAQRAELIALTQALKMAEGKRLNVYTDSRYAFATAHIHGEIYRRRGWLTSEGREIKNKSEILALLKALFLPKRLSIIHCLGHQKGDSAEARGNRLADQAAREAAIKTPPDTSTLLAGKRTADGSEFEKRTADGSEFESPKKKAKVE

SEQ ID NO: 2197 - protein, 2096 aa, synthetic construct
MPAAKRVKLDGGDKKYSIGLDIGTNSVGWAVITDEYKVPSKKFKVLGNTDRHSIKKNLIGALLFDSGETAEATRLKRTARRRYTRRKNRICYLQEIFSNEMAKVDDSFFHRLEESFLVEEDKKHERHPIFGNIVDEVAYHEKYPTIYHLRKKLVDSTDKADLRLIYLALAHMIKFRGHFLIEGDLNPDNSDVDKLFIQLVQTYNQLFEENPINASGVDAKAILSARLSKSRRLENLIAQLPGEKKNGLFGNLIALSLGLTPNFKSNFDLAEDAKLQLSKDTYDDDLDNLLAQIGDQYADLFLAAKNLSDAILLSDILRVNTEITKAPLSASMIKRYDEHHQDLTLLKALVRQQLPEKYKEIFFDQSKNGYAGYIDGGASQEEFYKFIKPILEKMDGTEELLVKLNREDLLRKQRTFDNGSIPHQIHLGELHAILRRQEDFYPFLKDNREKIEKILTFRIPYYVGPLARGNSRFAWMTRKSEETITPWNFEEVVDKGASAQSFIERMTNFDKNLPNEKVLPKHSLLYEYFTVYNELTKVKYVTEGMRKPAFLSGEQKKAIVDLLFKTNRKVTVKQLKEDYFKKIECFDSVEISGVEDRFNASLGTYHDLLKIIKDKDFLDNEENEDILEDIVLTLTLFEDREMIEERLKTYAHLFDDKVMKQLKRRRYTGWGRLSRKLINGIRDKQSGKTILDFLKSDGFANRNFMQLIHDDSLTFKEDIQKAQVSGQGDSLHEHIANLAGSPAIKKGILQTVKVVDELVKVMGRHKPENIVIEMARENQTTQKGQKNSRERMKRIEEGIKELGSQILKEHPVENTQLQNEKLYLYYLQNGRDMYVDQELDINRLSDYDVDHIVPQSFLKDDSIDNKVLTRSDKARGKSDNVPSEEVVKKMKNYWRQLLNAKLITQRKFDNLTKAERGGLSELDKAGFIKRQLVETRQITKHVAQILDSRMNTKYDENDKLIREVKVITLKSKLVSDFRKDFQFYKVREINNYHHAHDAYLNAVVGTALIKKYPKLESEFVYGDYKVYDVRKMIAKSEQEIGKATAKYFFYSNIMNFFKTEITLANGEIRKRPLIETNGETGEIVWDKGRDFATVRKVLSMPQVNIVKKTEVQTGGFSKESILPKRNSDKLIARKKDWDPKKYGGFDSPTVAYSVLVVAKVEKGKSKKLKSVKELLGITIMERSSFEKNPIDFLEAKGYKEVKKDLIIKLPKYSLFELENGRKRMLASAGELQKGNELALPSKYVNFLYLASHYEKLKGSPEDNEQKQLFVEQHKHYLDEIIEQISEFSKRVILADANLDKVLSAYNKHRDKPIREQAENIIHLFTLTNLGAPAAFKYFDTTIDRKRYTSTKEVLDATLIHQSITGLYETRIDLSQLGGDGGPAPEAAAKGGGGGTLGIEDEYRLHETSTEPDVSLGSTWLSDFPQAWAETGGMGLAVRQAPLIIPLKATSTPVSIQQYPMSHEARLGIKPHIQRLLDQGILVPCQSPWNTPLLPVKKPGTNDYRPVQDLREVNKRVEDIHPTVPNPYNLLSGLPPSHQWYTVLDLKDAFFCLRLHPTSQPLFAFEWRDPGMGISGQLTWTRLPQGFKNSPTLFNEALHRDLADFRIQHPDLILLQYVDDILLAATSELDCQQGTRALLQTLGDLGYRASAKKAQICQKQVKYLGYLLREGQRWLTEARKETVMGQPVPKTPRQLREFLGTAGFCRLWIPGFAEMAAPLYPLTKPGTLFSWGPDQQKAYQEIKQALLTAPALGLPDLTKPFELFVDEKQGYAKGVLTQKLGPWRRPVAYLSKKLDPVAAGWPPCLRMVAAIAVLTKDAGKLTMGQPLVILAPHAVEALVKQPPDRWLSNARMTHYQAMLLDTDRVQFGPVVALNPATLLPLPEEGAPHDCLEILAETHGTRPDLTDQPIPDADHTWYTDGSSFLQEGQRKAGAAVTTETEVIWAGALPAGTSAQRAELIALTQALKMAEGKRLNVYTDSRYAFATAHIHGEIYRRRGWLTSEGREIKNKSEILALLKALFLPKRLSIIHCLGHQKGDSAEARGNRLADQAAREAAIKTPPDTSTLLAGKRTADGSEFEKRTADGSEFESPKKKAKVE

SEQ ID NO: 2198 - protein, 2090 aa, synthetic construct
MPAAKRVKLDGGDKKYSIGLDIGTNSVGWAVITDEYKVPSKKFKVLGNTDRHSIKKNLIGALLFDSGETAEATRLKRTARRRYTRRKNRICYLQEIFSNEMAKVDDSFFHRLEESFLVEEDKKHERHPIFGNIVDEVAYHEKYPTIYHLRKKLVDSTDKADLRLIYLALAHMIKFRGHFLIEGDLNPDNSDVDKLFIQLVQTYNQLFEENPINASGVDAKAILSARLSKSRRLENLIAQLPGEKKNGLFGNLIALSLGLTPNFKSNFDLAEDAKLQLSKDTYDDDLDNLLAQIGDQYADLFLAAKNLSDAILLSDILRVNTEITKAPLSASMIKRYDEHHQDLTLLKALVRQQLPEKYKEIFFDQSKNGYAGYIDGGASQEEFYKFIKPILEKMDGTEELLVKLNREDLLRKQRTFDNGSIPHQIHLGELHAILRRQEDFYPFLKDNREKIEKILTFRIPYYVGPLARGNSRFAWMTRKSEETITPWNFEEVVDKGASAQSFIERMTNFDKNLPNEKVLPKHSLLYEYFTVYNELTKVKYVTEGMRKPAFLSGEQKKAIVDLLFKTNRKVTVKQLKEDYFKKIECFDSVEISGVEDRFNASLGTYHDLLKIIKDKDFLDNEENEDILEDIVLTLTLFEDREMIEERLKTYAHLFDDKVMKQLKRRRYTGWGRLSRKLINGIRDKQSGKTILDFLKSDGFANRNFMQLIHDDSLTFKEDIQKAQVSGQGDSLHEHIANLAGSPAIKKGILQTVKVVDELVKVMGRHKPENIVIEMARENQTTQKGQKNSRERMKRIEEGIKELGSQILKEHPVENTQLQNEKLYLYYLQNGRDMYVDQELDINRLSDYDVDHIVPQSFLKDDSIDNKVLTRSDKARGKSDNVPSEEVVKKMKNYWRQLLNAKLITQRKFDNLTKAERGGLSELDKAGFIKRQLVETRQITKHVAQILDSRMNTKYDENDKLIREVKVITLKSKLVSDFRKDFQFYKVREINNYHHAHDAYLNAVVGTALIKKYPKLESEFVYGDYKVYDVRKMIAKSEQEIGKATAKYFFYSNIMNFFKTEITLANGEIRKRPLIETNGETGEIVWDKGRDFATVRKVLSMPQVNIVKKTEVQTGGFSKESILPKRNSDKLIARKKDWDPKKYGGFDSPTVAYSVLVVAKVEKGKSKKLKSVKELLGITIMERSSFEKNPIDFLEAKGYKEVKKDLIIKLPKYSLFELENGRKRMLASAGELQKGNELALPSKYVNFLYLASHYEKLKGSPEDNEQKQLFVEQHKHYLDEIIEQISEFSKRVILADANLDKVLSAYNKHRDKPIREQAENIIHLFTLTNLGAPAAFKYFDTTIDRKRYTSTKEVLDATLIHQSITGLYETRIDLSQLGGDGGEAAAKGGTLGIEDEYRLHETSTEPDVSLGSTWLSDFPQAWAETGGMGLAVRQAPLIIPLKATSTPVSIQQYPMSHEARLGIKPHIQRLLDQGILVPCQSPWNTPLLPVKKPGTNDYRPVQDLREVNKRVEDIHPTVPNPYNLLSGLPPSHQWYTVLDLKDAFFCLRLHPTSQPLFAFEWRDPGMGISGQLTWTRLPQGFKNSPTLFNEALHRDLADFRIQHPDLILLQYVDDILLAATSELDCQQGTRALLQTLGDLGYRASAKKAQICQKQVKYLGYLLREGQRWLTEARKETVMGQPVPKTPRQLREFLGTAGFCRLWIPGFAEMAAPLYPLTKPGTLFSWGPDQQKAYQEIKQALLTAPALGLPDLTKPFELFVDEKQGYAKGVLTQKLGPWRRPVAYLSKKLDPVAAGWPPCLRMVAAIAVLTKDAGKLTMGQPLVILAPHAVEALVKQPPDRWLSNARMTHYQAMLLDTDRVQFGPVVALNPATLLPLPEEGAPHDCLEILAETHGTRPDLTDQPIPDADHTWYTDGSSFLQEGQRKAGAAVTTETEVIWAGALPAGTSAQRAELIALTQALKMAEGKRLNVYTDSRYAFATAHIHGEIYRRRGWLTSEGREIKNKSEILALLKALFLPKRLSIIHCLGHQKGDSAEARGNRLADQAAREAAIKTPPDTSTLLAGKRTADGSEFEKRTADGSEFESPKKKAKVE

SEQ ID NO: 2199 - protein, 2096 aa, synthetic construct
MPAAKRVKLDGGDKKYSIGLDIGTNSVGWAVITDEYKVPSKKFKVLGNTDRHSIKKNLIGALLFDSGETAEATRLKRTARRRYTRRKNRICYLQEIFSNEMAKVDDSFFHRLEESFLVEEDKKHERHPIFGNIVDEVAYHEKYPTIYHLRKKLVDSTDKADLRLIYLALAHMIKFRGHFLIEGDLNPDNSDVDKLFIQLVQTYNQLFEENPINASGVDAKAILSARLSKSRRLENLIAQLPGEKKNGLFGNLIALSLGLTPNFKSNFDLAEDAKLQLSKDTYDDDLDNLLAQIGDQYADLFLAAKNLSDAILLSDILRVNTEITKAPLSASMIKRYDEHHQDLTLLKALVRQQLPEKYKEIFFDQSKNGYAGYIDGGASQEEFYKFIKPILEKMDGTEELLVKLNREDLLRKQRTFDNGSIPHQIHLGELHAILRRQEDFYPFLKDNREKIEKILTFRIPYYVGPLARGNSRFAWMTRKSEETITPWNFEEVVDKGASAQSFIERMTNFDKNLPNEKVLPKHSLLYEYFTVYNELTKVKYVTEGMRKPAFLSGEQKKAIVDLLFKTNRKVTVKQLKEDYFKKIECFDSVEISGVEDRFNASLGTYHDLLKIIKDKDFLDNEENEDILEDIVLTLTLFEDREMIEERLKTYAHLFDDKVMKQLKRRRYTGWGRLSRKLINGIRDKQSGKTILDFLKSDGFANRNFMQLIHDDSLTFKEDIQKAQVSGQGDSLHEHIANLAGSPAIKKGILQTVKVVDELVKVMGRHKPENIVIEMARENQTTQKGQKNSRERMKRIEEGIKELGSQILKEHPVENTQLQNEKLYLYYLQNGRDMYVDQELDINRLSDYDVDHIVPQSFLKDDSIDNKVLTRSDKARGKSDNVPSEEVVKKMKNYWRQLLNAKLITQRKFDNLTKAERGGLSELDKAGFIKRQLVETRQITKHVAQILDSRMNTKYDENDKLIREVKVITLKSKLVSDFRKDFQFYKVREINNYHHAHDAYLNAVVGTALIKKYPKLESEFVYGDYKVYDVRKMIAKSEQEIGKATAKYFFYSNIMNFFKTEITLANGEIRKRPLIETNGETGEIVWDKGRDFATVRKVLSMPQVNIVKKTEVQTGGFSKESILPKRNSDKLIARKKDWDPKKYGGFDSPTVAYSVLVVAKVEKGKSKKLKSVKELLGITIMERSSFEKNPIDFLEAKGYKEVKKDLIIKLPKYSLFELENGRKRMLASAGELQKGNELALPSKYVNFLYLASHYEKLKGSPEDNEQKQLFVEQHKHYLDEIIEQISEFSKRVILADANLDKVLSAYNKHRDKPIREQAENIIHLFTLTNLGAPAAFKYFDTTIDRKRYTSTKEVLDATLIHQSITGLYETRIDLSQLGGDGGGGSEAAAKGSSGGTLGIEDEYRLHETSTEPDVSLGSTWLSDFPQAWAETGGMGLAVRQAPLIIPLKATSTPVSIQQYPMSHEARLGIKPHIQRLLDQGILVPCQSPWNTPLLPVKKPGTNDYRPVQDLREVNKRVEDIHPTVPNPYNLLSGLPPSHQWYTVLDLKDAFFCLRLHPTSQPLFAFEWRDPGMGISGQLTWTRLPQGFKNSPTLFNEALHRDLADFRIQHPDLILLQYVDDILLAATSELDCQQGTRALLQTLGDLGYRASAKKAQICQKQVKYLGYLLREGQRWLTEARKETVMGQPVPKTPRQLREFLGTAGFCRLWIPGFAEMAAPLYPLTKPGTLFSWGPDQQKAYQEIKQALLTAPALGLPDLTKPFELFVDEKQGYAKGVLTQKLGPWRRPVAYLSKKLDPVAAGWPPCLRMVAAIAVLTKDAGKLTMGQPLVILAPHAVEALVKQPPDRWLSNARMTHYQAMLLDTDRVQFGPVVALNPATLLPLPEEGAPHDCLEILAETHGTRPDLTDQPIPDADHTWYTDGSSFLQEGQRKAGAAVTTETEVIWAGALPAGTSAQRAELIALTQALKMAEGKRLNVYTDSRYAFATAHIHGEIYRRRGWLTSEGREIKNKSEILALLKALFLPKRLSIIHCLGHQKGDSAEARGNRLADQAAREAAIKTPPDTSTLLAGKRTADGSEFEKRTADGSEFESPKKKAKVE

SEQ ID NO: 2200 - protein, 2096 aa, synthetic construct
MPAAKRVKLDGGDKKYSIGLDIGTNSVGWAVITDEYKVPSKKFKVLGNTDRHSIKKNLIGALLFDSGETAEATRLKRTARRRYTRRKNRICYLQEIFSNEMAKVDDSFFHRLEESFLVEEDKKHERHPIFGNIVDEVAYHEKYPTIYHLRKKLVDSTDKADLRLIYLALAHMIKFRGHFLIEGDLNPDNSDVDKLFIQLVQTYNQLFEENPINASGVDAKAILSARLSKSRRLENLIAQLPGEKKNGLFGNLIALSLGLTPNFKSNFDLAEDAKLQLSKDTYDDDLDNLLAQIGDQYADLFLAAKNLSDAILLSDILRVNTEITKAPLSASMIKRYDEHHQDLTLLKALVRQQLPEKYKEIFFDQSKNGYAGYIDGGASQEEFYKFIKPILEKMDGTEELLVKLNREDLLRKQRTFDNGSIPHQIHLGELHAILRRQEDFYPFLKDNREKIEKILTFRIPYYVGPLARGNSRFAWMTRKSEETITPWNFEEVVDKGASAQSFIERMTNFDKNLPNEKVLPKHSLLYEYFTVYNELTKVKYVTEGMRKPAFLSGEQKKAIVDLLFKTNRKVTVKQLKEDYFKKIECFDSVEISGVEDRFNASLGTYHDLLKIIKDKDFLDNEENEDILEDIVLTLTLFEDREMIEERLKTYAHLFDDKVMKQLKRRRYTGWGRLSRKLINGIRDKQSGKTILDFLKSDGFANRNFMQLIHDDSLTFKEDIQKAQVSGQGDSLHEHIANLAGSPAIKKGILQTVKVVDELVKVMGRHKPENIVIEMARENQTTQKGQKNSRERMKRIEEGIKELGSQILKEHPVENTQLQNEKLYLYYLQNGRDMYVDQELDINRLSDYDVDHIVPQSFLKDDSIDNKVLTRSDKARGKSDNVPSEEVVKKMKNYWRQLLNAKLITQRKFDNLTKAERGGLSELDKAGFIKRQLVETRQITKHVAQILDSRMNTKYDENDKLIREVKVITLKSKLVSDFRKDFQFYKVREINNYHHAHDAYLNAVVGTALIKKYPKLESEFVYGDYKVYDVRKMIAKSEQEIGKATAKYFFYSNIMNFFKTEITLANGEIRKRPLIETNGETGEIVWDKGRDFATVRKVLSMPQVNIVKKTEVQTGGFSKESILPKRNSDKLIARKKDWDPKKYGGFDSPTVAYSVLVVAKVEKGKSKKLKSVKELLGITIMERSSFEKNPIDFLEAKGYKEVKKDLIIKLPKYSLFELENGRKRMLASAGELQKGNELALPSKYVNFLYLASHYEKLKGSPEDNEQKQLFVEQHKHYLDEIIEQISEFSKRVILADANLDKVLSAYNKHRDKPIREQAENIIHLFTLTNLGAPAAFKYFDTTIDRKRYTSTKEVLDATLIHQSITGLYETRIDLSQLGGDGGEAAAKGGSGSSGGTLGIEDEYRLHETSTEPDVSLGSTWLSDFPQAWAETGGMGLAVRQAPLIIPLKATSTPVSIQQYPMSHEARLGIKPHIQRLLDQGILVPCQSPWNTPLLPVKKPGTNDYRPVQDLREVNKRVEDIHPTVPNPYNLLSGLPPSHQWYTVLDLKDAFFCLRLHPTSQPLFAFEWRDPGMGISGQLTWTRLPQGFKNSPTLFNEALHRDLADFRIQHPDLILLQYVDDILLAATSELDCQQGTRALLQTLGDLGYRASAKKAQICQKQVKYLGYLLREGQRWLTEARKETVMGQPVPKTPRQLREFLGTAGFCRLWIPGFAEMAAPLYPLTKPGTLFSWGPDQQKAYQEIKQALLTAPALGLPDLTKPFELFVDEKQGYAKGVLTQKLGPWRRPVAYLSKKLDPVAAGWPPCLRMVAAIAVLTKDAGKLTMGQPLVILAPHAVEALVKQPPDRWLSNARMTHYQAMLLDTDRVQFGPVVALNPATLLPLPEEGAPHDCLEILAETHGTRPDLTDQPIPDADHTWYTDGSSFLQEGQRKAGAAVTTETEVIWAGALPAGTSAQRAELIALTQALKMAEGKRLNVYTDSRYAFATAHIHGEIYRRRGWLTSEGREIKNKSEILALLKALFLPKRLSIIHCLGHQKGDSAEARGNRLADQAAREAAIKTPPDTSTLLAGKRTADGSEFEKRTADGSEFESPKKKAKVE

SEQ ID NO: 2201 - protein, 2096 aa, synthetic construct; identical to SEQ ID NO: 2071

SEQ ID NO: 2202 - protein, 2096 aa, synthetic construct; identical to SEQ ID NO: 2075

SEQ ID NO: 2203 - protein, 2091 aa, synthetic construct
MPAAKRVKLDGGDKKYSIGLDIGTNSVGWAVITDEYKVPSKKFKVLGNTDRHSIKKNLIGALLFDSGETAEATRLKRTARRRYTRRKNRICYLQEIFSNEMAKVDDSFFHRLEESFLVEEDKKHERHPIFGNIVDEVAYHEKYPTIYHLRKKLVDSTDKADLRLIYLALAHMIKFRGHFLIEGDLNPDNSDVDKLFIQLVQTYNQLFEENPINASGVDAKAILSARLSKSRRLENLIAQLPGEKKNGLFGNLIALSLGLTPNFKSNFDLAEDAKLQLSKDTYDDDLDNLLAQIGDQYADLFLAAKNLSDAILLSDILRVNTEITKAPLSASMIKRYDEHHQDLTLLKALVRQQLPEKYKEIFFDQSKNGYAGYIDGGASQEEFYKFIKPILEKMDGTEELLVKLNREDLLRKQRTFDNGSIPHQIHLGELHAILRRQEDFYPFLKDNREKIEKILTFRIPYYVGPLARGNSRFAWMTRKSEETITPWNFEEVVDKGASAQSFIERMTNFDKNLPNEKVLPKHSLLYEYFTVYNELTKVKYVTEGMRKPAFLSGEQKKAIVDLLFKTNRKVTVKQLKEDYFKKIECFDSVEISGVEDRFNASLGTYHDLLKIIKDKDFLDNEENEDILEDIVLTLTLFEDREMIEERLKTYAHLFDDKVMKQLKRRRYTGWGRLSRKLINGIRDKQSGKTILDFLKSDGFANRNFMQLIHDDSLTFKEDIQKAQVSGQGDSLHEHIANLAGSPAIKKGILQTVKVVDELVKVMGRHKPENIVIEMARENQTTQKGQKNSRERMKRIEEGIKELGSQILKEHPVENTQLQNEKLYLYYLQNGRDMYVDQELDINRLSDYDVDHIVPQSFLKDDSIDNKVLTRSDKARGKSDNVPSEEVVKKMKNYWRQLLNAKLITQRKFDNLTKAERGGLSELDKAGFIKRQLVETRQITKHVAQILDSRMNTKYDENDKLIREVKVITLKSKLVSDFRKDFQFYKVREINNYHHAHDAYLNAVVGTALIKKYPKLESEFVYGDYKVYDVRKMIAKSEQEIGKATAKYFFYSNIMNFFKTEITLANGEIRKRPLIETNGETGEIVWDKGRDFATVRKVLSMPQVNIVKKTEVQTGGFSKESILPKRNSDKLIARKKDWDPKKYGGFDSPTVAYSVLVVAKVEKGKSKKLKSVKELLGITIMERSSFEKNPIDFLEAKGYKEVKKDLIIKLPKYSLFELENGRKRMLASAGELQKGNELALPSKYVNFLYLASHYEKLKGSPEDNEQKQLFVEQHKHYLDEIIEQISEFSKRVILADANLDKVLSAYNKHRDKPIREQAENIIHLFTLTNLGAPAAFKYFDTTIDRKRYTSTKEVLDATLIHQSITGLYETRIDLSQLGGDGGGSSGGGGGTLGIEDEYRLHETSTEPDVSLGSTWLSDFPQAWAETGGMGLAVRQAPLIIPLKATSTPVSIQQYPMSHEARLGIKPHIQRLLDQGILVPCQSPWNTPLLPVKKPGTNDYRPVQDLREVNKRVEDIHPTVPNPYNLLSGLPPSHQWYTVLDLKDAFFCLRLHPTSQPLFAFEWRDPGMGISGQLTWTRLPQGFKNSPTLFNEALHRDLADFRIQHPDLILLQYVDDILLAATSELDCQQGTRALLQTLGDLGYRASAKKAQICQKQVKYLGYLLREGQRWLTEARKETVMGQPVPKTPRQLREFLGTAGFCRLWIPGFAEMAAPLYPLTKPGTLFSWGPDQQKAYQEIKQALLTAPALGLPDLTKPFELFVDEKQGYAKGVLTQKLGPWRRPVAYLSKKLDPVAAGWPPCLRMVAAIAVLTKDAGKLTMGQPLVILAPHAVEALVKQPPDRWLSNARMTHYQAMLLDTDRVQFGPVVALNPATLLPLPEEGAPHDCLEILAETHGTRPDLTDQPIPDADHTWYTDGSSFLQEGQRKAGAAVTTETEVIWAGALPAGTSAQRAELIALTQALKMAEGKRLNVYTDSRYAFATAHIHGEIYRRRGWLTSEGREIKNKSEILALLKALFLPKRLSIIHCLGHQKGDSAEARGNRLADQAAREAAIKTPPDTSTLLAGKRTADGSEFEKRTADGSEFESPKKKAKVE

SEQ ID NO: 2204 - protein, 2098 aa, synthetic construct
MPAAKRVKLDGGDKKYSIGLDIGTNSVGWAVITDEYKVPSKKFKVLGNTDRHSIKKNLIGALLFDSGETAEATRLKRTARRRYTRRKNRICYLQEIFSNEMAKVDDSFFHRLEESFLVEEDKKHERHPIFGNIVDEVAYHEKYPTIYHLRKKLVDSTDKADLRLIYLALAHMIKFRGHFLIEGDLNPDNSDVDKLFIQLVQTYNQLFEENPINASGVDAKAILSARLSKSRRLENLIAQLPGEKKNGLFGNLIALSLGLTPNFKSNFDLAEDAKLQLSKDTYDDDLDNLLAQIGDQYADLFLAAKNLSDAILLSDILRVNTEITKAPLSASMIKRYDEHHQDLTLLKALVRQQLPEKYKEIFFDQSKNGYAGYIDGGASQEEFYKFIKPILEKMDGTEELLVKLNREDLLRKQRTFDNGSIPHQIHLGELHAILRRQEDFYPFLKDNREKIEKILTFRIPYYVGPLARGNSRFAWMTRKSEETITPWNFEEVVDKGASAQSFIERMTNFDKNLPNEKVLPKHSLLYEYFTVYNELTKVKYVTEGMRKPAFLSGEQKKAIVDLLFKTNRKVTVKQLKEDYFKKIECFDSVEISGVEDRFNASLGTYHDLLKIIKDKDFLDNEENEDILEDIVLTLTLFEDREMIEERLKTYAHLFDDKVMKQLKRRRYTGWGRLSRKLINGIRDKQSGKTILDFLKSDGFANRNFMQLIHDDSLTFKEDIQKAQVSGQGDSLHEHIANLAGSPAIKKGILQTVKVVDELVKVMGRHKPENIVIEMARENQTTQKGQKNSRERMKRIEEGIKELGSQILKEHPVENTQLQNEKLYLYYLQNGRDMYVDQELDINRLSDYDVDHIVPQSFLKDDSIDNKVLTRSDKARGKSDNVPSEEVVKKMKNYWRQLLNAKLITQRKFDNLTKAERGGLSELDKAGFIKRQLVETRQITKHVAQILDSRMNTKYDENDKLIREVKVITLKSKLVSDFRKDFQFYKVREINNYHHAHDAYLNAVVGTALIKKYPKLESEFVYGDYKVYDVRKMIAKSEQEIGKATAKYFFYSNIMNFFKTEITLANGEIRKRPLIETNGETGEIVWDKGRDFATVRKVLSMPQVNIVKKTEVQTGGFSKESILPKRNSDKLIARKKDWDPKKYGGFDSPTVAYSVLVVAKVEKGKSKKLKSVKELLGITIMERSSFEKNPIDFLEAKGYKEVKKDLIIKLPKYSLFELENGRKRMLASAGELQKGNELALPSKYVNFLYLASHYEKLKGSPEDNEQKQLFVEQHKHYLDEIIEQISEFSKRVILADANLDKVLSAYNKHRDKPIREQAENIIHLFTLTNLGAPAAFKYFDTTIDRKRYTSTKEVLDATLIHQSITGLYETRIDLSQLGGDGGPAPAPAPAPAPAPGGTLGIEDEYRLHETSTEPDVSLGSTWLSDFPQAWAETGGMGLAVRQAPLIIPLKATSTPVSIQQYPMSHEARLGIKPHIQRLLDQGILVPCQSPWNTPLLPVKKPGTNDYRPVQDLREVNKRVEDIHPTVPNPYNLLSGLPPSHQWYTVLDLKDAFFCLRLHPTSQPLFAFEWRDPGMGISGQLTWTRLPQGFKNSPTLFNEALHRDLADFRIQHPDLILLQYVDDILLAATSELDCQQGTRALLQTLGDLGYRASAKKAQICQKQVKYLGYLLREGQRWLTEARKETVMGQPVPKTPRQLREFLGTAGFCRLWIPGFAEMAAPLYPLTKPGTLFSWGPDQQKAYQEIKQALLTAPALGLPDLTKPFELFVDEKQGYAKGVLTQKLGPWRRPVAYLSKKLDPVAAGWPPCLRMVAAIAVLTKDAGKLTMGQPLVILAPHAVEALVKQPPDRWLSNARMTHYQAMLLDTDRVQFGPVVALNPATLLPLPEEGAPHDCLEILAETHGTRPDLTDQPIPDADHTWYTDGSSFLQEGQRKAGAAVTTETEVIWAGALPAGTSAQRAELIALTQALKMAEGKRLNVYTDSRYAFATAHIHGEIYRRRGWLTSEGREIKNKSEILALLKALFLPKRLSIIHCLGHQKGDSAEARGNRLADQAAREAAIKTPPDTSTLLAGKRTADGSEFEKRTADGSEFESPKKKAKVE

SEQ ID NO: 2205 - protein, 2094 aa, synthetic construct
MPAAKRVKLDGGDKKYSIGLDIGTNSVGWAVITDEYKVPSKKFKVLGNTDRHSIKKNLIGALLFDSGETAEATRLKRTARRRYTRRKNRICYLQEIFSNEMAKVDDSFFHRLEESFLVEEDKKHERHPIFGNIVDEVAYHEKYPTIYHLRKKLVDSTDKADLRLIYLALAHMIKFRGHFLIEGDLNPDNSDVDKLFIQLVQTYNQLFEENPINASGVDAKAILSARLSKSRRLENLIAQLPGEKKNGLFGNLIALSLGLTPNFKSNFDLAEDAKLQLSKDTYDDDLDNLLAQIGDQYADLFLAAKNLSDAILLSDILRVNTEITKAPLSASMIKRYDEHHQDLTLLKALVRQQLPEKYKEIFFDQSKNGYAGYIDGGASQEEFYKFIKPILEKMDGTEELLVKLNREDLLRKQRTFDNGSIPHQIHLGELHAILRRQEDFYPFLKDNREKIEKILTFRIPYYVGPLARGNSRFAWMTRKSEETITPWNFEEVVDKGASAQSFIERMTNFDKNLPNEKVLPKHSLLYEYFTVYNELTKVKYVTEGMRKPAFLSGEQKKAIVDLLFKTNRKVTVKQLKEDYFKKIECFDSVEISGVEDRFNASLGTYHDLLKIIKDKDFLDNEENEDILEDIVLTLTLFEDREMIEERLKTYAHLFDDKVMKQLKRRRYTGWGRLSRKLINGIRDKQSGKTILDFLKSDGFANRNFMQLIHDDSLTFKEDIQKAQVSGQGDSLHEHIANLAGSPAIKKGILQTVKVVDELVKVMGRHKPENIVIEMARENQTTQKGQKNSRERMKRIEEGIKELGSQILKEHPVENTQLQNEKLYLYYLQNGRDMYVDQELDINRLSDYDVDHIVPQSFLKDDSIDNKVLTRSDKARGKSDNVPSEEVVKKMKNYWRQLLNAKLITQRKFDNLTKAERGGLSELDKAGFIKRQLVETRQITKHVAQILDSRMNTKYDENDKLIREVKVITLKSKLVSDFRKDFQFYKVREINNYHHAHDAYLNAVVGTALIKKYPKLESEFVYGDYKVYDVRKMIAKSEQEIGKATAKYFFYSNIMNFFKTEITLANGEIRKRPLIETNGETGEIVWDKGRDFATVRKVLSMPQVNIVKKTEVQTGGFSKESILPKRNSDKLIARKKDWDPKKYGGFDSPTVAYSVLVVAKVEKGKSKKLKSVKELLGITIMERSSFEKNPIDFLEAKGYKEVKKDLIIKLPKYSLFELENGRKRMLASAGELQKGNELALPSKYVNFLYLASHYEKLKGSPEDNEQKQLFVEQHKHYLDEIIEQISEFSKRVILADANLDKVLSAYNKHRDKPIREQAENIIHLFTLTNLGAPAAFKYFDTTIDRKRYTSTKEVLDATLIHQSITGLYETRIDLSQLGGDGGGGSGSSGGGGGTLGIEDEYRLHETSTEPDVSLGSTWLSDFPQAWAETGGMGLAVRQAPLIIPLKATSTPVSIQQYPMSHEARLGIKPHIQRLLDQGILVPCQSPWNTPLLPVKKPGTNDYRPVQDLREVNKRVEDIHPTVPNPYNLLSGLPPSHQWYTVLDLKDAFFCLRLHPTSQPLFAFEWRDPGMGISGQLTWTRLPQGFKNSPTLFNEALHRDLADFRIQHPDLILLQYVDDILLAATSELDCQQGTRALLQTLGDLGYRASAKKAQICQKQVKYLGYLLREGQRWLTEARKETVMGQPVPKTPRQLREFLGTAGFCRLWIPGFAEMAAPLYPLTKPGTLFSWGPDQQKAYQEIKQALLTAPALGLPDLTKPFELFVDEKQGYAKGVLTQKLGPWRRPVAYLSKKLDPVAAGWPPCLRMVAAIAVLTKDAGKLTMGQPLVILAPHAVEALVKQPPDRWLSNARMTHYQAMLLDTDRVQFGPVVALNPATLLPLPEEGAPHDCLEILAETHGTRPDLTDQPIPDADHTWYTDGSSFLQEGQRKAGAAVTTETEVIWAGALPAGTSAQRAELIALTQALKMAEGKRLNVYTDSRYAFATAHIHGEIYRRRGWLTSEGREIKNKSEILALLKALFLPKRLSIIHCLGHQKGDSAEARGNRLADQAAREAAIKTPPDTSTLLAGKRTADGSEFEKRTADGSEFESPKKKAKVE

SEQ ID NO: 2206 - protein, 2093 aa, synthetic construct
MPAAKRVKLDGGDKKYSIGLDIGTNSVGWAVITDEYKVPSKKFKVLGNTDRHSIKKNLIGALLFDSGETAEATRLKRTARRRYTRRKNRICYLQEIFSNEMAKVDDSFFHRLEESFLVEEDKKHERHPIFGNIVDEVAYHEKYPTIYHLRKKLVDSTDKADLRLIYLALAHMIKFRGHFLIEGDLNPDNSDVDKLFIQLVQTYNQLFEENPINASGVDAKAILSARLSKSRRLENLIAQLPGEKKNGLFGNLIALSLGLTPNFKSNFDLAEDAKLQLSKDTYDDDLDNLLAQIGDQYADLFLAAKNLSDAILLSDILRVNTEITKAPLSASMIKRYDEHHQDLTLLKALVRQQLPEKYKEIFFDQSKNGYAGYIDGGASQEEFYKFIKPILEKMDGTEELLVKLNREDLLRKQRTFDNGSIPHQIHLGELHAILRRQEDFYPFLKDNREKIEKILTFRIPYYVGPLARGNSRFAWMTRKSEETITPWNFEEVVDKGASAQSFIERMTNFDKNLPNEKVLPKHSLLYEYFTVYNELTKVKYVTEGMRKPAFLSGEQKKAIVDLLFKTNRKVTVKQLKEDYFKKIECFDSVEISGVEDRFNASLGTYHDLLKIIKDKDFLDNEENEDILEDIVLTLTLFEDREMIEERLKTYAHLFDDKVMKQLKRRRYTGWGRLSRKLINGIRDKQSGKTILDFLKSDGFANRNFMQLIHDDSLTFKEDIQKAQVSGQGDSLHEHIANLAGSPAIKKGILQTVKVVDELVKVMGRHKPENIVIEMARENQTTQKGQKNSRERMKRIEEGIKELGSQILKEHPVENTQLQNEKLYLYYLQNGRDMYVDQELDINRLSDYDVDHIVPQSFLKDDSIDNKVLTRSDKARGKSDNVPSEEVVKKMKNYWRQLLNAKLITQRKFDNLTKAERGGLSELDKAGFIKRQLVETRQITKHVAQILDSRMNTKYDENDKLIREVKVITLKSKLVSDFRKDFQFYKVREINNYHHAHDAYLNAVVGTALIKKYPKLESEFVYGDYKVYDVRKMIAKSEQEIGKATAKYFFYSNIMNFFKTEITLANGEIRKRPLIETNGETGEIVWDKGRDFATVRKVLSMPQVNIVKKTEVQTGGFSKESILPKRNSDKLIARKKDWDPKKYGGFDSPTVAYSVLVVAKVEKGKSKKLKSVKELLGITIMERSSFEKNPIDFLEAKGYKEVKKDLIIKLPKYSLFELENGRKRMLASAGELQKGNELALPSKYVNFLYLASHYEKLKGSPEDNEQKQLFVEQHKHYLDEIIEQISEFSKRVILADANLDKVLSAYNKHRDKPIREQAENIIHLFTLTNLGAPAAFKYFDTTIDRKRYTSTKEVLDATLIHQSITGLYETRIDLSQLGGDGGPAPEAAAKGGTLGIEDEYRLHETSTEPDVSLGSTWLSDFPQAWAETGGMGLAVRQAPLIIPLKATSTPVSIQQYPMSHEARLGIKPHIQRLLDQGILVPCQSPWNTPLLPVKKPGTNDYRPVQDLREVNKRVEDIHPTVPNPYNLLSGLPPSHQWYTVLDLKDAFFCLRLHPTSQPLFAFEWRDPGMGISGQLTWTRLPQGFKNSPTLFNEALHRDLADFRIQHPDLILLQYVDDILLAATSELDCQQGTRALLQTLGDLGYRASAKKAQICQKQVKYLGYLLREGQRWLTEARKETVMGQPVPKTPRQLREFLGTAGFCRLWIPGFAEMAAPLYPLTKPGTLFSWGPDQQKAYQEIKQALLTAPALGLPDLTKPFELFVDEKQGYAKGVLTQKLGPWRRPVAYLSKKLDPVAAGWPPCLRMVAAIAVLTKDAGKLTMGQPLVILAPHAVEALVKQPPDRWLSNARMTHYQAMLLDTDRVQFGPVVALNPATLLPLPEEGAPHDCLEILAETHGTRPDLTDQPIPDADHTWYTDGSSFLQEGQRKAGAAVTTETEVIWAGALPAGTSAQRAELIALTQALKMAEGKRLNVYTDSRYAFATAHIHGEIYRRRGWLTSEGREIKNKSEILALLKALFLPKRLSIIHCLGHQKGDSAEARGNRLADQAAREAAIKTPPDTSTLLAGKRTADGSEFEKRTADGSEFESPKKKAKVE

SEQ ID NO: 2207 - protein, 2096 aa, synthetic construct; identical to SEQ ID NO: 2074

SEQ ID NO: 2208 - protein, 2093 aa, synthetic construct
MPAAKRVKLDGGDKKYSIGLDIGTNSVGWAVITDEYKVPSKKFKVLGNTDRHSIKKNLIGALLFDSGETAEATRLKRTARRRYTRRKNRICYLQEIFSNEMAKVDDSFFHRLEESFLVEEDKKHERHPIFGNIVDEVAYHEKYPTIYHLRKKLVDSTDKADLRLIYLALAHMIKFRGHFLIEGDLNPDNSDVDKLFIQLVQTYNQLFEENPINASGVDAKAILSARLSKSRRLENLIAQLPGEKKNGLFGNLIALSLGLTPNFKSNFDLAEDAKLQLSKDTYDDDLDNLLAQIGDQYADLFLAAKNLSDAILLSDILRVNTEITKAPLSASMIKRYDEHHQDLTLLKALVRQQLPEKYKEIFFDQSKNGYAGYIDGGASQEEFYKFIKPILEKMDGTEELLVKLNREDLLRKQRTFDNGSIPHQIHLGELHAILRRQEDFYPFLKDNREKIEKILTFRIPYYVGPLARGNSRFAWMTRKSEETITPWNFEEVVDKGASAQSFIERMTNFDKNLPNEKVLPKHSLLYEYFTVYNELTKVKYVTEGMRKPAFLSGEQKKAIVDLLFKTNRKVTVKQLKEDYFKKIECFDSVEISGVEDRFNASLGTYHDLLKIIKDKDFLDNEENEDILEDIVLTLTLFEDREMIEERLKTYAHLFDDKVMKQLKRRRYTGWGRLSRKLINGIRDKQSGKTILDFLKSDGFANRNFMQLIHDDSLTFKEDIQKAQVSGQGDSLHEHIANLAGSPAIKKGILQTVKVVDELVKVMGRHKPENIVIEMARENQTTQKGQKNSRERMKRIEEGIKELGSQILKEHPVENTQLQNEKLYLYYLQNGRDMYVDQELDINRLSDYDVDHIVPQSFLKDDSIDNKVLTRSDKARGKSDNVPSEEVVKKMKNYWRQLLNAKLITQRKFDNLTKAERGGLSELDKAGFIKRQLVETRQITKHVAQILDSRMNTKYDENDKLIREVKVITLKSKLVSDFRKDFQFYKVREINNYHHAHDAYLNAVVGTALIKKYPKLESEFVYGDYKVYDVRKMIAKSEQEIGKATAKYFFYSNIMNFFKTEITLANGEIRKRPLIETNGETGEIVWDKGRDFATVRKVLSMPQVNIVKKTEVQTGGFSKESILPKRNSDKLIARKKDWDPKKYGGFDSPTVAYSVLVVAKVEKGKSKKLKSVKELLGITIMERSSFEKNPIDFLEAKGYKEVKKDLIIKLPKYSLFELENGRKRMLASAGELQKGNELALPSKYVNFLYLASHYEKLKGSPEDNEQKQLFVEQHKHYLDEIIEQISEFSKRVILADANLDKVLSAYNKHRDKPIREQAENIIHLFTLTNLGAPAAFKYFDTTIDRKRYTSTKEVLDATLIHQSITGLYETRIDLSQLGGDGGGGGEAAAKGGTLGIEDEYRLHETSTEPDVSLGSTWLSDFPQAWAETGGMGLAVRQAPLIIPLKATSTPVSIQQYPMSHEARLGIKPHIQRLLDQGILVPCQSPWNTPLLPVKKPGTNDYRPVQDLREVNKRVEDIHPTVPNPYNLLSGLPPSHQWYTVLDLKDAFFCLRLHPTSQPLFAFEWRDPGMGISGQLTWTRLPQGFKNSPTLFNEALHRDLADFRIQHPDLILLQYVDDILLAATSELDCQQGTRALLQTLGDLGYRASAKKAQICQKQVKYLGYLLREGQRWLTEARKETVMGQPVPKTPRQLREFLGTAGFCRLWIPGFAEMAAPLYPLTKPGTLFSWGPDQQKAYQEIKQALLTAPALGLPDLTKPFELFVDEKQGYAKGVLTQKLGPWRRPVAYLSKKLDPVAAGWPPCLRMVAAIAVLTKDAGKLTMGQPLVILAPHAVEALVKQPPDRWLSNARMTHYQAMLLDTDRVQFGPVVALNPATLLPLPEEGAPHDCLEILAETHGTRPDLTDQPIPDADHTWYTDGSSFLQEGQRKAGAAVTTETEVIWAGALPAGTSAQRAELIALTQALKMAEGKRLNVYTDSRYAFATAHIHGEIYRRRGWLTSEGREIKNKSEILALLKALFLPKRLSIIHCLGHQKGDSAEARGNRLADQAAREAAIKTPPDTSTLLAGKRTADGSEFEKRTADGSEFESPKKKAKVE

SEQ ID NO: 2209 - protein, 2096 aa, synthetic construct
MPAAKRVKLDGGDKKYSIGLDIGTNSVGWAVITDEYKVPSKKFKVLGNTDRHSIKKNLIGALLFDSGETAEATRLKRTARRRYTRRKNRICYLQEIFSNEMAKVDDSFFHRLEESFLVEEDKKHERHPIFGNIVDEVAYHEKYPTIYHLRKKLVDSTDKADLRLIYLALAHMIKFRGHFLIEGDLNPDNSDVDKLFIQLVQTYNQLFEENPINASGVDAKAILSARLSKSRRLENLIAQLPGEKKNGLFGNLIALSLGLTPNFKSNFDLAEDAKLQLSKDTYDDDLDNLLAQIGDQYADLFLAAKNLSDAILLSDILRVNTEITKAPLSASMIKRYDEHHQDLTLLKALVRQQLPEKYKEIFFDQSKNGYAGYIDGGASQEEFYKFIKPILEKMDGTEELLVKLNREDLLRKQRTFDNGSIPHQIHLGELHAILRRQEDFYPFLKDNREKIEKILTFRIPYYVGPLARGNSRFAWMTRKSEETITPWNFEEVVDKGASAQSFIERMTNFDKNLPNEKVLPKHSLLYEYFTVYNELTKVKYVTEGMRKPAFLSGEQKKAIVDLLFKTNRKVTVKQLKEDYFKKIECFDSVEISGVEDRFNASLGTYHDLLKIIKDKDFLDNEENEDILEDIVLTLTLFEDREMIEERLKTYAHLFDDKVMKQLKRRRYTGWGRLSRKLINGIRDKQSGKTILDFLKSDGFANRNFMQLIHDDSLTFKEDIQKAQVSGQGDSLHEHIANLAGSPAIKKGILQTVKVVDELVKVMGRHKPENIVIEMARENQTTQKGQKNSRERMKRIEEGIKELGSQILKEHPVENTQLQNEKLYLYYLQNGRDMYVDQELDINRLSDYDVDHIVPQSFLKDDSIDNKVLTRSDKARGKSDNVPSEEVVKKMKNYWRQLLNAKLITQRKFDNLTKAERGGLSELDKAGFIKRQLVETRQITKHVAQILDSRMNTKYDENDKLIREVKVITLKSKLVSDFRKDFQFYKVREINNYHHAHDAYLNAVVGTALIKKYPKLESEFVYGDYKVYDVRKMIAKSEQEIGKATAKYFFYSNIMNFFKTEITLANGEIRKRPLIETNGETGEIVWDKGRDFATVRKVLSMPQVNIVKKTEVQTGGFSKESILPKRNSDKLIARKKDWDPKKYGGFDSPTVAYSVLVVAKVEKGKSKKLKSVKELLGITIMERSSFEKNPIDFLEAKGYKEVKKDLIIKLPKYSLFELENGRKRMLASAGELQKGNELALPSKYVNFLYLASHYEKLKGSPEDNEQKQLFVEQHKHYLDEIIEQISEFSKRVILADANLDKVLSAYNKHRDKPIREQAENIIHLFTLTNLGAPAAFKYFDTTIDRKRYTSTKEVLDATLIHQSITGLYETRIDLSQLGGDGGEAAAKGGGGGSGGTLGIEDEYRLHETSTEPDVSLGSTWLSDFPQAWAETGGMGLAVRQAPLIIPLKATSTPVSIQQYPMSHEARLGIKPHIQRLLDQGILVPCQSPWNTPLLPVKKPGTNDYRPVQDLREVNKRVEDIHPTVPNPYNLLSGLPPSHQWYTVLDLKDAFFCLRLHPTSQPLFAFEWRDPGMGISGQLTWTRLPQGFKNSPTLFNEALHRDLADFRIQHPDLILLQYVDDILLAATSELDCQQGTRALLQTLGDLGYRASAKKAQICQKQVKYLGYLLREGQRWLTEARKETVMGQPVPKTPRQLREFLGTAGFCRLWIPGFAEMAAPLYPLTKPGTLFSWGPDQQKAYQEIKQALLTAPALGLPDLTKPFELFVDEKQGYAKGVLTQKLGPWRRPVAYLSKKLDPVAAGWPPCLRMVAAIAVLTKDAGKLTMGQPLVILAPHAVEALVKQPPDRWLSNARMTHYQAMLLDTDRVQFGPVVALNPATLLPLPEEGAPHDCLEILAETHGTRPDLTDQPIPDADHTWYTDGSSFLQEGQRKAGAAVTTETEVIWAGALPAGTSAQRAELIALTQALKMAEGKRLNVYTDSRYAFATAHIHGEIYRRRGWLTSEGREIKNKSEILALLKALFLPKRLSIIHCLGHQKGDSAEARGNRLADQAAREAAIKTPPDTSTLLAGKRTADGSEFEKRTADGSEFESPKKKAKVE

SEQ ID NO: 2210 - protein, 2110 aa, synthetic construct
MPAAKRVKLDGGDKKYSIGLDIGTNSVGWAVITDEYKVPSKKFKVLGNTDRHSIKKNLIGALLFDSGETAEATRLKRTARRRYTRRKNRICYLQEIFSNEMAKVDDSFFHRLEESFLVEEDKKHERHPIFGNIVDEVAYHEKYPTIYHLRKKLVDSTDKADLRLIYLALAHMIKFRGHFLIEGDLNPDNSDVDKLFIQLVQTYNQLFEENPINASGVDAKAILSARLSKSRRLENLIAQLPGEKKNGLFGNLIALSLGLTPNFKSNFDLAEDAKLQLSKDTYDDDLDNLLAQIGDQYADLFLAAKNLSDAILLSDILRVNTEITKAPLSASMIKRYDEHHQDLTLLKALVRQQLPEKYKEIFFDQSKNGYAGYIDGGASQEEFYKFIKPILEKMDGTEELLVKLNREDLLRKQRTFDNGSIPHQIHLGELHAILRRQEDFYPFLKDNREKIEKILTFRIPYYVGPLARGNSRFAWMTRKSEETITPWNFEEVVDKGASAQSFIERMTNFDKNLPNEKVLPKHSLLYEYFTVYNELTKVKYVTEGMRKPAFLSGEQKKAIVDLLFKTNRKVTVKQLKEDYFKKIECFDSVEISGVEDRFNASLGTYHDLLKIIKDKDFLDNEENEDILEDIVLTLTLFEDREMIEERLKTYAHLFDDKVMKQLKRRRYTGWGRLSRKLINGIRDKQSGKTILDFLKSDGFANRNFMQLIHDDSLTFKEDIQKAQVSGQGDSLHEHIANLAGSPAIKKGILQTVKVVDELVKVMGRHKPENIVIEMARENQTTQKGQKNSRERMKRIEEGIKELGSQILKEHPVENTQLQNEKLYLYYLQNGRDMYVDQELDINRLSDYDVDHIVPQSFLKDDSIDNKVLTRSDKARGKSDNVPSEEVVKKMKNYWRQLLNAKLITQRKFDNLTKAERGGLSELDKAGFIKRQLVETRQITKHVAQILDSRMNTKYDENDKLIREVKVITLKSKLVSDFRKDFQFYKVREINNYHHAHDAYLNAVVGTALIKKYPKLESEFVYGDYKVYDVRKMIAKSEQEIGKATAKYFFYSNIMNFFKTEITLANGEIRKRPLIETNGETGEIVWDKGRDFATVRKVLSMPQVNIVKKTEVQTGGFSKESILPKRNSDKLIARKKDWDPKKYGGFDSPTVAYSVLVVAKVEKGKSKKLKSVKELLGITIMERSSFEKNPIDFLEAKGYKEVKKDLIIKLPKYSLFELENGRKRMLASAGELQKGNELALPSKYVNFLYLASHYEKLKGSPEDNEQKQLFVEQHKHYLDEIIEQISEFSKRVILADANLDKVLSAYNKHRDKPIREQAENIIHLFTLTNLGAPAAFKYFDTTIDRKRYTSTKEVLDATLIHQSITGLYETRIDLSQLGGDGGGGGGSGGGGSGGGGSGGGGSGGGGSGGTLGIEDEYRLHETSTEPDVSLGSTWLSDFPQAWAETGGMGLAVRQAPLIIPLKATSTPVSIQQYPMSHEARLGIKPHIQRLLDQGILVPCQSPWNTPLLPVKKPGTNDYRPVQDLREVNKRVEDIHPTVPNPYNLLSGLPPSHQWYTVLDLKDAFFCLRLHPTSQPLFAFEWRDPGMGISGQLTWTRLPQGFKNSPTLFNEALHRDLADFRIQHPDLILLQYVDDILLAATSELDCQQGTRALLQTLGDLGYRASAKKAQICQKQVKYLGYLLREGQRWLTEARKETVMGQPVPKTPRQLREFLGTAGFCRLWIPGFAEMAAPLYPLTKPGTLFSWGPDQQKAYQEIKQALLTAPALGLPDLTKPFELFVDEKQGYAKGVLTQKLGPWRRPVAYLSKKLDPVAAGWPPCLRMVAAIAVLTKDAGKLTMGQPLVILAPHAVEALVKQPPDRWLSNARMTHYQAMLLDTDRVQFGPVVALNPATLLPLPEEGAPHDCLEILAETHGTRPDLTDQPIPDADHTWYTDGSSFLQEGQRKAGAAVTTETEVIWAGALPAGTSAQRAELIALTQALKMAEGKRLNVYTDSRYAFATAHIHGEIYRRRGWLTSEGREIKNKSEILALLKALFLPKRLSIIHCLGHQKGDSAEARGNRLADQAAREAAIKTPPDTSTLLAGKRTADGSEFEKRTADGSEFESPKKKAKVE

SEQ ID NO: 2211 - protein, 2096 aa, synthetic construct
MPAAKRVKLDGGDKKYSIGLDIGTNSVGWAVITDEYKVPSKKFKVLGNTDRHSIKKNLIGALLFDSGETAEATRLKRTARRRYTRRKNRICYLQEIFSNEMAKVDDSFFHRLEESFLVEEDKKHERHPIFGNIVDEVAYHEKYPTIYHLRKKLVDSTDKADLRLIYLALAHMIKFRGHFLIEGDLNPDNSDVDKLFIQLVQTYNQLFEENPINASGVDAKAILSARLSKSRRLENLIAQLPGEKKNGLFGNLIALSLGLTPNFKSNFDLAEDAKLQLSKDTYDDDLDNLLAQIGDQYADLFLAAKNLSDAILLSDILRVNTEITKAPLSASMIKRYDEHHQDLTLLKALVRQQLPEKYKEIFFDQSKNGYAGYIDGGASQEEFYKFIKPILEKMDGTEELLVKLNREDLLRKQRTFDNGSIPHQIHLGELHAILRRQEDFYPFLKDNREKIEKILTFRIPYYVGPLARGNSRFAWMTRKSEETITPWNFEEVVDKGASAQSFIERMTNFDKNLPNEKVLPKHSLLYEYFTVYNELTKVKYVTEGMRKPAFLSGEQKKAIVDLLFKTNRKVTVKQLKEDYFKKIECFDSVEISGVEDRFNASLGTYHDLLKIIKDKDFLDNEENEDILEDIVLTLTLFEDREMIEERLKTYAHLFDDKVMKQLKRRRYTGWGRLSRKLINGIRDKQSGKTILDFLKSDGFANRNFMQLIHDDSLTFKEDIQKAQVSGQGDSLHEHIANLAGSPAIKKGILQTVKVVDELVKVMGRHKPENIVIEMARENQTTQKGQKNSRERMKRIEEGIKELGSQILKEHPVENTQLQNEKLYLYYLQNGRDMYVDQELDINRLSDYDVDHIVPQSFLKDDSIDNKVLTRSDKARGKSDNVPSEEVVKKMKNYWRQLLNAKLITQRKFDNLTKAERGGLSELDKAGFIKRQLVETRQITKHVAQILDSRMNTKYDENDKLIREVKVITLKSKLVSDFRKDFQFYKVREINNYHHAHDAYLNAVVGTALIKKYPKLESEFVYGDYKVYDVRKMIAKSEQEIGKATAKYFFYSNIMNFFKTEITLANGEIRKRPLIETNGETGEIVWDKGRDFATVRKVLSMPQVNIVKKTEVQTGGFSKESILPKRNSDKLIARKKDWDPKKYGGFDSPTVAYSVLVVAKVEKGKSKKLKSVKELLGITIMERSSFEKNPIDFLEAKGYKEVKKDLIIKLPKYSLFELENGRKRMLASAGELQKGNELALPSKYVNFLYLASHYEKLKGSPEDNEQKQLFVEQHKHYLDEIIEQISEFSKRVILADANLDKVLSAYNKHRDKPIREQAENIIHLFTLTNLGAPAAFKYFDTTIDRKRYTSTKEVLDATLIHQSITGLYETRIDLSQLGGDGGEAAAKGSSPAPGGTLGIEDEYRLHETSTEPDVSLGSTWLSDFPQAWAETGGMGLAVRQAPLIIPLKATSTPVSIQQYPMSHEARLGIKPHIQRLLDQGILVPCQSPWNTPLLPVKKPGTNDYRPVQDLREVNKRVEDIHPTVPNPYNLLSGLPPSHQWYTVLDLKDAFFCLRLHPTSQPLFAFEWRDPGMGISGQLTWTRLPQGFKNSPTLFNEALHRDLADFRIQHPDLILLQYVDDILLAATSELDCQQGTRALLQTLGDLGYRASAKKAQICQKQVKYLGYLLREGQRWLTEARKETVMGQPVPKTPRQLREFLGTAGFCRLWIPGFAEMAAPLYPLTKPGTLFSWGPDQQKAYQEIKQALLTAPALGLPDLTKPFELFVDEKQGYAKGVLTQKLGPWRRPVAYLSKKLDPVAAGWPPCLRMVAAIAVLTKDAGKLTMGQPLVILAPHAVEALVKQPPDRWLSNARMTHYQAMLLDTDRVQFGPVVALNPATLLPLPEEGAPHDCLEILAETHGTRPDLTDQPIPDADHTWYTDGSSFLQEGQRKAGAAVTTETEVIWAGALPAGTSAQRAELIALTQALKMAEGKRLNVYTDSRYAFATAHIHGEIYRRRGWLTSEGREIKNKSEILALLKALFLPKRLSIIHCLGHQKGDSAEARGNRLADQAAREAAIKTPPDTSTLLAGKRTADGSEFEKRTADGSEFESPKKKAKVE

SEQ ID NO: 2212 - protein, 2094 aa, synthetic construct; identical to SEQ ID NO: 2079

SEQ ID NO: 2213 - protein, 2096 aa, synthetic construct
MPAAKRVKLDGGDKKYSIGLDIGTNSVGWAVITDEYKVPSKKFKVLGNTDRHSIKKNLIGALLFDSGETAEATRLKRTARRRYTRRKNRICYLQEIFSNEMAKVDDSFFHRLEESFLVEEDKKHERHPIFGNIVDEVAYHEKYPTIYHLRKKLVDSTDKADLRLIYLALAHMIKFRGHFLIEGDLNPDNSDVDKLFIQLVQTYNQLFEENPINASGVDAKAILSARLSKSRRLENLIAQLPGEKKNGLFGNLIALSLGLTPNFKSNFDLAEDAKLQLSKDTYDDDLDNLLAQIGDQYADLFLAAKNLSDAILLSDILRVNTEITKAPLSASMIKRYDEHHQDLTLLKALVRQQLPEKYKEIFFDQSKNGYAGYIDGGASQEEFYKFIKPILEKMDGTEELLVKLNREDLLRKQRTFDNGSIPHQIHLGELHAILRRQEDFYPFLKDNREKIEKILTFRIPYYVGPLARGNSRFAWMTRKSEETITPWNFEEVVDKGASAQSFIERMTNFDKNLPNEKVLPKHSLLYEYFTVYNELTKVKYVTEGMRKPAFLSGEQKKAIVDLLFKTNRKVTVKQLKEDYFKKIECFDSVEISGVEDRFNASLGTYHDLLKIIKDKDFLDNEENEDILEDIVLTLTLFEDREMIEERLKTYAHLFDDKVMKQLKRRRYTGWGRLSRKLINGIRDKQSGKTILDFLKSDGFANRNFMQLIHDDSLTFKEDIQKAQVSGQGDSLHEHIANLAGSPAIKKGILQTVKVVDELVKVMGRHKPENIVIEMARENQTTQKGQKNSRERMKRIEEGIKELGSQILKEHPVENTQLQNEKLYLYYLQNGRDMYVDQELDINRLSDYDVDHIVPQSFLKDDSIDNKVLTRSDKARGKSDNVPSEEVVKKMKNYWRQLLNAKLITQRKFDNLTKAERGGLSELDKAGFIKRQLVETRQITKHVAQILDSRMNTKYDENDKLIREVKVITLKSKLVSDFRKDFQFYKVREINNYHHAHDAYLNAVVGTALIKKYPKLESEFVYGDYKVYDVRKMIAKSEQEIGKATAKYFFYSNIMNFFKTEITLANGEIRKRPLIETNGETGEIVWDKGRDFATVRKVLSMPQVNIVKKTEVQTGGFSKESILPKRNSDKLIARKKDWDPKKYGGFDSPTVAYSVLVVAKVEKGKSKKLKSVKELLGITIMERSSFEKNPIDFLEAKGYKEVKKDLIIKLPKYSLFELENGRKRMLASAGELQKGNELALPSKYVNFLYLASHYEKLKGSPEDNEQKQLFVEQHKHYLDEIIEQISEFSKRVILADANLDKVLSAYNKHRDKPIREQAENIIHLFTLTNLGAPAAFKYFDTTIDRKRYTSTKEVLDATLIHQSITGLYETRIDLSQLGGDGGEAAAKPAPGSSGGTLGIEDEYRLHETSTEPDVSLGSTWLSDFPQAWAETGGMGLAVRQAPLIIPLKATSTPVSIQQYPMSHEARLGIKPHIQRLLDQGILVPCQSPWNTPLLPVKKPGTNDYRPVQDLREVNKRVEDIHPTVPNPYNLLSGLPPSHQWYTVLDLKDAFFCLRLHPTSQPLFAFEWRDPGMGISGQLTWTRLPQGFKNSPTLFNEALHRDLADFRIQHPDLILLQYVDDILLAATSELDCQQGTRALLQTLGDLGYRASAKKAQICQKQVKYLGYLLREGQRWLTEARKETVMGQPVPKTPRQLREFLGTAGFCRLWIPGFAEMAAPLYPLTKPGTLFSWGPDQQKAYQEIKQALLTAPALGLPDLTKPFELFVDEKQGYAKGVLTQKLGPWRRPVAYLSKKLDPVAAGWPPCLRMVAAIAVLTKDAGKLTMGQPLVILAPHAVEALVKQPPDRWLSNARMTHYQAMLLDTDRVQFGPVVALNPATLLPLPEEGAPHDCLEILAETHGTRPDLTDQPIPDADHTWYTDGSSFLQEGQRKAGAAVTTETEVIWAGALPAGTSAQRAELIALTQALKMAEGKRLNVYTDSRYAFATAHIHGEIYRRRGWLTSEGREIKNKSEILALLKALFLPKRLSIIHCLGHQKGDSAEARGNRLADQAAREAAIKTPPDTSTLLAGKRTADGSEFEKRTADGSEFESPKKKAKVE

SEQ ID NO: 2214 - protein, 2096 aa, synthetic construct
MPAAKRVKLDGGDKKYSIGLDIGTNSVGWAVITDEYKVPSKKFKVLGNTDRHSIKKNLIGALLFDSGETAEATRLKRTARRRYTRRKNRICYLQEIFSNEMAKVDDSFFHRLEESFLVEEDKKHERHPIFGNIVDEVAYHEKYPTIYHLRKKLVDSTDKADLRLIYLALAHMIKFRGHFLIEGDLNPDNSDVDKLFIQLVQTYNQLFEENPINASGVDAKAILSARLSKSRRLENLIAQLPGEKKNGLFGNLIALSLGLTPNFKSNFDLAEDAKLQLSKDTYDDDLDNLLAQIGDQYADLFLAAKNLSDAILLSDILRVNTEITKAPLSASMIKRYDEHHQDLTLLKALVRQQLPEKYKEIFFDQSKNGYAGYIDGGASQEEFYKFIKPILEKMDGTEELLVKLNREDLLRKQRTFDNGSIPHQIHLGELHAILRRQEDFYPFLKDNREKIEKILTFRIPYYVGPLARGNSRFAWMTRKSEETITPWNFEEVVDKGASAQSFIERMTNFDKNLPNEKVLPKHSLLYEYFTVYNELTKVKYVTEGMRKPAFLSGEQKKAIVDLLFKTNRKVTVKQLKEDYFKKIECFDSVEISGVEDRFNASLGTYHDLLKIIKDKDFLDNEENEDILEDIVLTLTLFEDREMIEERLKTYAHLFDDKVMKQLKRRRYTGWGRLSRKLINGIRDKQSGKTILDFLKSDGFANRNFMQLIHDDSLTFKEDIQKAQVSGQGDSLHEHIANLAGSPAIKKGILQTVKVVDELVKVMGRHKPENIVIEMARENQTTQKGQKNSRERMKRIEEGIKELGSQILKEHPVENTQLQNEKLYLYYLQNGRDMYVDQELDINRLSDYDVDHIVPQSFLKDDSIDNKVLTRSDKARGKSDNVPSEEVVKKMKNYWRQLLNAKLITQRKFDNLTKAERGGLSELDKAGFIKRQLVETRQITKHVAQILDSRMNTKYDENDKLIREVKVITLKSKLVSDFRKDFQFYKVREINNYHHAHDAYLNAVVGTALIKKYPKLESEFVYGDYKVYDVRKMIAKSEQEIGKATAKYFFYSNIMNFFKTEITLANGEIRKRPLIETNGETGEIVWDKGRDFATVRKVLSMPQVNIVKKTEVQTGGFSKESILPKRNSDKLIARKKDWDPKKYGGFDSPTVAYSVLVVAKVEKGKSKKLKSVKELLGITIMERSSFEKNPIDFLEAKGYKEVKKDLIIKLPKYSLFELENGRKRMLASAGELQKGNELALPSKYVNFLYLASHYEKLKGSPEDNEQKQLFVEQHKHYLDEIIEQISEFSKRVILADANLDKVLSAYNKHRDKPIREQAENIIHLFTLTNLGAPAAFKYFDTTIDRKRYTSTKEVLDATLIHQSITGLYETRIDLSQLGGDGGGSSGGGEAAAKGGTLGIEDEYRLHETSTEPDVSLGSTWLSDFPQAWAETGGMGLAVRQAPLIIPLKATSTPVSIQQYPMSHEARLGIKPHIQRLLDQGILVPCQSPWNTPLLPVKKPGTNDYRPVQDLREVNKRVEDIHPTVPNPYNLLSGLPPSHQWYTVLDLKDAFFCLRLHPTSQPLFAFEWRDPGMGISGQLTWTRLPQGFKNSPTLFNEALHRDLADFRIQHPDLILLQYVDDILLAATSELDCQQGTRALLQTLGDLGYRASAKKAQICQKQVKYLGYLLREGQRWLTEARKETVMGQPVPKTPRQLREFLGTAGFCRLWIPGFAEMAAPLYPLTKPGTLFSWGPDQQKAYQEIKQALLTAPALGLPDLTKPFELFVDEKQGYAKGVLTQKLGPWRRPVAYLSKKLDPVAAGWPPCLRMVAAIAVLTKDAGKLTMGQPLVILAPHAVEALVKQPPDRWLSNARMTHYQAMLLDTDRVQFGPVVALNPATLLPLPEEGAPHDCLEILAETHGTRPDLTDQPIPDADHTWYTDGSSFLQEGQRKAGAAVTTETEVIWAGALPAGTSAQRAELIALTQALKMAEGKRLNVYTDSRYAFATAHIHGEIYRRRGWLTSEGREIKNKSEILALLKALFLPKRLSIIHCLGHQKGDSAEARGNRLADQAAREAAIKTPPDTSTLLAGKRTADGSEFEKRTADGSEFESPKKKAKVE

SEQ ID NO: 2215 - protein, 2096 aa, synthetic construct
MPAAKRVKLDGGDKKYSIGLDIGTNSVGWAVITDEYKVPSKKFKVLGNTDRHSIKKNLIGALLFDSGETAEATRLKRTARRRYTRRKNRICYLQEIFSNEMAKVDDSFFHRLEESFLVEEDKKHERHPIFGNIVDEVAYHEKYPTIYHLRKKLVDSTDKADLRLIYLALAHMIKFRGHFLIEGDLNPDNSDVDKLFIQLVQTYNQLFEENPINASGVDAKAILSARLSKSRRLENLIAQLPGEKKNGLFGNLIALSLGLTPNFKSNFDLAEDAKLQLSKDTYDDDLDNLLAQIGDQYADLFLAAKNLSDAILLSDILRVNTEITKAPLSASMIKRYDEHHQDLTLLKALVRQQLPEKYKEIFFDQSKNGYAGYIDGGASQEEFYKFIKPILEKMDGTEELLVKLNREDLLRKQRTFDNGSIPHQIHLGELHAILRRQEDFYPFLKDNREKIEKILTFRIPYYVGPLARGNSRFAWMTRKSEETITPWNFEEVVDKGASAQSFIERMTNFDKNLPNEKVLPKHSLLYEYFTVYNELTKVKYVTEGMRKPAFLSGEQKKAIVDLLFKTNRKVTVKQLKEDYFKKIECFDSVEISGVEDRFNASLGTYHDLLKIIKDKDFLDNEENEDILEDIVLTLTLFEDREMIEERLKTYAHLFDDKVMKQLKRRRYTGWGRLSRKLINGIRDKQSGKTILDFLKSDGFANRNFMQLIHDDSLTFKEDIQKAQVSGQGDSLHEHIANLAGSPAIKKGILQTVKVVDELVKVMGRHKPENIVIEMARENQTTQKGQKNSRERMKRIEEGIKELGSQILKEHPVENTQLQNEKLYLYYLQNGRDMYVDQELDINRLSDYDVDHIVPQSFLKDDSIDNKVLTRSDKARGKSDNVPSEEVVKKMKNYWRQLLNAKLITQRKFDNLTKAERGGLSELDKAGFIKRQLVETRQITKHVAQILDSRMNTKYDENDKLIREVKVITLKSKLVSDFRKDFQFYKVREINNYHHAHDAYLNAVVGTALIKKYPKLESEFVYGDYKVYDVRKMIAKSEQEIGKATAKYFFYSNIMNFFKTEITLANGEIRKRPLIETNGETGEIVWDKGRDFATVRKVLSMPQVNIVKKTEVQTGGFSKESILPKRNSDKLIARKKDWDPKKYGGFDSPTVAYSVLVVAKVEKGKSKKLKSVKELLGITIMERSSFEKNPIDFLEAKGYKEVKKDLIIKLPKYSLFELENGRKRMLASAGELQKGNELALPSKYVNFLYLASHYEKLKGSPEDNEQKQLFVEQHKHYLDEIIEQISEFSKRVILADANLDKVLSAYNKHRDKPIREQAENIIHLFTLTNLGAPAAFKYFDTTIDRKRYTSTKEVLDATLIHQSITGLYETRIDLSQLGGDGGGSSEAAAKPAPGGTLGIEDEYRLHETSTEPDVSLGSTWLSDFPQAWAETGGMGLAVRQAPLIIPLKATSTPVSIQQYPMSHEARLGIKPHIQRLLDQGILVPCQSPWNTPLLPVKKPGTNDYRPVQDLREVNKRVEDIHPTVPNPYNLLSGLPPSHQWYTVLDLKDAFFCLRLHPTSQPLFAFEWRDPGMGISGQLTWTRLPQGFKNSPTLFNEALHRDLADFRIQHPDLILLQYVDDILLAATSELDCQQGTRALLQTLGDLGYRASAKKAQICQKQVKYLGYLLREGQRWLTEARKETVMGQPVPKTPRQLREFLGTAGFCRLWIPGFAEMAAPLYPLTKPGTLFSWGPDQQKAYQEIKQALLTAPALGLPDLTKPFELFVDEKQGYAKGVLTQKLGPWRRPVAYLSKKLDPVAAGWPPCLRMVAAIAVLTKDAGKLTMGQPLVILAPHAVEALVKQPPDRWLSNARMTHYQAMLLDTDRVQFGPVVALNPATLLPLPEEGAPHDCLEILAETHGTRPDLTDQPIPDADHTWYTDGSSFLQEGQRKAGAAVTTETEVIWAGALPAGTSAQRAELIALTQALKMAEGKRLNVYTDSRYAFATAHIHGEIYRRRGWLTSEGREIKNKSEILALLKALFLPKRLSIIHCLGHQKGDSAEARGNRLADQAAREAAIKTPPDTSTLLAGKRTADGSEFEKRTADGSEFESPKKKAKVE

SEQ ID NO: 2216 - protein, 2091 aa, synthetic construct
MPAAKRVKLDGGDKKYSIGLDIGTNSVGWAVITDEYKVPSKKFKVLGNTDRHSIKKNLIGALLFDSGETAEATRLKRTARRRYTRRKNRICYLQEIFSNEMAKVDDSFFHRLEESFLVEEDKKHERHPIFGNIVDEVAYHEKYPTIYHLRKKLVDSTDKADLRLIYLALAHMIKFRGHFLIEGDLNPDNSDVDKLFIQLVQTYNQLFEENPINASGVDAKAILSARLSKSRRLENLIAQLPGEKKNGLFGNLIALSLGLTPNFKSNFDLAEDAKLQLSKDTYDDDLDNLLAQIGDQYADLFLAAKNLSDAILLSDILRVNTEITKAPLSASMIKRYDEHHQDLTLLKALVRQQLPEKYKEIFFDQSKNGYAGYIDGGASQEEFYKFIKPILEKMDGTEELLVKLNREDLLRKQRTFDNGSIPHQIHLGELHAILRRQEDFYPFLKDNREKIEKILTFRIPYYVGPLARGNSRFAWMTRKSEETITPWNFEEVVDKGASAQSFIERMTNFDKNLPNEKVLPKHSLLYEYFTVYNELTKVKYVTEGMRKPAFLSGEQKKAIVDLLFKTNRKVTVKQLKEDYFKKIECFDSVEISGVEDRFNASLGTYHDLLKIIKDKDFLDNEENEDILEDIVLTLTLFEDREMIEERLKTYAHLFDDKVMKQLKRRRYTGWGRLSRKLINGIRDKQSGKTILDFLKSDGFANRNFMQLIHDDSLTFKEDIQKAQVSGQGDSLHEHIANLAGSPAIKKGILQTVKVVDELVKVMGRHKPENIVIEMARENQTTQKGQKNSRERMKRIEEGIKELGSQILKEHPVENTQLQNEKLYLYYLQNGRDMYVDQELDINRLSDYDVDHIVPQSFLKDDSIDNKVLTRSDKARGKSDNVPSEEVVKKMKNYWRQLLNAKLITQRKFDNLTKAERGGLSELDKAGFIKRQLVETRQITKHVAQILDSRMNTKYDENDKLIREVKVITLKSKLVSDFRKDFQFYKVREINNYHHAHDAYLNAVVGTALIKKYPKLESEFVYGDYKVYDVRKMIAKSEQEIGKATAKYFFYSNIMNFFKTEITLANGEIRKRPLIETNGETGEIVWDKGRDFATVRKVLSMPQVNIVKKTEVQTGGFSKESILPKRNSDKLIARKKDWDPKKYGGFDSPTVAYSVLVVAKVEKGKSKKLKSVKELLGITIMERSSFEKNPIDFLEAKGYKEVKKDLIIKLPKYSLFELENGRKRMLASAGELQKGNELALPSKYVNFLYLASHYEKLKGSPEDNEQKQLFVEQHKHYLDEIIEQISEFSKRVILADANLDKVLSAYNKHRDKPIREQAENIIHLFTLTNLGAPAAFKYFDTTIDRKRYTSTKEVLDATLIHQSITGLYETRIDLSQLGGDGGGGGGGGGGTLGIEDEYRLHETSTEPDVSLGSTWLSDFPQAWAETGGMGLAVRQAPLIIPLKATSTPVSIQQYPMSHEARLGIKPHIQRLLDQGILVPCQSPWNTPLLPVKKPGTNDYRPVQDLREVNKRVEDIHPTVPNPYNLLSGLPPSHQWYTVLDLKDAFFCLRLHPTSQPLFAFEWRDPGMGISGQLTWTRLPQGFKNSPTLFNEALHRDLADFRIQHPDLILLQYVDDILLAATSELDCQQGTRALLQTLGDLGYRASAKKAQICQKQVKYLGYLLREGQRWLTEARKETVMGQPVPKTPRQLREFLGTAGFCRLWIPGFAEMAAPLYPLTKPGTLFSWGPDQQKAYQEIKQALLTAPALGLPDLTKPFELFVDEKQGYAKGVLTQKLGPWRRPVAYLSKKLDPVAAGWPPCLRMVAAIAVLTKDAGKLTMGQPLVILAPHAVEALVKQPPDRWLSNARMTHYQAMLLDTDRVQFGPVVALNPATLLPLPEEGAPHDCLEILAETHGTRPDLTDQPIPDADHTWYTDGSSFLQEGQRKAGAAVTTETEVIWAGALPAGTSAQRAELIALTQALKMAEGKRLNVYTDSRYAFATAHIHGEIYRRRGWLTSEGREIKNKSEILALLKALFLPKRLSIIHCLGHQKGDSAEARGNRLADQAAREAAIKTPPDTSTLLAGKRTADGSEFEKRTADGSEFESPKKKAKVE

SEQ ID NO: 2217 - protein, 2094 aa, synthetic construct
MPAAKRVKLDGGDKKYSIGLDIGTNSVGWAVITDEYKVPSKKFKVLGNTDRHSIKKNLIGALLFDSGETAEATRLKRTARRRYTRRKNRICYLQEIFSNEMAKVDDSFFHRLEESFLVEEDKKHERHPIFGNIVDEVAYHEKYPTIYHLRKKLVDSTDKADLRLIYLALAHMIKFRGHFLIEGDLNPDNSDVDKLFIQLVQTYNQLFEENPINASGVDAKAILSARLSKSRRLENLIAQLPGEKKNGLFGNLIALSLGLTPNFKSNFDLAEDAKLQLSKDTYDDDLDNLLAQIGDQYADLFLAAKNLSDAILLSDILRVNTEITKAPLSASMIKRYDEHHQDLTLLKALVRQQLPEKYKEIFFDQSKNGYAGYIDGGASQEEFYKFIKPILEKMDGTEELLVKLNREDLLRKQRTFDNGSIPHQIHLGELHAILRRQEDFYPFLKDNREKIEKILTFRIPYYVGPLARGNSRFAWMTRKSEETITPWNFEEVVDKGASAQSFIERMTNFDKNLPNEKVLPKHSLLYEYFTVYNELTKVKYVTEGMRKPAFLSGEQKKAIVDLLFKTNRKVTVKQLKEDYFKKIECFDSVEISGVEDRFNASLGTYHDLLKIIKDKDFLDNEENEDILEDIVLTLTLFEDREMIEERLKTYAHLFDDKVMKQLKRRRYTGWGRLSRKLINGIRDKQSGKTILDFLKSDGFANRNFMQLIHDDSLTFKEDIQKAQVSGQGDSLHEHIANLAGSPAIKKGILQTVKVVDELVKVMGRHKPENIVIEMARENQTTQKGQKNSRERMKRIEEGIKELGSQILKEHPVENTQLQNEKLYLYYLQNGRDMYVDQELDINRLSDYDVDHIVPQSFLKDDSIDNKVLTRSDKARGKSDNVPSEEVVKKMKNYWRQLLNAKLITQRKFDNLTKAERGGLSELDKAGFIKRQLVETRQITKHVAQILDSRMNTKYDENDKLIREVKVITLKSKLVSDFRKDFQFYKVREINNYHHAHDAYLNAVVGTALIKKYPKLESEFVYGDYKVYDVRKMIAKSEQEIGKATAKYFFYSNIMNFFKTEITLANGEIRKRPLIETNGETGEIVWDKGRDFATVRKVLSMPQVNIVKKTEVQTGGFSKESILPKRNSDKLIARKKDWDPKKYGGFDSPTVAYSVLVVAKVEKGKSKKLKSVKELLGITIMERSSFEKNPIDFLEAKGYKEVKKDLIIKLPKYSLFELENGRKRMLASAGELQKGNELALPSKYVNFLYLASHYEKLKGSPEDNEQKQLFVEQHKHYLDEIIEQISEFSKRVILADANLDKVLSAYNKHRDKPIREQAENIIHLFTLTNLGAPAAFKYFDTTIDRKRYTSTKEVLDATLIHQSITGLYETRIDLSQLGGDGGGGSGSSPAPGGTLGIEDEYRLHETSTEPDVSLGSTWLSDFPQAWAETGGMGLAVRQAPLIIPLKATSTPVSIQQYPMSHEARLGIKPHIQRLLDQGILVPCQSPWNTPLLPVKKPGTNDYRPVQDLREVNKRVEDIHPTVPNPYNLLSGLPPSHQWYTVLDLKDAFFCLRLHPTSQPLFAFEWRDPGMGISGQLTWTRLPQGFKNSPTLFNEALHRDLADFRIQHPDLILLQYVDDILLAATSELDCQQGTRALLQTLGDLGYRASAKKAQICQKQVKYLGYLLREGQRWLTEARKETVMGQPVPKTPRQLREFLGTAGFCRLWIPGFAEMAAPLYPLTKPGTLFSWGPDQQKAYQEIKQALLTAPALGLPDLTKPFELFVDEKQGYAKGVLTQKLGPWRRPVAYLSKKLDPVAAGWPPCLRMVAAIAVLTKDAGKLTMGQPLVILAPHAVEALVKQPPDRWLSNARMTHYQAMLLDTDRVQFGPVVALNPATLLPLPEEGAPHDCLEILAETHGTRPDLTDQPIPDADHTWYTDGSSFLQEGQRKAGAAVTTETEVIWAGALPAGTSAQRAELIALTQALKMAEGKRLNVYTDSRYAFATAHIHGEIYRRRGWLTSEGREIKNKSEILALLKALFLPKRLSIIHCLGHQKGDSAEARGNRLADQAAREAAIKTPPDTSTLLAGKRTADGSEFEKRTADGSEFESPKKKAKVE

SEQ ID NO: 2218 - protein, 2096 aa, synthetic construct
MPAAKRVKLDGGDKKYSIGLDIGTNSVGWAVITDEYKVPSKKFKVLGNTDRHSIKKNLIGALLFDSGETAEATRLKRTARRRYTRRKNRICYLQEIFSNEMAKVDDSFFHRLEESFLVEEDKKHERHPIFGNIVDEVAYHEKYPTIYHLRKKLVDSTDKADLRLIYLALAHMIKFRGHFLIEGDLNPDNSDVDKLFIQLVQTYNQLFEENPINASGVDAKAILSARLSKSRRLENLIAQLPGEKKNGLFGNLIALSLGLTPNFKSNFDLAEDAKLQLSKDTYDDDLDNLLAQIGDQYADLFLAAKNLSDAILLSDILRVNTEITKAPLSASMIKRYDEHHQDLTLLKALVRQQLPEKYKEIFFDQSKNGYAGYIDGGASQEEFYKFIKPILEKMDGTEELLVKLNREDLLRKQRTFDNGSIPHQIHLGELHAILRRQEDFYPFLKDNREKIEKILTFRIPYYVGPLARGNSRFAWMTRKSEETITPWNFEEVVDKGASAQSFIERMTNFDKNLPNEKVLPKHSLLYEYFTVYNELTKVKYVTEGMRKPAFLSGEQKKAIVDLLFKTNRKVTVKQLKEDYFKKIECFDSVEISGVEDRFNASLGTYHDLLKIIKDKDFLDNEENEDILEDIVLTLTLFEDREMIEERLKTYAHLFDDKVMKQLKRRRYTGWGRLSRKLINGIRDKQSGKTILDFLKSDGFANRNFMQLIHDDSLTFKEDIQKAQVSGQGDSLHEHIANLAGSPAIKKGILQTVKVVDELVKVMGRHKPENIVIEMARENQTTQKGQKNSRERMKRIEEGIKELGSQILKEHPVENTQLQNEKLYLYYLQNGRDMYVDQELDINRLSDYDVDHIVPQSFLKDDSIDNKVLTRSDKARGKSDNVPSEEVVKKMKNYWRQLLNAKLITQRKFDNLTKAERGGLSELDKAGFIKRQLVETRQITKHVAQILDSRMNTKYDENDKLIREVKVITLKSKLVSDFRKDFQFYKVREINNYHHAHDAYLNAVVGTALIKKYPKLESEFVYGDYKVYDVRKMIAKSEQEIGKATAKYFFYSNIMNFFKTEITLANGEIRKRPLIETNGETGEIVWDKGRDFATVRKVLSMPQVNIVKKTEVQTGGFSKESILPKRNSDKLIARKKDWDPKKYGGFDSPTVAYSVLVVAKVEKGKSKKLKSVKELLGITIMERSSFEKNPIDFLEAKGYKEVKKDLIIKLPKYSLFELENGRKRMLASAGELQKGNELALPSKYVNFLYLASHYEKLKGSPEDNEQKQLFVEQHKHYLDEIIEQISEFSKRVILADANLDKVLSAYNKHRDKPIREQAENIIHLFTLTNLGAPAAFKYFDTTIDRKRYTSTKEVLDATLIHQSITGLYETRIDLSQLGGDGGEAAAKGGSGGGGGTLGIEDEYRLHETSTEPDVSLGSTWLSDFPQAWAETGGMGLAVRQAPLIIPLKATSTPVSIQQYPMSHEARLGIKPHIQRLLDQGILVPCQSPWNTPLLPVKKPGTNDYRPVQDLREVNKRVEDIHPTVPNPYNLLSGLPPSHQWYTVLDLKDAFFCLRLHPTSQPLFAFEWRDPGMGISGQLTWTRLPQGFKNSPTLFNEALHRDLADFRIQHPDLILLQYVDDILLAATSELDCQQGTRALLQTLGDLGYRASAKKAQICQKQVKYLGYLLREGQRWLTEARKETVMGQPVPKTPRQLREFLGTAGFCRLWIPGFAEMAAPLYPLTKPGTLFSWGPDQQKAYQEIKQALLTAPALGLPDLTKPFELFVDEKQGYAKGVLTQKLGPWRRPVAYLSKKLDPVAAGWPPCLRMVAAIAVLTKDAGKLTMGQPLVILAPHAVEALVKQPPDRWLSNARMTHYQAMLLDTDRVQFGPVVALNPATLLPLPEEGAPHDCLEILAETHGTRPDLTDQPIPDADHTWYTDGSSFLQEGQRKAGAAVTTETEVIWAGALPAGTSAQRAELIALTQALKMAEGKRLNVYTDSRYAFATAHIHGEIYRRRGWLTSEGREIKNKSEILALLKALFLPKRLSIIHCLGHQKGDSAEARGNRLADQAAREAAIKTPPDTSTLLAGKRTADGSEFEKRTADGSEFESPKKKAKVE

SEQ ID NO: 2219 - protein, 2094 aa, synthetic construct
MPAAKRVKLDGGDKKYSIGLDIGTNSVGWAVITDEYKVPSKKFKVLGNTDRHSIKKNLIGALLFDSGETAEATRLKRTARRRYTRRKNRICYLQEIFSNEMAKVDDSFFHRLEESFLVEEDKKHERHPIFGNIVDEVAYHEKYPTIYHLRKKLVDSTDKADLRLIYLALAHMIKFRGHFLIEGDLNPDNSDVDKLFIQLVQTYNQLFEENPINASGVDAKAILSARLSKSRRLENLIAQLPGEKKNGLFGNLIALSLGLTPNFKSNFDLAEDAKLQLSKDTYDDDLDNLLAQIGDQYADLFLAAKNLSDAILLSDILRVNTEITKAPLSASMIKRYDEHHQDLTLLKALVRQQLPEKYKEIFFDQSKNGYAGYIDGGASQEEFYKFIKPILEKMDGTEELLVKLNREDLLRKQRTFDNGSIPHQIHLGELHAILRRQEDFYPFLKDNREKIEKILTFRIPYYVGPLARGNSRFAWMTRKSEETITPWNFEEVVDKGASAQSFIERMTNFDKNLPNEKVLPKHSLLYEYFTVYNELTKVKYVTEGMRKPAFLSGEQKKAIVDLLFKTNRKVTVKQLKEDYFKKIECFDSVEISGVEDRFNASLGTYHDLLKIIKDKDFLDNEENEDILEDIVLTLTLFEDREMIEERLKTYAHLFDDKVMKQLKRRRYTGWGRLSRKLINGIRDKQSGKTILDFLKSDGFANRNFMQLIHDDSLTFKEDIQKAQVSGQGDSLHEHIANLAGSPAIKKGILQTVKVVDELVKVMGRHKPENIVIEMARENQTTQKGQKNSRERMKRIEEGIKELGSQILKEHPVENTQLQNEKLYLYYLQNGRDMYVDQELDINRLSDYDVDHIVPQSFLKDDSIDNKVLTRSDKARGKSDNVPSEEVVKKMKNYWRQLLNAKLITQRKFDNLTKAERGGLSELDKAGFIKRQLVETRQITKHVAQILDSRMNTKYDENDKLIREVKVITLKSKLVSDFRKDFQFYKVREINNYHHAHDAYLNAVVGTALIKKYPKLESEFVYGDYKVYDVRKMIAKSEQEIGKATAKYFFYSNIMNFFKTEITLANGEIRKRPLIETNGETGEIVWDKGRDFATVRKVLSMPQVNIVKKTEVQTGGFSKESILPKRNSDKLIARKKDWDPKKYGGFDSPTVAYSVLVVAKVEKGKSKKLKSVKELLGITIMERSSFEKNPIDFLEAKGYKEVKKDLIIKLPKYSLFELENGRKRMLASAGELQKGNELALPSKYVNFLYLASHYEKLKGSPEDNEQKQLFVEQHKHYLDEIIEQISEFSKRVILADANLDKVLSAYNKHRDKPIREQAENIIHLFTLTNLGAPAAFKYFDTTIDRKRYTSTKEVLDATLIHQSITGLYETRIDLSQLGGDGGGSSGSSGSSGGTLGIEDEYRLHETSTEPDVSLGSTWLSDFPQAWAETGGMGLAVRQAPLIIPLKATSTPVSIQQYPMSHEARLGIKPHIQRLLDQGILVPCQSPWNTPLLPVKKPGTNDYRPVQDLREVNKRVEDIHPTVPNPYNLLSGLPPSHQWYTVLDLKDAFFCLRLHPTSQPLFAFEWRDPGMGISGQLTWTRLPQGFKNSPTLFNEALHRDLADFRIQHPDLILLQYVDDILLAATSELDCQQGTRALLQTLGDLGYRASAKKAQICQKQVKYLGYLLREGQRWLTEARKETVMGQPVPKTPRQLREFLGTAGFCRLWIPGFAEMAAPLYPLTKPGTLFSWGPDQQKAYQEIKQALLTAPALGLPDLTKPFELFVDEKQGYAKGVLTQKLGPWRRPVAYLSKKLDPVAAGWPPCLRMVAAIAVLTKDAGKLTMGQPLVILAPHAVEALVKQPPDRWLSNARMTHYQAMLLDTDRVQFGPVVALNPATLLPLPEEGAPHDCLEILAETHGTRPDLTDQPIPDADHTWYTDGSSFLQEGQRKAGAAVTTETEVIWAGALPAGTSAQRAELIALTQALKMAEGKRLNVYTDSRYAFATAHIHGEIYRRRGWLTSEGREIKNKSEILALLKALFLPKRLSIIHCLGHQKGDSAEARGNRLADQAAREAAIKTPPDTSTLLAGKRTADGSEFEKRTADGSEFESPKKKAKVE

SEQ ID NO: 2220 - protein, 2097 aa, synthetic construct
MPAAKRVKLDGGDKKYSIGLDIGTNSVGWAVITDEYKVPSKKFKVLGNTDRHSIKKNLIGALLFDSGETAEATRLKRTARRRYTRRKNRICYLQEIFSNEMAKVDDSFFHRLEESFLVEEDKKHERHPIFGNIVDEVAYHEKYPTIYHLRKKLVDSTDKADLRLIYLALAHMIKFRGHFLIEGDLNPDNSDVDKLFIQLVQTYNQLFEENPINASGVDAKAILSARLSKSRRLENLIAQLPGEKKNGLFGNLIALSLGLTPNFKSNFDLAEDAKLQLSKDTYDDDLDNLLAQIGDQYADLFLAAKNLSDAILLSDILRVNTEITKAPLSASMIKRYDEHHQDLTLLKALVRQQLPEKYKEIFFDQSKNGYAGYIDGGASQEEFYKFIKPILEKMDGTEELLVKLNREDLLRKQRTFDNGSIPHQIHLGELHAILRRQEDFYPFLKDNREKIEKILTFRIPYYVGPLARGNSRFAWMTRKSEETITPWNFEEVVDKGASAQSFIERMTNFDKNLPNEKVLPKHSLLYEYFTVYNELTKVKYVTEGMRKPAFLSGEQKKAIVDLLFKTNRKVTVKQLKEDYFKKIECFDSVEISGVEDRFNASLGTYHDLLKIIKDKDFLDNEENEDILEDIVLTLTLFEDREMIEERLKTYAHLFDDKVMKQLKRRRYTGWGRLSRKLINGIRDKQSGKTILDFLKSDGFANRNFMQLIHDDSLTFKEDIQKAQVSGQGDSLHEHIANLAGSPAIKKGILQTVKVVDELVKVMGRHKPENIVIEMARENQTTQKGQKNSRERMKRIEEGIKELGSQILKEHPVENTQLQNEKLYLYYLQNGRDMYVDQELDINRLSDYDVDHIVPQSFLKDDSIDNKVLTRSDKARGKSDNVPSEEVVKKMKNYWRQLLNAKLITQRKFDNLTKAERGGLSELDKAGFIKRQLVETRQITKHVAQILDSRMNTKYDENDKLIREVKVITLKSKLVSDFRKDFQFYKVREINNYHHAHDAYLNAVVGTALIKKYPKLESEFVYGDYKVYDVRKMIAKSEQEIGKATAKYFFYSNIMNFFKTEITLANGEIRKRPLIETNGETGEIVWDKGRDFATVRKVLSMPQVNIVKKTEVQTGGFSKESILPKRNSDKLIARKKDWDPKKYGGFDSPTVAYSVLVVAKVEKGKSKKLKSVKELLGITIMERSSFEKNPIDFLEAKGYKEVKKDLIIKLPKYSLFELENGRKRMLASAGELQKGNELALPSKYVNFLYLASHYEKLKGSPEDNEQKQLFVEQHKHYLDEIIEQISEFSKRVILADANLDKVLSAYNKHRDKPIREQAENIIHLFTLTNLGAPAAFKYFDTTIDRKRYTSTKEVLDATLIHQSITGLYETRIDLSQLGGDGGGSAGSAAGSGEFGGTLGIEDEYRLHETSTEPDVSLGSTWLSDFPQAWAETGGMGLAVRQAPLIIPLKATSTPVSIQQYPMSHEARLGIKPHIQRLLDQGILVPCQSPWNTPLLPVKKPGTNDYRPVQDLREVNKRVEDIHPTVPNPYNLLSGLPPSHQWYTVLDLKDAFFCLRLHPTSQPLFAFEWRDPGMGISGQLTWTRLPQGFKNSPTLFNEALHRDLADFRIQHPDLILLQYVDDILLAATSELDCQQGTRALLQTLGDLGYRASAKKAQICQKQVKYLGYLLREGQRWLTEARKETVMGQPVPKTPRQLREFLGTAGFCRLWIPGFAEMAAPLYPLTKPGTLFSWGPDQQKAYQEIKQALLTAPALGLPDLTKPFELFVDEKQGYAKGVLTQKLGPWRRPVAYLSKKLDPVAAGWPPCLRMVAAIAVLTKDAGKLTMGQPLVILAPHAVEALVKQPPDRWLSNARMTHYQAMLLDTDRVQFGPVVALNPATLLPLPEEGAPHDCLEILAETHGTRPDLTDQPIPDADHTWYTDGSSFLQEGQRKAGAAVTTETEVIWAGALPAGTSAQRAELIALTQALKMAEGKRLNVYTDSRYAFATAHIHGEIYRRRGWLTSEGREIKNKSEILALLKALFLPKRLSIIHCLGHQKGDSAEARGNRLADQAAREAAIKTPPDTSTLLAGKRTADGSEFEKRTADGSEFESPKKKAKVE

SEQ ID NO: 2221 - protein, 2090 aa, synthetic construct
MPAAKRVKLDGGDKKYSIGLDIGTNSVGWAVITDEYKVPSKKFKVLGNTDRHSIKKNLIGALLFDSGETAEATRLKRTARRRYTRRKNRICYLQEIFSNEMAKVDDSFFHRLEESFLVEEDKKHERHPIFGNIVDEVAYHEKYPTIYHLRKKLVDSTDKADLRLIYLALAHMIKFRGHFLIEGDLNPDNSDVDKLFIQLVQTYNQLFEENPINASGVDAKAILSARLSKSRRLENLIAQLPGEKKNGLFGNLIALSLGLTPNFKSNFDLAEDAKLQLSKDTYDDDLDNLLAQIGDQYADLFLAAKNLSDAILLSDILRVNTEITKAPLSASMIKRYDEHHQDLTLLKALVRQQLPEKYKEIFFDQSKNGYAGYIDGGASQEEFYKFIKPILEKMDGTEELLVKLNREDLLRKQRTFDNGSIPHQIHLGELHAILRRQEDFYPFLKDNREKIEKILTFRIPYYVGPLARGNSRFAWMTRKSEETITPWNFEEVVDKGASAQSFIERMTNFDKNLPNEKVLPKHSLLYEYFTVYNELTKVKYVTEGMRKPAFLSGEQKKAIVDLLFKTNRKVTVKQLKEDYFKKIECFDSVEISGVEDRFNASLGTYHDLLKIIKDKDFLDNEENEDILEDIVLTLTLFEDREMIEERLKTYAHLFDDKVMKQLKRRRYTGWGRLSRKLINGIRDKQSGKTILDFLKSDGFANRNFMQLIHDDSLTFKEDIQKAQVSGQGDSLHEHIANLAGSPAIKKGILQTVKVVDELVKVMGRHKPENIVIEMARENQTTQKGQKNSRERMKRIEEGIKELGSQILKEHPVENTQLQNEKLYLYYLQNGRDMYVDQELDINRLSDYDVDHIVPQSFLKDDSIDNKVLTRSDKARGKSDNVPSEEVVKKMKNYWRQLLNAKLITQRKFDNLTKAERGGLSELDKAGFIKRQLVETRQITKHVAQILDSRMNTKYDENDKLIREVKVITLKSKLVSDFRKDFQFYKVREINNYHHAHDAYLNAVVGTALIKKYPKLESEFVYGDYKVYDVRKMIAKSEQEIGKATAKYFFYSNIMNFFKTEITLANGEIRKRPLIETNGETGEIVWDKGRDFATVRKVLSMPQVNIVKKTEVQTGGFSKESILPKRNSDKLIARKKDWDPKKYGGFDSPTVAYSVLVVAKVEKGKSKKLKSVKELLGITIMERSSFEKNPIDFLEAKGYKEVKKDLIIKLPKYSLFELENGRKRMLASAGELQKGNELALPSKYVNFLYLASHYEKLKGSPEDNEQKQLFVEQHKHYLDEIIEQISEFSKRVILADANLDKVLSAYNKHRDKPIREQAENIIHLFTLTNLGAPAAFKYFDTTIDRKRYTSTKEVLDATLIHQSITGLYETRIDLSQLGGDGGGGGGGGGTLGIEDEYRLHETSTEPDVSLGSTWLSDFPQAWAETGGMGLAVRQAPLIIPLKATSTPVSIQQYPMSHEARLGIKPHIQRLLDQGILVPCQSPWNTPLLPVKKPGTNDYRPVQDLREVNKRVEDIHPTVPNPYNLLSGLPPSHQWYTVLDLKDAFFCLRLHPTSQPLFAFEWRDPGMGISGQLTWTRLPQGFKNSPTLFNEALHRDLADFRIQHPDLILLQYVDDILLAATSELDCQQGTRALLQTLGDLGYRASAKKAQICQKQVKYLGYLLREGQRWLTEARKETVMGQPVPKTPRQLREFLGTAGFCRLWIPGFAEMAAPLYPLTKPGTLFSWGPDQQKAYQEIKQALLTAPALGLPDLTKPFELFVDEKQGYAKGVLTQKLGPWRRPVAYLSKKLDPVAAGWPPCLRMVAAIAVLTKDAGKLTMGQPLVILAPHAVEALVKQPPDRWLSNARMTHYQAMLLDTDRVQFGPVVALNPATLLPLPEEGAPHDCLEILAETHGTRPDLTDQPIPDADHTWYTDGSSFLQEGQRKAGAAVTTETEVIWAGALPAGTSAQRAELIALTQALKMAEGKRLNVYTDSRYAFATAHIHGEIYRRRGWLTSEGREIKNKSEILALLKALFLPKRLSIIHCLGHQKGDSAEARGNRLADQAAREAAIKTPPDTSTLLAGKRTADGSEFEKRTADGSEFESPKKKAKVE

SEQ ID NO: 2222 - protein, 2094 aa, synthetic construct
MPAAKRVKLDGGDKKYSIGLDIGTNSVGWAVITDEYKVPSKKFKVLGNTDRHSIKKNLIGALLFDSGETAEATRLKRTARRRYTRRKNRICYLQEIFSNEMAKVDDSFFHRLEESFLVEEDKKHERHPIFGNIVDEVAYHEKYPTIYHLRKKLVDSTDKADLRLIYLALAHMIKFRGHFLIEGDLNPDNSDVDKLFIQLVQTYNQLFEENPINASGVDAKAILSARLSKSRRLENLIAQLPGEKKNGLFGNLIALSLGLTPNFKSNFDLAEDAKLQLSKDTYDDDLDNLLAQIGDQYADLFLAAKNLSDAILLSDILRVNTEITKAPLSASMIKRYDEHHQDLTLLKALVRQQLPEKYKEIFFDQSKNGYAGYIDGGASQEEFYKFIKPILEKMDGTEELLVKLNREDLLRKQRTFDNGSIPHQIHLGELHAILRRQEDFYPFLKDNREKIEKILTFRIPYYVGPLARGNSRFAWMTRKSEETITPWNFEEVVDKGASAQSFIERMTNFDKNLPNEKVLPKHSLLYEYFTVYNELTKVKYVTEGMRKPAFLSGEQKKAIVDLLFKTNRKVTVKQLKEDYFKKIECFDSVEISGVEDRFNASLGTYHDLLKIIKDKDFLDNEENEDILEDIVLTLTLFEDREMIEERLKTYAHLFDDKVMKQLKRRRYTGWGRLSRKLINGIRDKQSGKTILDFLKSDGFANRNFMQLIHDDSLTFKEDIQKAQVSGQGDSLHEHIANLAGSPAIKKGILQTVKVVDELVKVMGRHKPENIVIEMARENQTTQKGQKNSRERMKRIEEGIKELGSQILKEHPVENTQLQNEKLYLYYLQNGRDMYVDQELDINRLSDYDVDHIVPQSFLKDDSIDNKVLTRSDKARGKSDNVPSEEVVKKMKNYWRQLLNAKLITQRKFDNLTKAERGGLSELDKAGFIKRQLVETRQITKHVAQILDSRMNTKYDENDKLIREVKVITLKSKLVSDFRKDFQFYKVREINNYHHAHDAYLNAVVGTALIKKYPKLESEFVYGDYKVYDVRKMIAKSEQEIGKATAKYFFYSNIMNFFKTEITLANGEIRKRPLIETNGETGEIVWDKGRDFATVRKVLSMPQVNIVKKTEVQTGGFSKESILPKRNSDKLIARKKDWDPKKYGGFDSPTVAYSVLVVAKVEKGKSKKLKSVKELLGITIMERSSFEKNPIDFLEAKGYKEVKKDLIIKLPKYSLFELENGRKRMLASAGELQKGNELALPSKYVNFLYLASHYEKLKGSPEDNEQKQLFVEQHKHYLDEIIEQISEFSKRVILADANLDKVLSAYNKHRDKPIREQAENIIHLFTLTNLGAPAAFKYFDTTIDRKRYTSTKEVLDATLIHQSITGLYETRIDLSQLGGDGGGSSGGSPAPGGTLGIEDEYRLHETSTEPDVSLGSTWLSDFPQAWAETGGMGLAVRQAPLIIPLKATSTPVSIQQYPMSHEARLGIKPHIQRLLDQGILVPCQSPWNTPLLPVKKPGTNDYRPVQDLREVNKRVEDIHPTVPNPYNLLSGLPPSHQWYTVLDLKDAFFCLRLHPTSQPLFAFEWRDPGMGISGQLTWTRLPQGFKNSPTLFNEALHRDLADFRIQHPDLILLQYVDDILLAATSELDCQQGTRALLQTLGDLGYRASAKKAQICQKQVKYLGYLLREGQRWLTEARKETVMGQPVPKTPRQLREFLGTAGFCRLWIPGFAEMAAPLYPLTKPGTLFSWGPDQQKAYQEIKQALLTAPALGLPDLTKPFELFVDEKQGYAKGVLTQKLGPWRRPVAYLSKKLDPVAAGWPPCLRMVAAIAVLTKDAGKLTMGQPLVILAPHAVEALVKQPPDRWLSNARMTHYQAMLLDTDRVQFGPVVALNPATLLPLPEEGAPHDCLEILAETHGTRPDLTDQPIPDADHTWYTDGSSFLQEGQRKAGAAVTTETEVIWAGALPAGTSAQRAELIALTQALKMAEGKRLNVYTDSRYAFATAHIHGEIYRRRGWLTSEGREIKNKSEILALLKALFLPKRLSIIHCLGHQKGDSAEARGNRLADQAAREAAIKTPPDTSTLLAGKRTADGSEFEKRTADGSEFESPKKKAKVE

SEQ ID NO: 2223 - protein, 2096 aa, synthetic construct
MPAAKRVKLDGGDKKYSIGLDIGTNSVGWAVITDEYKVPSKKFKVLGNTDRHSIKKNLIGALLFDSGETAEATRLKRTARRRYTRRKNRICYLQEIFSNEMAKVDDSFFHRLEESFLVEEDKKHERHPIFGNIVDEVAYHEKYPTIYHLRKKLVDSTDKADLRLIYLALAHMIKFRGHFLIEGDLNPDNSDVDKLFIQLVQTYNQLFEENPINASGVDAKAILSARLSKSRRLENLIAQLPGEKKNGLFGNLIALSLGLTPNFKSNFDLAEDAKLQLSKDTYDDDLDNLLAQIGDQYADLFLAAKNLSDAILLSDILRVNTEITKAPLSASMIKRYDEHHQDLTLLKALVRQQLPEKYKEIFFDQSKNGYAGYIDGGASQEEFYKFIKPILEKMDGTEELLVKLNREDLLRKQRTFDNGSIPHQIHLGELHAILRRQEDFYPFLKDNREKIEKILTFRIPYYVGPLARGNSRFAWMTRKSEETITPWNFEEVVDKGASAQSFIERMTNFDKNLPNEKVLPKHSLLYEYFTVYNELTKVKYVTEGMRKPAFLSGEQKKAIVDLLFKTNRKVTVKQLKEDYFKKIECFDSVEISGVEDRFNASLGTYHDLLKIIKDKDFLDNEENEDILEDIVLTLTLFEDREMIEERLKTYAHLFDDKVMKQLKRRRYTGWGRLSRKLINGIRDKQSGKTILDFLKSDGFANRNFMQLIHDDSLTFKEDIQKAQVSGQGDSLHEHIANLAGSPAIKKGILQTVKVVDELVKVMGRHKPENIVIEMARENQTTQKGQKNSRERMKRIEEGIKELGSQILKEHPVENTQLQNEKLYLYYLQNGRDMYVDQELDINRLSDYDVDHIVPQSFLKDDSIDNKVLTRSDKARGKSDNVPSEEVVKKMKNYWRQLLNAKLITQRKFDNLTKAERGGLSELDKAGFIKRQLVETRQITKHVAQILDSRMNTKYDENDKLIREVKVITLKSKLVSDFRKDFQFYKVREINNYHHAHDAYLNAVVGTALIKKYPKLESEFVYGDYKVYDVRKMIAKSEQEIGKATAKYFFYSNIMNFFKTEITLANGEIRKRPLIETNGETGEIVWDKGRDFATVRKVLSMPQVNIVKKTEVQTGGFSKESILPKRNSDKLIARKKDWDPKKYGGFDSPTVAYSVLVVAKVEKGKSKKLKSVKELLGITIMERSSFEKNPIDFLEAKGYKEVKKDLIIKLPKYSLFELENGRKRMLASAGELQKGNELALPSKYVNFLYLASHYEKLKGSPEDNEQKQLFVEQHKHYLDEIIEQISEFSKRVILADANLDKVLSAYNKHRDKPIREQAENIIHLFTLTNLGAPAAFKYFDTTIDRKRYTSTKEVLDATLIHQSITGLYETRIDLSQLGGDGGEAAAKPAPGGGGGTLNIEDEYRLHETSKEPDVSLGSTWLSDFPQAWAETGGMGLAVRQAPLIIPLKATSTPVSIKQYPMSQEARLGIKPHIQRLLDQGILVPCQSPWNTPLLPVKKPGTNDYRPVQDLREVNKRVEDIHPTVPNPYNLLSGLPPSHQWYTVLDLKDAFFCLRLHPTSQPLFAFEWRDPEMGISGQLTWTRLPQGFKNSPTLFDEALHRDLAGFRIQHPDLILLQYVDDLLLAATSELDCQQGTRALLQTLGDLGYRASAKKAQICQKQVKYLGYLLKEGQRWLTEARKETVMGQPIPKTPRQLREFLGTAGFCRLWIPGFAEMAAPLYPLTKTGTLFNWGPDQQKAFQEIKQALLTAPALGLPDLTKPFELFVDEKQGYAKGVLTQKLGPWRRPVAYLSKKLDPVAAGWPPCLRMVAAIAVLTKDAGKLTMGQPLVILAPHAVEALVKQPPDRWLSNARMTHYQALLLDTDRVQFGPVVALNPATLLPLPEEGLQHDCLDILAEAHGTRSDLMDQPLPDADHTWYTDGSSFLQEGQRKAGAAVTTETEVIWARALPAGTSAQRAELIALTQALKMAEGKKLNVYTDSRYAFATAHIHGEIYRRRGLLTSEGKEIKNKDEILALLKALFLPKRLSIIHCPGHQKGNSAEARGNRMADQAAREVATRETPETSTLLAGKRTADGSEFEKRTADGSEFESPKKKAKVE

SEQ ID NO: 2224 - protein, 2115 aa, synthetic construct
MPAAKRVKLDGGDKKYSIGLDIGTNSVGWAVITDEYKVPSKKFKVLGNTDRHSIKKNLIGALLFDSGETAEATRLKRTARRRYTRRKNRICYLQEIFSNEMAKVDDSFFHRLEESFLVEEDKKHERHPIFGNIVDEVAYHEKYPTIYHLRKKLVDSTDKADLRLIYLALAHMIKFRGHFLIEGDLNPDNSDVDKLFIQLVQTYNQLFEENPINASGVDAKAILSARLSKSRRLENLIAQLPGEKKNGLFGNLIALSLGLTPNFKSNFDLAEDAKLQLSKDTYDDDLDNLLAQIGDQYADLFLAAKNLSDAILLSDILRVNTEITKAPLSASMIKRYDEHHQDLTLLKALVRQQLPEKYKEIFFDQSKNGYAGYIDGGASQEEFYKFIKPILEKMDGTEELLVKLNREDLLRKQRTFDNGSIPHQIHLGELHAILRRQEDFYPFLKDNREKIEKILTFRIPYYVGPLARGNSRFAWMTRKSEETITPWNFEEVVDKGASAQSFIERMTNFDKNLPNEKVLPKHSLLYEYFTVYNELTKVKYVTEGMRKPAFLSGEQKKAIVDLLFKTNRKVTVKQLKEDYFKKIECFDSVEISGVEDRFNASLGTYHDLLKIIKDKDFLDNEENEDILEDIVLTLTLFEDREMIEERLKTYAHLFDDKVMKQLKRRRYTGWGRLSRKLINGIRDKQSGKTILDFLKSDGFANRNFMQLIHDDSLTFKEDIQKAQVSGQGDSLHEHIANLAGSPAIKKGILQTVKVVDELVKVMGRHKPENIVIEMARENQTTQKGQKNSRERMKRIEEGIKELGSQILKEHPVENTQLQNEKLYLYYLQNGRDMYVDQELDINRLSDYDVDHIVPQSFLKDDSIDNKVLTRSDKARGKSDNVPSEEVVKKMKNYWRQLLNAKLITQRKFDNLTKAERGGLSELDKAGFIKRQLVETRQITKHVAQILDSRMNTKYDENDKLIREVKVITLKSKLVSDFRKDFQFYKVREINNYHHAHDAYLNAVVGTALIKKYPKLESEFVYGDYKVYDVRKMIAKSEQEIGKATAKYFFYSNIMNFFKTEITLANGEIRKRPLIETNGETGEIVWDKGRDFATVRKVLSMPQVNIVKKTEVQTGGFSKESILPKRNSDKLIARKKDWDPKKYGGFDSPTVAYSVLVVAKVEKGKSKKLKSVKELLGITIMERSSFEKNPIDFLEAKGYKEVKKDLIIKLPKYSLFELENGRKRMLASAGELQKGNELALPSKYVNFLYLASHYEKLKGSPEDNEQKQLFVEQHKHYLDEIIEQISEFSKRVILADANLDKVLSAYNKHRDKPIREQAENIIHLFTLTNLGAPAAFKYFDTTIDRKRYTSTKEVLDATLIHQSITGLYETRIDLSQLGGDGGGGGGSGGGGSGGGGSGGGGSGGGGSGGGGSGGTLNIEDEYRLHETSKEPDVSLGSTWLSDFPQAWAETGGMGLAVRQAPLIIPLKATSTPVSIKQYPMSQEARLGIKPHIQRLLDQGILVPCQSPWNTPLLPVKKPGTNDYRPVQDLREVNKRVEDIHPTVPNPYNLLSGLPPSHQWYTVLDLKDAFFCLRLHPTSQPLFAFEWRDPEMGISGQLTWTRLPQGFKNSPTLFNEALHRDLAGFRIQHPDLILLQYVDDLLLAATSELDCQQGTRALLQTLGDLGYRASAKKAQICQKQVKYLGYLLKEGQRWLTEARKETVMGQPIPKTPRQLREFLGTAGFCRLWIPGFAEMAAPLYPLTKPGTLFNWGPDQQKAFQEIKQALLTAPALGLPDLTKPFELFVDEKQGYAKGVLTQKLGPWRRPVAYLSKKLDPVAAGWPPCLRMVAAIAVLTKDAGKLTMGQPLVILAPHAVEALVKQPPDRWLSNARMTHYQALLLDTDRVQFGPVVALNPATLLPLPEEGLQHDCLDILAEAHGTRSDLMDQPLPDADHTWYTDGSSFLQEGQRKAGAAVTTETEVIWARALPAGTSAQRAELIALTQALKMAEGKKLNVYTDSRYAFATAHIHGEIYRRRGWLTSEGKEIKNKDEILALLKALFLPKRLSIIHCPGHQKGNSAEARGNRMADQAAREVATRETPETSTLLAGKRTADGSEFEKRTADGSEFESPKKKAKVE

SEQ ID NO: 2225 - protein, 2096 aa, synthetic construct
MPAAKRVKLDGGDKKYSIGLDIGTNSVGWAVITDEYKVPSKKFKVLGNTDRHSIKKNLIGALLFDSGETAEATRLKRTARRRYTRRKNRICYLQEIFSNEMAKVDDSFFHRLEESFLVEEDKKHERHPIFGNIVDEVAYHEKYPTIYHLRKKLVDSTDKADLRLIYLALAHMIKFRGHFLIEGDLNPDNSDVDKLFIQLVQTYNQLFEENPINASGVDAKAILSARLSKSRRLENLIAQLPGEKKNGLFGNLIALSLGLTPNFKSNFDLAEDAKLQLSKDTYDDDLDNLLAQIGDQYADLFLAAKNLSDAILLSDILRVNTEITKAPLSASMIKRYDEHHQDLTLLKALVRQQLPEKYKEIFFDQSKNGYAGYIDGGASQEEFYKFIKPILEKMDGTEELLVKLNREDLLRKQRTFDNGSIPHQIHLGELHAILRRQEDFYPFLKDNREKIEKILTFRIPYYVGPLARGNSRFAWMTRKSEETITPWNFEEVVDKGASAQSFIERMTNFDKNLPNEKVLPKHSLLYEYFTVYNELTKVKYVTEGMRKPAFLSGEQKKAIVDLLFKTNRKVTVKQLKEDYFKKIECFDSVEISGVEDRFNASLGTYHDLLKIIKDKDFLDNEENEDILEDIVLTLTLFEDREMIEERLKTYAHLFDDKVMKQLKRRRYTGWGRLSRKLINGIRDKQSGKTILDFLKSDGFANRNFMQLIHDDSLTFKEDIQKAQVSGQGDSLHEHIANLAGSPAIKKGILQTVKVVDELVKVMGRHKPENIVIEMARENQTTQKGQKNSRERMKRIEEGIKELGSQILKEHPVENTQLQNEKLYLYYLQNGRDMYVDQELDINRLSDYDVDHIVPQSFLKDDSIDNKVLTRSDKARGKSDNVPSEEVVKKMKNYWRQLLNAKLITQRKFDNLTKAERGGLSELDKAGFIKRQLVETRQITKHVAQILDSRMNTKYDENDKLIREVKVITLKSKLVSDFRKDFQFYKVREINNYHHAHDAYLNAVVGTALIKKYPKLESEFVYGDYKVYDVRKMIAKSEQEIGKATAKYFFYSNIMNFFKTEITLANGEIRKRPLIETNGETGEIVWDKGRDFATVRKVLSMPQVNIVKKTEVQTGGFSKESILPKRNSDKLIARKKDWDPKKYGGFDSPTVAYSVLVVAKVEKGKSKKLKSVKELLGITIMERSSFEKNPIDFLEAKGYKEVKKDLIIKLPKYSLFELENGRKRMLASAGELQKGNELALPSKYVNFLYLASHYEKLKGSPEDNEQKQLFVEQHKHYLDEIIEQISEFSKRVILADANLDKVLSAYNKHRDKPIREQAENIIHLFTLTNLGAPAAFKYFDTTIDRKRYTSTKEVLDATLIHQSITGLYETRIDLSQLGGDGGPAPGSSEAAAKGGTLNIEDEYRLHETSKEPDVSLGSTWLSDFPQAWAETGGMGLAVRQAPLIIPLKATSTPVSIKQYPMSQEARLGIKPHIQRLLDQGILVPCQSPWNTPLLPVKKPGTNDYRPVQDLREVNKRVEDIHPTVPNPYNLLSGLPPSHQWYTVLDLKDAFFCLRLHPTSQPLFAFEWRDPEMGISGQLTWTRLPQGFKNSPTLFNEALHRDLAGFRIQHPDLILLQYVDDLLLAATSELDCQQGTRALLQTLGDLGYRASAKKAQICQKQVKYLGYLLKEGQRWLTEARKETVMGQPIPKTPRQLREFLGTAGFCRLWIPGFAEMAAPLYPLTKPGTLFNWGPDQQKAFQEIKQALLTAPALGLPDLTKPFELFVDEKQGYAKGVLTQKLGPWRRPVAYLSKKLDPVAAGWPPCLRMVAAIAVLTKDAGKLTMGQPLVILAPHAVEALVKQPPDRWLSNARMTHYQALLLDTDRVQFGPVVALNPATLLPLPEEGLQHDCLDILAEAHGTRSDLMDQPLPDADHTWYTDGSSFLQEGQRKAGAAVTTETEVIWARALPAGTSAQRAELIALTQALKMAEGKKLNVYTDSRYAFATAHIHGEIYRRRGWLTSEGKEIKNKDEILALLKALFLPKRLSIIHCPGHQKGNSAEARGNRMADQAAREVATRETPETSTLLAGKRTADGSEFEKRTADGSEFESPKKKAKVE

SEQ ID NO: 2226 - protein, 2100 aa, synthetic construct
MPAAKRVKLDGGDKKYSIGLDIGTNSVGWAVITDEYKVPSKKFKVLGNTDRHSIKKNLIGALLFDSGETAEATRLKRTARRRYTRRKNRICYLQEIFSNEMAKVDDSFFHRLEESFLVEEDKKHERHPIFGNIVDEVAYHEKYPTIYHLRKKLVDSTDKADLRLIYLALAHMIKFRGHFLIEGDLNPDNSDVDKLFIQLVQTYNQLFEENPINASGVDAKAILSARLSKSRRLENLIAQLPGEKKNGLFGNLIALSLGLTPNFKSNFDLAEDAKLQLSKDTYDDDLDNLLAQIGDQYADLFLAAKNLSDAILLSDILRVNTEITKAPLSASMIKRYDEHHQDLTLLKALVRQQLPEKYKEIFFDQSKNGYAGYIDGGASQEEFYKFIKPILEKMDGTEELLVKLNREDLLRKQRTFDNGSIPHQIHLGELHAILRRQEDFYPFLKDNREKIEKILTFRIPYYVGPLARGNSRFAWMTRKSEETITPWNFEEVVDKGASAQSFIERMTNFDKNLPNEKVLPKHSLLYEYFTVYNELTKVKYVTEGMRKPAFLSGEQKKAIVDLLFKTNRKVTVKQLKEDYFKKIECFDSVEISGVEDRFNASLGTYHDLLKIIKDKDFLDNEENEDILEDIVLTLTLFEDREMIEERLKTYAHLFDDKVMKQLKRRRYTGWGRLSRKLINGIRDKQSGKTILDFLKSDGFANRNFMQLIHDDSLTFKEDIQKAQVSGQGDSLHEHIANLAGSPAIKKGILQTVKVVDELVKVMGRHKPENIVIEMARENQTTQKGQKNSRERMKRIEEGIKELGSQILKEHPVENTQLQNEKLYLYYLQNGRDMYVDQELDINRLSDYDVDHIVPQSFLKDDSIDNKVLTRSDKARGKSDNVPSEEVVKKMKNYWRQLLNAKLITQRKFDNLTKAERGGLSELDKAGFIKRQLVETRQITKHVAQILDSRMNTKYDENDKLIREVKVITLKSKLVSDFRKDFQFYKVREINNYHHAHDAYLNAVVGTALIKKYPKLESEFVYGDYKVYDVRKMIAKSEQEIGKATAKYFFYSNIMNFFKTEITLANGEIRKRPLIETNGETGEIVWDKGRDFATVRKVLSMPQVNIVKKTEVQTGGFSKESILPKRNSDKLIARKKDWDPKKYGGFDSPTVAYSVLVVAKVEKGKSKKLKSVKELLGITIMERSSFEKNPIDFLEAKGYKEVKKDLIIKLPKYSLFELENGRKRMLASAGELQKGNELALPSKYVNFLYLASHYEKLKGSPEDNEQKQLFVEQHKHYLDEIIEQISEFSKRVILADANLDKVLSAYNKHRDKPIREQAENIIHLFTLTNLGAPAAFKYFDTTIDRKRYTSTKEVLDATLIHQSITGLYETRIDLSQLGGDGGEAAAKGGGGSEAAAKGGTLNIEDEYRLHETSKEPDVSLGSTWLSDFPQAWAETGGMGLAVRQAPLIIPLKATSTPVSIKQYPMSQEARLGIKPHIQRLLDQGILVPCQSPWNTPLLPVKKPGTNDYRPVQDLREVNKRVEDIHPTVPNPYNLLSGLPPSHQWYTVLDLKDAFFCLRLHPTSQPLFAFEWRDPEMGISGQLTWTRLPQGFKNSPTLFNEALHRDLAGFRIQHPDLILLQYVDDLLLAATSELDCQQGTRALLQTLGDLGYRASAKKAQICQKQVKYLGYLLKEGQRWLTEARKETVMGQPIPKTPRQLREFLGTAGFCRLWIPGFAEMAAPLYPLTKPGTLFNWGPDQQKAFQEIKQALLTAPALGLPDLTKPFELFVDEKQGYAKGVLTQKLGPWRRPVAYLSKKLDPVAAGWPPCLRMVAAIAVLTKDAGKLTMGQPLVILAPHAVEALVKQPPDRWLSNARMTHYQALLLDTDRVQFGPVVALNPATLLPLPEEGLQHDCLDILAEAHGTRSDLMDQPLPDADHTWYTDGSSFLQEGQRKAGAAVTTETEVIWARALPAGTSAQRAELIALTQALKMAEGKKLNVYTDSRYAFATAHIHGEIYRRRGWLTSEGKEIKNKDEILALLKALFLPKRLSIIHCPGHQKGNSAEARGNRMADQAAREVATRETPETSTLLAGKRTADGSEFEKRTADGSEFESPKKKAKVE

SEQ ID NO: 2227 - protein, 2091 aa, synthetic construct
MPAAKRVKLDGGDKKYSIGLDIGTNSVGWAVITDEYKVPSKKFKVLGNTDRHSIKKNLIGALLFDSGETAEATRLKRTARRRYTRRKNRICYLQEIFSNEMAKVDDSFFHRLEESFLVEEDKKHERHPIFGNIVDEVAYHEKYPTIYHLRKKLVDSTDKADLRLIYLALAHMIKFRGHFLIEGDLNPDNSDVDKLFIQLVQTYNQLFEENPINASGVDAKAILSARLSKSRRLENLIAQLPGEKKNGLFGNLIALSLGLTPNFKSNFDLAEDAKLQLSKDTYDDDLDNLLAQIGDQYADLFLAAKNLSDAILLSDILRVNTEITKAPLSASMIKRYDEHHQDLTLLKALVRQQLPEKYKEIFFDQSKNGYAGYIDGGASQEEFYKFIKPILEKMDGTEELLVKLNREDLLRKQRTFDNGSIPHQIHLGELHAILRRQEDFYPFLKDNREKIEKILTFRIPYYVGPLARGNSRFAWMTRKSEETITPWNFEEVVDKGASAQSFIERMTNFDKNLPNEKVLPKHSLLYEYFTVYNELTKVKYVTEGMRKPAFLSGEQKKAIVDLLFKTNRKVTVKQLKEDYFKKIECFDSVEISGVEDRFNASLGTYHDLLKIIKDKDFLDNEENEDILEDIVLTLTLFEDREMIEERLKTYAHLFDDKVMKQLKRRRYTGWGRLSRKLINGIRDKQSGKTILDFLKSDGFANRNFMQLIHDDSLTFKEDIQKAQVSGQGDSLHEHIANLAGSPAIKKGILQTVKVVDELVKVMGRHKPENIVIEMARENQTTQKGQKNSRERMKRIEEGIKELGSQILKEHPVENTQLQNEKLYLYYLQNGRDMYVDQELDINRLSDYDVDHIVPQSFLKDDSIDNKVLTRSDKARGKSDNVPSEEVVKKMKNYWRQLLNAKLITQRKFDNLTKAERGGLSELDKAGFIKRQLVETRQITKHVAQILDSRMNTKYDENDKLIREVKVITLKSKLVSDFRKDFQFYKVREINNYHHAHDAYLNAVVGTALIKKYPKLESEFVYGDYKVYDVRKMIAKSEQEIGKATAKYFFYSNIMNFFKTEITLANGEIRKRPLIETNGETGEIVWDKGRDFATVRKVLSMPQVNIVKKTEVQTGGFSKESILPKRNSDKLIARKKDWDPKKYGGFDSPTVAYSVLVVAKVEKGKSKKLKSVKELLGITIMERSSFEKNPIDFLEAKGYKEVKKDLIIKLPKYSLFELENGRKRMLASAGELQKGNELALPSKYVNFLYLASHYEKLKGSPEDNEQKQLFVEQHKHYLDEIIEQISEFSKRVILADANLDKVLSAYNKHRDKPIREQAENIIHLFTLTNLGAPAAFKYFDTTIDRKRYTSTKEVLDATLIHQSITGLYETRIDLSQLGGDGGGSSGSSGGTLNIEDEYRLHETSKEPDVSLGSTWLSDFPQAWAETGGMGLAVRQAPLIIPLKATSTPVSIKQYPMSQEARLGIKPHIQRLLDQGILVPCQSPWNTPLLPVKKPGTNDYRPVQDLREVNKRVEDIHPTVPNPYNLLSGLPPSHQWYTVLDLKDAFFCLRLHPTSQPLFAFEWRDPEMGISGQLTWTRLPQGFKNSPTLFNEALHRDLAGFRIQHPDLILLQYVDDLLLAATSELDCQQGTRALLQTLGDLGYRASAKKAQICQKQVKYLGYLLKEGQRWLTEARKETVMGQPIPKTPRQLREFLGTAGFCRLWIPGFAEMAAPLYPLTKPGTLFNWGPDQQKAFQEIKQALLTAPALGLPDLTKPFELFVDEKQGYAKGVLTQKLGPWRRPVAYLSKKLDPVAAGWPPCLRMVAAIAVLTKDAGKLTMGQPLVILAPHAVEALVKQPPDRWLSNARMTHYQALLLDTDRVQFGPVVALNPATLLPLPEEGLQHDCLDILAEAHGTRSDLMDQPLPDADHTWYTDGSSFLQEGQRKAGAAVTTETEVIWARALPAGTSAQRAELIALTQALKMAEGKKLNVYTDSRYAFATAHIHGEIYRRRGWLTSEGKEIKNKDEILALLKALFLPKRLSIIHCPGHQKGNSAEARGNRMADQAAREVATRETPETSTLLAGKRTADGSEFEKRTADGSEFESPKKKAKVE

SEQ ID NO: 2228 - protein, 2097 aa, synthetic construct
MPAAKRVKLDGGDKKYSIGLDIGTNSVGWAVITDEYKVPSKKFKVLGNTDRHSIKKNLIGALLFDSGETAEATRLKRTARRRYTRRKNRICYLQEIFSNEMAKVDDSFFHRLEESFLVEEDKKHERHPIFGNIVDEVAYHEKYPTIYHLRKKLVDSTDKADLRLIYLALAHMIKFRGHFLIEGDLNPDNSDVDKLFIQLVQTYNQLFEENPINASGVDAKAILSARLSKSRRLENLIAQLPGEKKNGLFGNLIALSLGLTPNFKSNFDLAEDAKLQLSKDTYDDDLDNLLAQIGDQYADLFLAAKNLSDAILLSDILRVNTEITKAPLSASMIKRYDEHHQDLTLLKALVRQQLPEKYKEIFFDQSKNGYAGYIDGGASQEEFYKFIKPILEKMDGTEELLVKLNREDLLRKQRTFDNGSIPHQIHLGELHAILRRQEDFYPFLKDNREKIEKILTFRIPYYVGPLARGNSRFAWMTRKSEETITPWNFEEVVDKGASAQSFIERMTNFDKNLPNEKVLPKHSLLYEYFTVYNELTKVKYVTEGMRKPAFLSGEQKKAIVDLLFKTNRKVTVKQLKEDYFKKIECFDSVEISGVEDRFNASLGTYHDLLKIIKDKDFLDNEENEDILEDIVLTLTLFEDREMIEERLKTYAHLFDDKVMKQLKRRRYTGWGRLSRKLINGIRDKQSGKTILDFLKSDGFANRNFMQLIHDDSLTFKEDIQKAQVSGQGDSLHEHIANLAGSPAIKKGILQTVKVVDELVKVMGRHKPENIVIEMARENQTTQKGQKNSRERMKRIEEGIKELGSQILKEHPVENTQLQNEKLYLYYLQNGRDMYVDQELDINRLSDYDVDHIVPQSFLKDDSIDNKVLTRSDKARGKSDNVPSEEVVKKMKNYWRQLLNAKLITQRKFDNLTKAERGGLSELDKAGFIKRQLVETRQITKHVAQILDSRMNTKYDENDKLIREVKVITLKSKLVSDFRKDFQFYKVREINNYHHAHDAYLNAVVGTALIKKYPKLESEFVYGDYKVYDVRKMIAKSEQEIGKATAKYFFYSNIMNFFKTEITLANGEIRKRPLIETNGETGEIVWDKGRDFATVRKVLSMPQVNIVKKTEVQTGGFSKESILPKRNSDKLIARKKDWDPKKYGGFDSPTVAYSVLVVAKVEKGKSKKLKSVKELLGITIMERSSFEKNPIDFLEAKGYKEVKKDLIIKLPKYSLFELENGRKRMLASAGELQKGNELALPSKYVNFLYLASHYEKLKGSPEDNEQKQLFVEQHKHYLDEIIEQISEFSKRVILADANLDKVLSAYNKHRDKPIREQAENIIHLFTLTNLGAPAAFKYFDTTIDRKRYTSTKEVLDATLIHQSITGLYETRIDLSQLGGDGGGSAGSAAGSGEFGGTLNIEDEYRLHETSKEPDVSLGSTWLSDFPQAWAETGGMGLAVRQAPLIIPLKATSTPVSIKQYPMSQEARLGIKPHIQRLLDQGILVPCQSPWNTPLLPVKKPGTNDYRPVQDLREVNKRVEDIHPTVPNPYNLLSGLPPSHQWYTVLDLKDAFFCLRLHPTSQPLFAFEWRDPEMGISGQLTWTRLPQGFKNSPTLFNEALHRDLAGFRIQHPDLILLQYVDDLLLAATSELDCQQGTRALLQTLGDLGYRASAKKAQICQKQVKYLGYLLKEGQRWLTEARKETVMGQPIPKTPRQLREFLGTAGFCRLWIPGFAEMAAPLYPLTKPGTLFNWGPDQQKAFQEIKQALLTAPALGLPDLTKPFELFVDEKQGYAKGVLTQKLGPWRRPVAYLSKKLDPVAAGWPPCLRMVAAIAVLTKDAGKLTMGQPLVILAPHAVEALVKQPPDRWLSNARMTHYQALLLDTDRVQFGPVVALNPATLLPLPEEGLQHDCLDILAEAHGTRSDLMDQPLPDADHTWYTDGSSFLQEGQRKAGAAVTTETEVIWARALPAGTSAQRAELIALTQALKMAEGKKLNVYTDSRYAFATAHIHGEIYRRRGWLTSEGKEIKNKDEILALLKALFLPKRLSIIHCPGHQKGNSAEARGNRMADQAAREVATRETPETSTLLAGKRTADGSEFEKRTADGSEFESPKKKAKVE

SEQ ID NO: 2229 - protein, 2088 aa, synthetic construct
MPAAKRVKLDGGDKKYSIGLDIGTNSVGWAVITDEYKVPSKKFKVLGNTDRHSIKKNLIGALLFDSGETAEATRLKRTARRRYTRRKNRICYLQEIFSNEMAKVDDSFFHRLEESFLVEEDKKHERHPIFGNIVDEVAYHEKYPTIYHLRKKLVDSTDKADLRLIYLALAHMIKFRGHFLIEGDLNPDNSDVDKLFIQLVQTYNQLFEENPINASGVDAKAILSARLSKSRRLENLIAQLPGEKKNGLFGNLIALSLGLTPNFKSNFDLAEDAKLQLSKDTYDDDLDNLLAQIGDQYADLFLAAKNLSDAILLSDILRVNTEITKAPLSASMIKRYDEHHQDLTLLKALVRQQLPEKYKEIFFDQSKNGYAGYIDGGASQEEFYKFIKPILEKMDGTEELLVKLNREDLLRKQRTFDNGSIPHQIHLGELHAILRRQEDFYPFLKDNREKIEKILTFRIPYYVGPLARGNSRFAWMTRKSEETITPWNFEEVVDKGASAQSFIERMTNFDKNLPNEKVLPKHSLLYEYFTVYNELTKVKYVTEGMRKPAFLSGEQKKAIVDLLFKTNRKVTVKQLKEDYFKKIECFDSVEISGVEDRFNASLGTYHDLLKIIKDKDFLDNEENEDILEDIVLTLTLFEDREMIEERLKTYAHLFDDKVMKQLKRRRYTGWGRLSRKLINGIRDKQSGKTILDFLKSDGFANRNFMQLIHDDSLTFKEDIQKAQVSGQGDSLHEHIANLAGSPAIKKGILQTVKVVDELVKVMGRHKPENIVIEMARENQTTQKGQKNSRERMKRIEEGIKELGSQILKEHPVENTQLQNEKLYLYYLQNGRDMYVDQELDINRLSDYDVDHIVPQSFLKDDSIDNKVLTRSDKARGKSDNVPSEEVVKKMKNYWRQLLNAKLITQRKFDNLTKAERGGLSELDKAGFIKRQLVETRQITKHVAQILDSRMNTKYDENDKLIREVKVITLKSKLVSDFRKDFQFYKVREINNYHHAHDAYLNAVVGTALIKKYPKLESEFVYGDYKVYDVRKMIAKSEQEIGKATAKYFFYSNIMNFFKTEITLANGEIRKRPLIETNGETGEIVWDKGRDFATVRKVLSMPQVNIVKKTEVQTGGFSKESILPKRNSDKLIARKKDWDPKKYGGFDSPTVAYSVLVVAKVEKGKSKKLKSVKELLGITIMERSSFEKNPIDFLEAKGYKEVKKDLIIKLPKYSLFELENGRKRMLASAGELQKGNELALPSKYVNFLYLASHYEKLKGSPEDNEQKQLFVEQHKHYLDEIIEQISEFSKRVILADANLDKVLSAYNKHRDKPIREQAENIIHLFTLTNLGAPAAFKYFDTTIDRKRYTSTKEVLDATLIHQSITGLYETRIDLSQLGGDGGGGGGGTLNIEDEYRLHETSKEPDVSLGSTWLSDFPQAWAETGGMGLAVRQAPLIIPLKATSTPVSIKQYPMSQEARLGIKPHIQRLLDQGILVPCQSPWNTPLLPVKKPGTNDYRPVQDLREVNKRVEDIHPTVPNPYNLLSGLPPSHQWYTVLDLKDAFFCLRLHPTSQPLFAFEWRDPEMGISGQLTWTRLPQGFKNSPTLFNEALHRDLAGFRIQHPDLILLQYVDDLLLAATSELDCQQGTRALLQTLGDLGYRASAKKAQICQKQVKYLGYLLKEGQRWLTEARKETVMGQPIPKTPRQLREFLGTAGFCRLWIPGFAEMAAPLYPLTKPGTLFNWGPDQQKAFQEIKQALLTAPALGLPDLTKPFELFVDEKQGYAKGVLTQKLGPWRRPVAYLSKKLDPVAAGWPPCLRMVAAIAVLTKDAGKLTMGQPLVILAPHAVEALVKQPPDRWLSNARMTHYQALLLDTDRVQFGPVVALNPATLLPLPEEGLQHDCLDILAEAHGTRSDLMDQPLPDADHTWYTDGSSFLQEGQRKAGAAVTTETEVIWARALPAGTSAQRAELIALTQALKMAEGKKLNVYTDSRYAFATAHIHGEIYRRRGWLTSEGKEIKNKDEILALLKALFLPKRLSIIHCPGHQKGNSAEARGNRMADQAAREVATRETPETSTLLAGKRTADGSEFEKRTADGSEFESPKKKAKVE

SEQ ID NO: 2230 - protein, 2096 aa, synthetic construct
MPAAKRVKLDGGDKKYSIGLDIGTNSVGWAVITDEYKVPSKKFKVLGNTDRHSIKKNLIGALLFDSGETAEATRLKRTARRRYTRRKNRICYLQEIFSNEMAKVDDSFFHRLEESFLVEEDKKHERHPIFGNIVDEVAYHEKYPTIYHLRKKLVDSTDKADLRLIYLALAHMIKFRGHFLIEGDLNPDNSDVDKLFIQLVQTYNQLFEENPINASGVDAKAILSARLSKSRRLENLIAQLPGEKKNGLFGNLIALSLGLTPNFKSNFDLAEDAKLQLSKDTYDDDLDNLLAQIGDQYADLFLAAKNLSDAILLSDILRVNTEITKAPLSASMIKRYDEHHQDLTLLKALVRQQLPEKYKEIFFDQSKNGYAGYIDGGASQEEFYKFIKPILEKMDGTEELLVKLNREDLLRKQRTFDNGSIPHQIHLGELHAILRRQEDFYPFLKDNREKIEKILTFRIPYYVGPLARGNSRFAWMTRKSEETITPWNFEEVVDKGASAQSFIERMTNFDKNLPNEKVLPKHSLLYEYFTVYNELTKVKYVTEGMRKPAFLSGEQKKAIVDLLFKTNRKVTVKQLKEDYFKKIECFDSVEISGVEDRFNASLGTYHDLLKIIKDKDFLDNEENEDILEDIVLTLTLFEDREMIEERLKTYAHLFDDKVMKQLKRRRYTGWGRLSRKLINGIRDKQSGKTILDFLKSDGFANRNFMQLIHDDSLTFKEDIQKAQVSGQGDSLHEHIANLAGSPAIKKGILQTVKVVDELVKVMGRHKPENIVIEMARENQTTQKGQKNSRERMKRIEEGIKELGSQILKEHPVENTQLQNEKLYLYYLQNGRDMYVDQELDINRLSDYDVDHIVPQSFLKDDSIDNKVLTRSDKARGKSDNVPSEEVVKKMKNYWRQLLNAKLITQRKFDNLTKAERGGLSELDKAGFIKRQLVETRQITKHVAQILDSRMNTKYDENDKLIREVKVITLKSKLVSDFRKDFQFYKVREINNYHHAHDAYLNAVVGTALIKKYPKLESEFVYGDYKVYDVRKMIAKSEQEIGKATAKYFFYSNIMNFFKTEITLANGEIRKRPLIETNGETGEIVWDKGRDFATVRKVLSMPQVNIVKKTEVQTGGFSKESILPKRNSDKLIARKKDWDPKKYGGFDSPTVAYSVLVVAKVEKGKSKKLKSVKELLGITIMERSSFEKNPIDFLEAKGYKEVKKDLIIKLPKYSLFELENGRKRMLASAGELQKGNELALPSKYVNFLYLASHYEKLKGSPEDNEQKQLFVEQHKHYLDEIIEQISEFSKRVILADANLDKVLSAYNKHRDKPIREQAENIIHLFTLTNLGAPAAFKYFDTTIDRKRYTSTKEVLDATLIHQSITGLYETRIDLSQLGGDGGEAAAKPAPGGGGGTLNIEDEYRLHETSKEPDVSLGSTWLSDFPQAWAETGGMGLAVRQAPLIIPLKATSTPVSIKQYPMSQEARLGIKPHIQRLLDQGILVPCQSPWNTPLLPVKKPGTNDYRPVQDLREVNKRVEDIHPTVPNPYNLLSGLPPSHQWYTVLDLKDAFFCLRLHPTSQPLFAFEWRDPEMGISGQLTWTRLPQGFKNSPTLFNEALHRDLAGFRIQHPDLILLQYVDDLLLAATSELDCQQGTRALLQTLGDLGYRASAKKAQICQKQVKYLGYLLKEGQRWLTEARKETVMGQPIPKTPRQLREFLGTAGFCRLWIPGFAEMAAPLYPLTKPGTLFNWGPDQQKAFQEIKQALLTAPALGLPDLTKPFELFVDEKQGYAKGVLTQKLGPWRRPVAYLSKKLDPVAAGWPPCLRMVAAIAVLTKDAGKLTMGQPLVILAPHAVEALVKQPPDRWLSNARMTHYQALLLDTDRVQFGPVVALNPATLLPLPEEGLQHDCLDILAEAHGTRSDLMDQPLPDADHTWYTDGSSFLQEGQRKAGAAVTTETEVIWARALPAGTSAQRAELIALTQALKMAEGKKLNVYTDSRYAFATAHIHGEIYRRRGWLTSEGKEIKNKDEILALLKALFLPKRLSIIHCPGHQKGNSAEARGNRMADQAAREVATRETPETSTLLAGKRTADGSEFEKRTADGSEFESPKKKAKVE

SEQ ID NO: 2231 - protein, 2094 aa, synthetic construct
MPAAKRVKLDGGDKKYSIGLDIGTNSVGWAVITDEYKVPSKKFKVLGNTDRHSIKKNLIGALLFDSGETAEATRLKRTARRRYTRRKNRICYLQEIFSNEMAKVDDSFFHRLEESFLVEEDKKHERHPIFGNIVDEVAYHEKYPTIYHLRKKLVDSTDKADLRLIYLALAHMIKFRGHFLIEGDLNPDNSDVDKLFIQLVQTYNQLFEENPINASGVDAKAILSARLSKSRRLENLIAQLPGEKKNGLFGNLIALSLGLTPNFKSNFDLAEDAKLQLSKDTYDDDLDNLLAQIGDQYADLFLAAKNLSDAILLSDILRVNTEITKAPLSASMIKRYDEHHQDLTLLKALVRQQLPEKYKEIFFDQSKNGYAGYIDGGASQEEFYKFIKPILEKMDGTEELLVKLNREDLLRKQRTFDNGSIPHQIHLGELHAILRRQEDFYPFLKDNREKIEKILTFRIPYYVGPLARGNSRFAWMTRKSEETITPWNFEEVVDKGASAQSFIERMTNFDKNLPNEKVLPKHSLLYEYFTVYNELTKVKYVTEGMRKPAFLSGEQKKAIVDLLFKTNRKVTVKQLKEDYFKKIECFDSVEISGVEDRFNASLGTYHDLLKIIKDKDFLDNEENEDILEDIVLTLTLFEDREMIEERLKTYAHLFDDKVMKQLKRRRYTGWGRLSRKLINGIRDKQSGKTILDFLKSDGFANRNFMQLIHDDSLTFKEDIQKAQVSGQGDSLHEHIANLAGSPAIKKGILQTVKVVDELVKVMGRHKPENIVIEMARENQTTQKGQKNSRERMKRIEEGIKELGSQILKEHPVENTQLQNEKLYLYYLQNGRDMYVDQELDINRLSDYDVDHIVPQSFLKDDSIDNKVLTRSDKARGKSDNVPSEEVVKKMKNYWRQLLNAKLITQRKFDNLTKAERGGLSELDKAGFIKRQLVETRQITKHVAQILDSRMNTKYDENDKLIREVKVITLKSKLVSDFRKDFQFYKVREINNYHHAHDAYLNAVVGTALIKKYPKLESEFVYGDYKVYDVRKMIAKSEQEIGKATAKYFFYSNIMNFFKTEITLANGEIRKRPLIETNGETGEIVWDKGRDFATVRKVLSMPQVNIVKKTEVQTGGFSKESILPKRNSDKLIARKKDWDPKKYGGFDSPTVAYSVLVVAKVEKGKSKKLKSVKELLGITIMERSSFEKNPIDFLEAKGYKEVKKDLIIKLPKYSLFELENGRKRMLASAGELQKGNELALPSKYVNFLYLASHYEKLKGSPEDNEQKQLFVEQHKHYLDEIIEQISEFSKRVILADANLDKVLSAYNKHRDKPIREQAENIIHLFTLTNLGAPAAFKYFDTTIDRKRYTSTKEVLDATLIHQSITGLYETRIDLSQLGGDGGGGGGGSGSSGGTLNIEDEYRLHETSKEPDVSLGSTWLSDFPQAWAETGGMGLAVRQAPLIIPLKATSTPVSIKQYPMSQEARLGIKPHIQRLLDQGILVPCQSPWNTPLLPVKKPGTNDYRPVQDLREVNKRVEDIHPTVPNPYNLLSGLPPSHQWYTVLDLKDAFFCLRLHPTSQPLFAFEWRDPEMGISGQLTWTRLPQGFKNSPTLFNEALHRDLAGFRIQHPDLILLQYVDDLLLAATSELDCQQGTRALLQTLGDLGYRASAKKAQICQKQVKYLGYLLKEGQRWLTEARKETVMGQPIPKTPRQLREFLGTAGFCRLWIPGFAEMAAPLYPLTKPGTLFNWGPDQQKAFQEIKQALLTAPALGLPDLTKPFELFVDEKQGYAKGVLTQKLGPWRRPVAYLSKKLDPVAAGWPPCLRMVAAIAVLTKDAGKLTMGQPLVILAPHAVEALVKQPPDRWLSNARMTHYQALLLDTDRVQFGPVVALNPATLLPLPEEGLQHDCLDILAEAHGTRSDLMDQPLPDADHTWYTDGSSFLQEGQRKAGAAVTTETEVIWARALPAGTSAQRAELIALTQALKMAEGKKLNVYTDSRYAFATAHIHGEIYRRRGWLTSEGKEIKNKDEILALLKALFLPKRLSIIHCPGHQKGNSAEARGNRMADQAAREVATRETPETSTLLAGKRTADGSEFEKRTADGSEFESPKKKAKVE

SEQ ID NO: 2232 - protein, 2096 aa, synthetic construct
MPAAKRVKLDGGDKKYSIGLDIGTNSVGWAVITDEYKVPSKKFKVLGNTDRHSIKKNLIGALLFDSGETAEATRLKRTARRRYTRRKNRICYLQEIFSNEMAKVDDSFFHRLEESFLVEEDKKHERHPIFGNIVDEVAYHEKYPTIYHLRKKLVDSTDKADLRLIYLALAHMIKFRGHFLIEGDLNPDNSDVDKLFIQLVQTYNQLFEENPINASGVDAKAILSARLSKSRRLENLIAQLPGEKKNGLFGNLIALSLGLTPNFKSNFDLAEDAKLQLSKDTYDDDLDNLLAQIGDQYADLFLAAKNLSDAILLSDILRVNTEITKAPLSASMIKRYDEHHQDLTLLKALVRQQLPEKYKEIFFDQSKNGYAGYIDGGASQEEFYKFIKPILEKMDGTEELLVKLNREDLLRKQRTFDNGSIPHQIHLGELHAILRRQEDFYPFLKDNREKIEKILTFRIPYYVGPLARGNSRFAWMTRKSEETITPWNFEEVVDKGASAQSFIERMTNFDKNLPNEKVLPKHSLLYEYFTVYNELTKVKYVTEGMRKPAFLSGEQKKAIVDLLFKTNRKVTVKQLKEDYFKKIECFDSVEISGVEDRFNASLGTYHDLLKIIKDKDFLDNEENEDILEDIVLTLTLFEDREMIEERLKTYAHLFDDKVMKQLKRRRYTGWGRLSRKLINGIRDKQSGKTILDFLKSDGFANRNFMQLIHDDSLTFKEDIQKAQVSGQGDSLHEHIANLAGSPAIKKGILQTVKVVDELVKVMGRHKPENIVIEMARENQTTQKGQKNSRERMKRIEEGIKELGSQILKEHPVENTQLQNEKLYLYYLQNGRDMYVDQELDINRLSDYDVDHIVPQSFLKDDSIDNKVLTRSDKARGKSDNVPSEEVVKKMKNYWRQLLNAKLITQRKFDNLTKAERGGLSELDKAGFIKRQLVETRQITKHVAQILDSRMNTKYDENDKLIREVKVITLKSKLVSDFRKDFQFYKVREINNYHHAHDAYLNAVVGTALIKKYPKLESEFVYGDYKVYDVRKMIAKSEQEIGKATAKYFFYSNIMNFFKTEITLANGEIRKRPLIETNGETGEIVWDKGRDFATVRKVLSMPQVNIVKKTEVQTGGFSKESILPKRNSDKLIARKKDWDPKKYGGFDSPTVAYSVLVVAKVEKGKSKKLKSVKELLGITIMERSSFEKNPIDFLEAKGYKEVKKDLIIKLPKYSLFELENGRKRMLASAGELQKGNELALPSKYVNFLYLASHYEKLKGSPEDNEQKQLFVEQHKHYLDEIIEQISEFSKRVILADANLDKVLSAYNKHRDKPIREQAENIIHLFTLTNLGAPAAFKYFDTTIDRKRYTSTKEVLDATLIHQSITGLYETRIDLSQLGGDGGPAPEAAAKGGSGGTLNIEDEYRLHETSKEPDVSLGSTWLSDFPQAWAETGGMGLAVRQAPLIIPLKATSTPVSIKQYPMSQEARLGIKPHIQRLLDQGILVPCQSPWNTPLLPVKKPGTNDYRPVQDLREVNKRVEDIHPTVPNPYNLLSGLPPSHQWYTVLDLKDAFFCLRLHPTSQPLFAFEWRDPEMGISGQLTWTRLPQGFKNSPTLFNEALHRDLAGFRIQHPDLILLQYVDDLLLAATSELDCQQGTRALLQTLGDLGYRASAKKAQICQKQVKYLGYLLKEGQRWLTEARKETVMGQPIPKTPRQLREFLGTAGFCRLWIPGFAEMAAPLYPLTKPGTLFNWGPDQQKAFQEIKQALLTAPALGLPDLTKPFELFVDEKQGYAKGVLTQKLGPWRRPVAYLSKKLDPVAAGWPPCLRMVAAIAVLTKDAGKLTMGQPLVILAPHAVEALVKQPPDRWLSNARMTHYQALLLDTDRVQFGPVVALNPATLLPLPEEGLQHDCLDILAEAHGTRSDLMDQPLPDADHTWYTDGSSFLQEGQRKAGAAVTTETEVIWARALPAGTSAQRAELIALTQALKMAEGKKLNVYTDSRYAFATAHIHGEIYRRRGWLTSEGKEIKNKDEILALLKALFLPKRLSIIHCPGHQKGNSAEARGNRMADQAAREVATRETPETSTLLAGKRTADGSEFEKRTADGSEFESPKKKAKVE

SEQ ID NO: 2233 - protein, 2093 aa, synthetic construct
MPAAKRVKLDGGDKKYSIGLDIGTNSVGWAVITDEYKVPSKKFKVLGNTDRHSIKKNLIGALLFDSGETAEATRLKRTARRRYTRRKNRICYLQEIFSNEMAKVDDSFFHRLEESFLVEEDKKHERHPIFGNIVDEVAYHEKYPTIYHLRKKLVDSTDKADLRLIYLALAHMIKFRGHFLIEGDLNPDNSDVDKLFIQLVQTYNQLFEENPINASGVDAKAILSARLSKSRRLENLIAQLPGEKKNGLFGNLIALSLGLTPNFKSNFDLAEDAKLQLSKDTYDDDLDNLLAQIGDQYADLFLAAKNLSDAILLSDILRVNTEITKAPLSASMIKRYDEHHQDLTLLKALVRQQLPEKYKEIFFDQSKNGYAGYIDGGASQEEFYKFIKPILEKMDGTEELLVKLNREDLLRKQRTFDNGSIPHQIHLGELHAILRRQEDFYPFLKDNREKIEKILTFRIPYYVGPLARGNSRFAWMTRKSEETITPWNFEEVVDKGASAQSFIERMTNFDKNLPNEKVLPKHSLLYEYFTVYNELTKVKYVTEGMRKPAFLSGEQKKAIVDLLFKTNRKVTVKQLKEDYFKKIECFDSVEISGVEDRFNASLGTYHDLLKIIKDKDFLDNEENEDILEDIVLTLTLFEDREMIEERLKTYAHLFDDKVMKQLKRRRYTGWGRLSRKLINGIRDKQSGKTILDFLKSDGFANRNFMQLIHDDSLTFKEDIQKAQVSGQGDSLHEHIANLAGSPAIKKGILQTVKVVDELVKVMGRHKPENIVIEMARENQTTQKGQKNSRERMKRIEEGIKELGSQILKEHPVENTQLQNEKLYLYYLQNGRDMYVDQELDINRLSDYDVDHIVPQSFLKDDSIDNKVLTRSDKARGKSDNVPSEEVVKKMKNYWRQLLNAKLITQRKFDNLTKAERGGLSELDKAGFIKRQLVETRQITKHVAQILDSRMNTKYDENDKLIREVKVITLKSKLVSDFRKDFQFYKVREINNYHHAHDAYLNAVVGTALIKKYPKLESEFVYGDYKVYDVRKMIAKSEQEIGKATAKYFFYSNIMNFFKTEITLANGEIRKRPLIETNGETGEIVWDKGRDFATVRKVLSMPQVNIVKKTEVQTGGFSKESILPKRNSDKLIARKKDWDPKKYGGFDSPTVAYSVLVVAKVEKGKSKKLKSVKELLGITIMERSSFEKNPIDFLEAKGYKEVKKDLIIKLPKYSLFELENGRKRMLASAGELQKGNELALPSKYVNFLYLASHYEKLKGSPEDNEQKQLFVEQHKHYLDEIIEQISEFSKRVILADANLDKVLSAYNKHRDKPIREQAENIIHLFTLTNLGAPAAFKYFDTTIDRKRYTSTKEVLDATLIHQSITGLYETRIDLSQLGGDGGGSSEAAAKGGTLNIEDEYRLHETSKEPDVSLGSTWLSDFPQAWAETGGMGLAVRQAPLIIPLKATSTPVSIKQYPMSQEARLGIKPHIQRLLDQGILVPCQSPWNTPLLPVKKPGTNDYRPVQDLREVNKRVEDIHPTVPNPYNLLSGLPPSHQWYTVLDLKDAFFCLRLHPTSQPLFAFEWRDPEMGISGQLTWTRLPQGFKNSPTLFNEALHRDLAGFRIQHPDLILLQYVDDLLLAATSELDCQQGTRALLQTLGDLGYRASAKKAQICQKQVKYLGYLLKEGQRWLTEARKETVMGQPIPKTPRQLREFLGTAGFCRLWIPGFAEMAAPLYPLTKPGTLFNWGPDQQKAFQEIKQALLTAPALGLPDLTKPFELFVDEKQGYAKGVLTQKLGPWRRPVAYLSKKLDPVAAGWPPCLRMVAAIAVLTKDAGKLTMGQPLVILAPHAVEALVKQPPDRWLSNARMTHYQALLLDTDRVQFGPVVALNPATLLPLPEEGLQHDCLDILAEAHGTRSDLMDQPLPDADHTWYTDGSSFLQEGQRKAGAAVTTETEVIWARALPAGTSAQRAELIALTQALKMAEGKKLNVYTDSRYAFATAHIHGEIYRRRGWLTSEGKEIKNKDEILALLKALFLPKRLSIIHCPGHQKGNSAEARGNRMADQAAREVATRETPETSTLLAGKRTADGSEFEKRTADGSEFESPKKKAKVE

SEQ ID NO: 2234 - protein, 2094 aa, synthetic construct
MPAAKRVKLDGGDKKYSIGLDIGTNSVGWAVITDEYKVPSKKFKVLGNTDRHSIKKNLIGALLFDSGETAEATRLKRTARRRYTRRKNRICYLQEIFSNEMAKVDDSFFHRLEESFLVEEDKKHERHPIFGNIVDEVAYHEKYPTIYHLRKKLVDSTDKADLRLIYLALAHMIKFRGHFLIEGDLNPDNSDVDKLFIQLVQTYNQLFEENPINASGVDAKAILSARLSKSRRLENLIAQLPGEKKNGLFGNLIALSLGLTPNFKSNFDLAEDAKLQLSKDTYDDDLDNLLAQIGDQYADLFLAAKNLSDAILLSDILRVNTEITKAPLSASMIKRYDEHHQDLTLLKALVRQQLPEKYKEIFFDQSKNGYAGYIDGGASQEEFYKFIKPILEKMDGTEELLVKLNREDLLRKQRTFDNGSIPHQIHLGELHAILRRQEDFYPFLKDNREKIEKILTFRIPYYVGPLARGNSRFAWMTRKSEETITPWNFEEVVDKGASAQSFIERMTNFDKNLPNEKVLPKHSLLYEYFTVYNELTKVKYVTEGMRKPAFLSGEQKKAIVDLLFKTNRKVTVKQLKEDYFKKIECFDSVEISGVEDRFNASLGTYHDLLKIIKDKDFLDNEENEDILEDIVLTLTLFEDREMIEERLKTYAHLFDDKVMKQLKRRRYTGWGRLSRKLINGIRDKQSGKTILDFLKSDGFANRNFMQLIHDDSLTFKEDIQKAQVSGQGDSLHEHIANLAGSPAIKKGILQTVKVVDELVKVMGRHKPENIVIEMARENQTTQKGQKNSRERMKRIEEGIKELGSQILKEHPVENTQLQNEKLYLYYLQNGRDMYVDQELDINRLSDYDVDHIVPQSFLKDDSIDNKVLTRSDKARGKSDNVPSEEVVKKMKNYWRQLLNAKLITQRKFDNLTKAERGGLSELDKAGFIKRQLVETRQITKHVAQILDSRMNTKYDENDKLIREVKVITLKSKLVSDFRKDFQFYKVREINNYHHAHDAYLNAVVGTALIKKYPKLESEFVYGDYKVYDVRKMIAKSEQEIGKATAKYFFYSNIMNFFKTEITLANGEIRKRPLIETNGETGEIVWDKGRDFATVRKVLSMPQVNIVKKTEVQTGGFSKESILPKRNSDKLIARKKDWDPKKYGGFDSPTVAYSVLVVAKVEKGKSKKLKSVKELLGITIMERSSFEKNPIDFLEAKGYKEVKKDLIIKLPKYSLFELENGRKRMLASAGELQKGNELALPSKYVNFLYLASHYEKLKGSPEDNEQKQLFVEQHKHYLDEIIEQISEFSKRVILADANLDKVLSAYNKHRDKPIREQAENIIHLFTLTNLGAPAAFKYFDTTIDRKRYTSTKEVLDATLIHQSITGLYETRIDLSQLGGDGGPAPGGGGSSGGTLNIEDEYRLHETSKEPDVSLGSTWLSDFPQAWAETGGMGLAVRQAPLIIPLKATSTPVSIKQYPMSQEARLGIKPHIQRLLDQGILVPCQSPWNTPLLPVKKPGTNDYRPVQDLREVNKRVEDIHPTVPNPYNLLSGLPPSHQWYTVLDLKDAFFCLRLHPTSQPLFAFEWRDPEMGISGQLTWTRLPQGFKNSPTLFNEALHRDLAGFRIQHPDLILLQYVDDLLLAATSELDCQQGTRALLQTLGDLGYRASAKKAQICQKQVKYLGYLLKEGQRWLTEARKETVMGQPIPKTPRQLREFLGTAGFCRLWIPGFAEMAAPLYPLTKPGTLFNWGPDQQKAFQEIKQALLTAPALGLPDLTKPFELFVDEKQGYAKGVLTQKLGPWRRPVAYLSKKLDPVAAGWPPCLRMVAAIAVLTKDAGKLTMGQPLVILAPHAVEALVKQPPDRWLSNARMTHYQALLLDTDRVQFGPVVALNPATLLPLPEEGLQHDCLDILAEAHGTRSDLMDQPLPDADHTWYTDGSSFLQEGQRKAGAAVTTETEVIWARALPAGTSAQRAELIALTQALKMAEGKKLNVYTDSRYAFATAHIHGEIYRRRGWLTSEGKEIKNKDEILALLKALFLPKRLSIIHCPGHQKGNSAEARGNRMADQAAREVATRETPETSTLLAGKRTADGSEFEKRTADGSEFESPKKKAKVE

SEQ ID NO: 2235 - protein, 2096 aa, synthetic construct
MPAAKRVKLDGGDKKYSIGLDIGTNSVGWAVITDEYKVPSKKFKVLGNTDRHSIKKNLIGALLFDSGETAEATRLKRTARRRYTRRKNRICYLQEIFSNEMAKVDDSFFHRLEESFLVEEDKKHERHPIFGNIVDEVAYHEKYPTIYHLRKKLVDSTDKADLRLIYLALAHMIKFRGHFLIEGDLNPDNSDVDKLFIQLVQTYNQLFEENPINASGVDAKAILSARLSKSRRLENLIAQLPGEKKNGLFGNLIALSLGLTPNFKSNFDLAEDAKLQLSKDTYDDDLDNLLAQIGDQYADLFLAAKNLSDAILLSDILRVNTEITKAPLSASMIKRYDEHHQDLTLLKALVRQQLPEKYKEIFFDQSKNGYAGYIDGGASQEEFYKFIKPILEKMDGTEELLVKLNREDLLRKQRTFDNGSIPHQIHLGELHAILRRQEDFYPFLKDNREKIEKILTFRIPYYVGPLARGNSRFAWMTRKSEETITPWNFEEVVDKGASAQSFIERMTNFDKNLPNEKVLPKHSLLYEYFTVYNELTKVKYVTEGMRKPAFLSGEQKKAIVDLLFKTNRKVTVKQLKEDYFKKIECFDSVEISGVEDRFNASLGTYHDLLKIIKDKDFLDNEENEDILEDIVLTLTLFEDREMIEERLKTYAHLFDDKVMKQLKRRRYTGWGRLSRKLINGIRDKQSGKTILDFLKSDGFANRNFMQLIHDDSLTFKEDIQKAQVSGQGDSLHEHIANLAGSPAIKKGILQTVKVVDELVKVMGRHKPENIVIEMARENQTTQKGQKNSRERMKRIEEGIKELGSQILKEHPVENTQLQNEKLYLYYLQNGRDMYVDQELDINRLSDYDVDHIVPQSFLKDDSIDNKVLTRSDKARGKSDNVPSEEVVKKMKNYWRQLLNAKLITQRKFDNLTKAERGGLSELDKAGFIKRQLVETRQITKHVAQILDSRMNTKYDENDKLIREVKVITLKSKLVSDFRKDFQFYKVREINNYHHAHDAYLNAVVGTALIKKYPKLESEFVYGDYKVYDVRKMIAKSEQEIGKATAKYFFYSNIMNFFKTEITLANGEIRKRPLIETNGETGEIVWDKGRDFATVRKVLSMPQVNIVKKTEVQTGGFSKESILPKRNSDKLIARKKDWDPKKYGGFDSPTVAYSVLVVAKVEKGKSKKLKSVKELLGITIMERSSFEKNPIDFLEAKGYKEVKKDLIIKLPKYSLFELENGRKRMLASAGELQKGNELALPSKYVNFLYLASHYEKLKGSPEDNEQKQLFVEQHKHYLDEIIEQISEFSKRVILADANLDKVLSAYNKHRDKPIREQAENIIHLFTLTNLGAPAAFKYFDTTIDRKRYTSTKEVLDATLIHQSITGLYETRIDLSQLGGDGGEAAAKGSSPAPGGTLNIEDEYRLHETSKEPDVSLGSTWLSDFPQAWAETGGMGLAVRQAPLIIPLKATSTPVSIKQYPMSQEARLGIKPHIQRLLDQGILVPCQSPWNTPLLPVKKPGTNDYRPVQDLREVNKRVEDIHPTVPNPYNLLSGLPPSHQWYTVLDLKDAFFCLRLHPTSQPLFAFEWRDPEMGISGQLTWTRLPQGFKNSPTLFNEALHRDLAGFRIQHPDLILLQYVDDLLLAATSELDCQQGTRALLQTLGDLGYRASAKKAQICQKQVKYLGYLLKEGQRWLTEARKETVMGQPIPKTPRQLREFLGTAGFCRLWIPGFAEMAAPLYPLTKPGTLFNWGPDQQKAFQEIKQALLTAPALGLPDLTKPFELFVDEKQGYAKGVLTQKLGPWRRPVAYLSKKLDPVAAGWPPCLRMVAAIAVLTKDAGKLTMGQPLVILAPHAVEALVKQPPDRWLSNARMTHYQALLLDTDRVQFGPVVALNPATLLPLPEEGLQHDCLDILAEAHGTRSDLMDQPLPDADHTWYTDGSSFLQEGQRKAGAAVTTETEVIWARALPAGTSAQRAELIALTQALKMAEGKKLNVYTDSRYAFATAHIHGEIYRRRGWLTSEGKEIKNKDEILALLKALFLPKRLSIIHCPGHQKGNSAEARGNRMADQAAREVATRETPETSTLLAGKRTADGSEFEKRTADGSEFESPKKKAKVE

SEQ ID NO: 2236 - protein, 2095 aa, synthetic construct
MPAAKRVKLDGGDKKYSIGLDIGTNSVGWAVITDEYKVPSKKFKVLGNTDRHSIKKNLIGALLFDSGETAEATRLKRTARRRYTRRKNRICYLQEIFSNEMAKVDDSFFHRLEESFLVEEDKKHERHPIFGNIVDEVAYHEKYPTIYHLRKKLVDSTDKADLRLIYLALAHMIKFRGHFLIEGDLNPDNSDVDKLFIQLVQTYNQLFEENPINASGVDAKAILSARLSKSRRLENLIAQLPGEKKNGLFGNLIALSLGLTPNFKSNFDLAEDAKLQLSKDTYDDDLDNLLAQIGDQYADLFLAAKNLSDAILLSDILRVNTEITKAPLSASMIKRYDEHHQDLTLLKALVRQQLPEKYKEIFFDQSKNGYAGYIDGGASQEEFYKFIKPILEKMDGTEELLVKLNREDLLRKQRTFDNGSIPHQIHLGELHAILRRQEDFYPFLKDNREKIEKILTFRIPYYVGPLARGNSRFAWMTRKSEETITPWNFEEVVDKGASAQSFIERMTNFDKNLPNEKVLPKHSLLYEYFTVYNELTKVKYVTEGMRKPAFLSGEQKKAIVDLLFKTNRKVTVKQLKEDYFKKIECFDSVEISGVEDRFNASLGTYHDLLKIIKDKDFLDNEENEDILEDIVLTLTLFEDREMIEERLKTYAHLFDDKVMKQLKRRRYTGWGRLSRKLINGIRDKQSGKTILDFLKSDGFANRNFMQLIHDDSLTFKEDIQKAQVSGQGDSLHEHIANLAGSPAIKKGILQTVKVVDELVKVMGRHKPENIVIEMARENQTTQKGQKNSRERMKRIEEGIKELGSQILKEHPVENTQLQNEKLYLYYLQNGRDMYVDQELDINRLSDYDVDHIVPQSFLKDDSIDNKVLTRSDKARGKSDNVPSEEVVKKMKNYWRQLLNAKLITQRKFDNLTKAERGGLSELDKAGFIKRQLVETRQITKHVAQILDSRMNTKYDENDKLIREVKVITLKSKLVSDFRKDFQFYKVREINNYHHAHDAYLNAVVGTALIKKYPKLESEFVYGDYKVYDVRKMIAKSEQEIGKATAKYFFYSNIMNFFKTEITLANGEIRKRPLIETNGETGEIVWDKGRDFATVRKVLSMPQVNIVKKTEVQTGGFSKESILPKRNSDKLIARKKDWDPKKYGGFDSPTVAYSVLVVAKVEKGKSKKLKSVKELLGITIMERSSFEKNPIDFLEAKGYKEVKKDLIIKLPKYSLFELENGRKRMLASAGELQKGNELALPSKYVNFLYLASHYEKLKGSPEDNEQKQLFVEQHKHYLDEIIEQISEFSKRVILADANLDKVLSAYNKHRDKPIREQAENIIHLFTLTNLGAPAAFKYFDTTIDRKRYTSTKEVLDATLIHQSITGLYETRIDLSQLGGDGGEAAAKEAAAKGGTLNIEDEYRLHETSKEPDVSLGSTWLSDFPQAWAETGGMGLAVRQAPLIIPLKATSTPVSIKQYPMSQEARLGIKPHIQRLLDQGILVPCQSPWNTPLLPVKKPGTNDYRPVQDLREVNKRVEDIHPTVPNPYNLLSGLPPSHQWYTVLDLKDAFFCLRLHPTSQPLFAFEWRDPEMGISGQLTWTRLPQGFKNSPTLFNEALHRDLAGFRIQHPDLILLQYVDDLLLAATSELDCQQGTRALLQTLGDLGYRASAKKAQICQKQVKYLGYLLKEGQRWLTEARKETVMGQPIPKTPRQLREFLGTAGFCRLWIPGFAEMAAPLYPLTKPGTLFNWGPDQQKAFQEIKQALLTAPALGLPDLTKPFELFVDEKQGYAKGVLTQKLGPWRRPVAYLSKKLDPVAAGWPPCLRMVAAIAVLTKDAGKLTMGQPLVILAPHAVEALVKQPPDRWLSNARMTHYQALLLDTDRVQFGPVVALNPATLLPLPEEGLQHDCLDILAEAHGTRSDLMDQPLPDADHTWYTDGSSFLQEGQRKAGAAVTTETEVIWARALPAGTSAQRAELIALTQALKMAEGKKLNVYTDSRYAFATAHIHGEIYRRRGWLTSEGKEIKNKDEILALLKALFLPKRLSIIHCPGHQKGNSAEARGNRMADQAAREVATRETPETSTLLAGKRTADGSEFEKRTADGSEFESPKKKAKVE

SEQ ID NO: 2237 - protein, 2105 aa, synthetic construct
MPAAKRVKLDGGDKKYSIGLDIGTNSVGWAVITDEYKVPSKKFKVLGNTDRHSIKKNLIGALLFDSGETAEATRLKRTARRRYTRRKNRICYLQEIFSNEMAKVDDSFFHRLEESFLVEEDKKHERHPIFGNIVDEVAYHEKYPTIYHLRKKLVDSTDKADLRLIYLALAHMIKFRGHFLIEGDLNPDNSDVDKLFIQLVQTYNQLFEENPINASGVDAKAILSARLSKSRRLENLIAQLPGEKKNGLFGNLIALSLGLTPNFKSNFDLAEDAKLQLSKDTYDDDLDNLLAQIGDQYADLFLAAKNLSDAILLSDILRVNTEITKAPLSASMIKRYDEHHQDLTLLKALVRQQLPEKYKEIFFDQSKNGYAGYIDGGASQEEFYKFIKPILEKMDGTEELLVKLNREDLLRKQRTFDNGSIPHQIHLGELHAILRRQEDFYPFLKDNREKIEKILTFRIPYYVGPLARGNSRFAWMTRKSEETITPWNFEEVVDKGASAQSFIERMTNFDKNLPNEKVLPKHSLLYEYFTVYNELTKVKYVTEGMRKPAFLSGEQKKAIVDLLFKTNRKVTVKQLKEDYFKKIECFDSVEISGVEDRFNASLGTYHDLLKIIKDKDFLDNEENEDILEDIVLTLTLFEDREMIEERLKTYAHLFDDKVMKQLKRRRYTGWGRLSRKLINGIRDKQSGKTILDFLKSDGFANRNFMQLIHDDSLTFKEDIQKAQVSGQGDSLHEHIANLAGSPAIKKGILQTVKVVDELVKVMGRHKPENIVIEMARENQTTQKGQKNSRERMKRIEEGIKELGSQILKEHPVENTQLQNEKLYLYYLQNGRDMYVDQELDINRLSDYDVDHIVPQSFLKDDSIDNKVLTRSDKARGKSDNVPSEEVVKKMKNYWRQLLNAKLITQRKFDNLTKAERGGLSELDKAGFIKRQLVETRQITKHVAQILDSRMNTKYDENDKLIREVKVITLKSKLVSDFRKDFQFYKVREINNYHHAHDAYLNAVVGTALIKKYPKLESEFVYGDYKVYDVRKMIAKSEQEIGKATAKYFFYSNIMNFFKTEITLANGEIRKRPLIETNGETGEIVWDKGRDFATVRKVLSMPQVNIVKKTEVQTGGFSKESILPKRNSDKLIARKKDWDPKKYGGFDSPTVAYSVLVVAKVEKGKSKKLKSVKELLGITIMERSSFEKNPIDFLEAKGYKEVKKDLIIKLPKYSLFELENGRKRMLASAGELQKGNELALPSKYVNFLYLASHYEKLKGSPEDNEQKQLFVEQHKHYLDEIIEQISEFSKRVILADANLDKVLSAYNKHRDKPIREQAENIIHLFTLTNLGAPAAFKYFDTTIDRKRYTSTKEVLDATLIHQSITGLYETRIDLSQLGGDGGEAAAKEAAAKEAAAKEAAAKGGTLNIEDEYRLHETSKEPDVSLGSTWLSDFPQAWAETGGMGLAVRQAPLIIPLKATSTPVSIKQYPMSQEARLGIKPHIQRLLDQGILVPCQSPWNTPLLPVKKPGTNDYRPVQDLREVNKRVEDIHPTVPNPYNLLSGLPPSHQWYTVLDLKDAFFCLRLHPTSQPLFAFEWRDPEMGISGQLTWTRLPQGFKNSPTLFNEALHRDLAGFRIQHPDLILLQYVDDLLLAATSELDCQQGTRALLQTLGDLGYRASAKKAQICQKQVKYLGYLLKEGQRWLTEARKETVMGQPIPKTPRQLREFLGTAGFCRLWIPGFAEMAAPLYPLTKPGTLFNWGPDQQKAFQEIKQALLTAPALGLPDLTKPFELFVDEKQGYAKGVLTQKLGPWRRPVAYLSKKLDPVAAGWPPCLRMVAAIAVLTKDAGKLTMGQPLVILAPHAVEALVKQPPDRWLSNARMTHYQALLLDTDRVQFGPVVALNPATLLPLPEEGLQHDCLDILAEAHGTRSDLMDQPLPDADHTWYTDGSSFLQEGQRKAGAAVTTETEVIWARALPAGTSAQRAELIALTQALKMAEGKKLNVYTDSRYAFATAHIHGEIYRRRGWLTSEGKEIKNKDEILALLKALFLPKRLSIIHCPGHQKGNSAEARGNRMADQAAREVATRETPETSTLLAGKRTADGSEFEKRTADGSEFESPKKKAKVE

SEQ ID NO: 2238 - protein, 2093 aa, synthetic construct
MPAAKRVKLDGGDKKYSIGLDIGTNSVGWAVITDEYKVPSKKFKVLGNTDRHSIKKNLIGALLFDSGETAEATRLKRTARRRYTRRKNRICYLQEIFSNEMAKVDDSFFHRLEESFLVEEDKKHERHPIFGNIVDEVAYHEKYPTIYHLRKKLVDSTDKADLRLIYLALAHMIKFRGHFLIEGDLNPDNSDVDKLFIQLVQTYNQLFEENPINASGVDAKAILSARLSKSRRLENLIAQLPGEKKNGLFGNLIALSLGLTPNFKSNFDLAEDAKLQLSKDTYDDDLDNLLAQIGDQYADLFLAAKNLSDAILLSDILRVNTEITKAPLSASMIKRYDEHHQDLTLLKALVRQQLPEKYKEIFFDQSKNGYAGYIDGGASQEEFYKFIKPILEKMDGTEELLVKLNREDLLRKQRTFDNGSIPHQIHLGELHAILRRQEDFYPFLKDNREKIEKILTFRIPYYVGPLARGNSRFAWMTRKSEETITPWNFEEVVDKGASAQSFIERMTNFDKNLPNEKVLPKHSLLYEYFTVYNELTKVKYVTEGMRKPAFLSGEQKKAIVDLLFKTNRKVTVKQLKEDYFKKIECFDSVEISGVEDRFNASLGTYHDLLKIIKDKDFLDNEENEDILEDIVLTLTLFEDREMIEERLKTYAHLFDDKVMKQLKRRRYTGWGRLSRKLINGIRDKQSGKTILDFLKSDGFANRNFMQLIHDDSLTFKEDIQKAQVSGQGDSLHEHIANLAGSPAIKKGILQTVKVVDELVKVMGRHKPENIVIEMARENQTTQKGQKNSRERMKRIEEGIKELGSQILKEHPVENTQLQNEKLYLYYLQNGRDMYVDQELDINRLSDYDVDHIVPQSFLKDDSIDNKVLTRSDKARGKSDNVPSEEVVKKMKNYWRQLLNAKLITQRKFDNLTKAERGGLSELDKAGFIKRQLVETRQITKHVAQILDSRMNTKYDENDKLIREVKVITLKSKLVSDFRKDFQFYKVREINNYHHAHDAYLNAVVGTALIKKYPKLESEFVYGDYKVYDVRKMIAKSEQEIGKATAKYFFYSNIMNFFKTEITLANGEIRKRPLIETNGETGEIVWDKGRDFATVRKVLSMPQVNIVKKTEVQTGGFSKESILPKRNSDKLIARKKDWDPKKYGGFDSPTVAYSVLVVAKVEKGKSKKLKSVKELLGITIMERSSFEKNPIDFLEAKGYKEVKKDLIIKLPKYSLFELENGRKRMLASAGELQKGNELALPSKYVNFLYLASHYEKLKGSPEDNEQKQLFVEQHKHYLDEIIEQISEFSKRVILADANLDKVLSAYNKHRDKPIREQAENIIHLFTLTNLGAPAAFKYFDTTIDRKRYTSTKEVLDATLIHQSITGLYETRIDLSQLGGDGGEAAAKGGSGGTLNIEDEYRLHETSKEPDVSLGSTWLSDFPQAWAETGGMGLAVRQAPLIIPLKATSTPVSIKQYPMSQEARLGIKPHIQRLLDQGILVPCQSPWNTPLLPVKKPGTNDYRPVQDLREVNKRVEDIHPTVPNPYNLLSGLPPSHQWYTVLDLKDAFFCLRLHPTSQPLFAFEWRDPEMGISGQLTWTRLPQGFKNSPTLFNEALHRDLAGFRIQHPDLILLQYVDDLLLAATSELDCQQGTRALLQTLGDLGYRASAKKAQICQKQVKYLGYLLKEGQRWLTEARKETVMGQPIPKTPRQLREFLGTAGFCRLWIPGFAEMAAPLYPLTKPGTLFNWGPDQQKAFQEIKQALLTAPALGLPDLTKPFELFVDEKQGYAKGVLTQKLGPWRRPVAYLSKKLDPVAAGWPPCLRMVAAIAVLTKDAGKLTMGQPLVILAPHAVEALVKQPPDRWLSNARMTHYQALLLDTDRVQFGPVVALNPATLLPLPEEGLQHDCLDILAEAHGTRSDLMDQPLPDADHTWYTDGSSFLQEGQRKAGAAVTTETEVIWARALPAGTSAQRAELIALTQALKMAEGKKLNVYTDSRYAFATAHIHGEIYRRRGWLTSEGKEIKNKDEILALLKALFLPKRLSIIHCPGHQKGNSAEARGNRMADQAAREVATRETPETSTLLAGKRTADGSEFEKRTADGSEFESPKKKAKVE

SEQ ID NO: 2239 - protein, 2096 aa, synthetic construct
MPAAKRVKLDGGDKKYSIGLDIGTNSVGWAVITDEYKVPSKKFKVLGNTDRHSIKKNLIGALLFDSGETAEATRLKRTARRRYTRRKNRICYLQEIFSNEMAKVDDSFFHRLEESFLVEEDKKHERHPIFGNIVDEVAYHEKYPTIYHLRKKLVDSTDKADLRLIYLALAHMIKFRGHFLIEGDLNPDNSDVDKLFIQLVQTYNQLFEENPINASGVDAKAILSARLSKSRRLENLIAQLPGEKKNGLFGNLIALSLGLTPNFKSNFDLAEDAKLQLSKDTYDDDLDNLLAQIGDQYADLFLAAKNLSDAILLSDILRVNTEITKAPLSASMIKRYDEHHQDLTLLKALVRQQLPEKYKEIFFDQSKNGYAGYIDGGASQEEFYKFIKPILEKMDGTEELLVKLNREDLLRKQRTFDNGSIPHQIHLGELHAILRRQEDFYPFLKDNREKIEKILTFRIPYYVGPLARGNSRFAWMTRKSEETITPWNFEEVVDKGASAQSFIERMTNFDKNLPNEKVLPKHSLLYEYFTVYNELTKVKYVTEGMRKPAFLSGEQKKAIVDLLFKTNRKVTVKQLKEDYFKKIECFDSVEISGVEDRFNASLGTYHDLLKIIKDKDFLDNEENEDILEDIVLTLTLFEDREMIEERLKTYAHLFDDKVMKQLKRRRYTGWGRLSRKLINGIRDKQSGKTILDFLKSDGFANRNFMQLIHDDSLTFKEDIQKAQVSGQGDSLHEHIANLAGSPAIKKGILQTVKVVDELVKVMGRHKPENIVIEMARENQTTQKGQKNSRERMKRIEEGIKELGSQILKEHPVENTQLQNEKLYLYYLQNGRDMYVDQELDINRLSDYDVDHIVPQSFLKDDSIDNKVLTRSDKARGKSDNVPSEEVVKKMKNYWRQLLNAKLITQRKFDNLTKAERGGLSELDKAGFIKRQLVETRQITKHVAQILDSRMNTKYDENDKLIREVKVITLKSKLVSDFRKDFQFYKVREINNYHHAHDAYLNAVVGTALIKKYPKLESEFVYGDYKVYDVRKMIAKSEQEIGKATAKYFFYSNIMNFFKTEITLANGEIRKRPLIETNGETGEIVWDKGRDFATVRKVLSMPQVNIVKKTEVQTGGFSKESILPKRNSDKLIARKKDWDPKKYGGFDSPTVAYSVLVVAKVEKGKSKKLKSVKELLGITIMERSSFEKNPIDFLEAKGYKEVKKDLIIKLPKYSLFELENGRKRMLASAGELQKGNELALPSKYVNFLYLASHYEKLKGSPEDNEQKQLFVEQHKHYLDEIIEQISEFSKRVILADANLDKVLSAYNKHRDKPIREQAENIIHLFTLTNLGAPAAFKYFDTTIDRKRYTSTKEVLDATLIHQSITGLYETRIDLSQLGGDGGEAAAKGGSGSSGGTLNIEDEYRLHETSKEPDVSLGSTWLSDFPQAWAETGGMGLAVRQAPLIIPLKATSTPVSIKQYPMSQEARLGIKPHIQRLLDQGILVPCQSPWNTPLLPVKKPGTNDYRPVQDLREVNKRVEDIHPTVPNPYNLLSGLPPSHQWYTVLDLKDAFFCLRLHPTSQPLFAFEWRDPEMGISGQLTWTRLPQGFKNSPTLFNEALHRDLAGFRIQHPDLILLQYVDDLLLAATSELDCQQGTRALLQTLGDLGYRASAKKAQICQKQVKYLGYLLKEGQRWLTEARKETVMGQPIPKTPRQLREFLGTAGFCRLWIPGFAEMAAPLYPLTKPGTLFNWGPDQQKAFQEIKQALLTAPALGLPDLTKPFELFVDEKQGYAKGVLTQKLGPWRRPVAYLSKKLDPVAAGWPPCLRMVAAIAVLTKDAGKLTMGQPLVILAPHAVEALVKQPPDRWLSNARMTHYQALLLDTDRVQFGPVVALNPATLLPLPEEGLQHDCLDILAEAHGTRSDLMDQPLPDADHTWYTDGSSFLQEGQRKAGAAVTTETEVIWARALPAGTSAQRAELIALTQALKMAEGKKLNVYTDSRYAFATAHIHGEIYRRRGWLTSEGKEIKNKDEILALLKALFLPKRLSIIHCPGHQKGNSAEARGNRMADQAAREVATRETPETSTLLAGKRTADGSEFEKRTADGSEFESPKKKAKVE

SEQ ID NO: 2240 - protein, 2100 aa, synthetic construct
MPAAKRVKLDGGDKKYSIGLDIGTNSVGWAVITDEYKVPSKKFKVLGNTDRHSIKKNLIGALLFDSGETAEATRLKRTARRRYTRRKNRICYLQEIFSNEMAKVDDSFFHRLEESFLVEEDKKHERHPIFGNIVDEVAYHEKYPTIYHLRKKLVDSTDKADLRLIYLALAHMIKFRGHFLIEGDLNPDNSDVDKLFIQLVQTYNQLFEENPINASGVDAKAILSARLSKSRRLENLIAQLPGEKKNGLFGNLIALSLGLTPNFKSNFDLAEDAKLQLSKDTYDDDLDNLLAQIGDQYADLFLAAKNLSDAILLSDILRVNTEITKAPLSASMIKRYDEHHQDLTLLKALVRQQLPEKYKEIFFDQSKNGYAGYIDGGASQEEFYKFIKPILEKMDGTEELLVKLNREDLLRKQRTFDNGSIPHQIHLGELHAILRRQEDFYPFLKDNREKIEKILTFRIPYYVGPLARGNSRFAWMTRKSEETITPWNFEEVVDKGASAQSFIERMTNFDKNLPNEKVLPKHSLLYEYFTVYNELTKVKYVTEGMRKPAFLSGEQKKAIVDLLFKTNRKVTVKQLKEDYFKKIECFDSVEISGVEDRFNASLGTYHDLLKIIKDKDFLDNEENEDILEDIVLTLTLFEDREMIEERLKTYAHLFDDKVMKQLKRRRYTGWGRLSRKLINGIRDKQSGKTILDFLKSDGFANRNFMQLIHDDSLTFKEDIQKAQVSGQGDSLHEHIANLAGSPAIKKGILQTVKVVDELVKVMGRHKPENIVIEMARENQTTQKGQKNSRERMKRIEEGIKELGSQILKEHPVENTQLQNEKLYLYYLQNGRDMYVDQELDINRLSDYDVDHIVPQSFLKDDSIDNKVLTRSDKARGKSDNVPSEEVVKKMKNYWRQLLNAKLITQRKFDNLTKAERGGLSELDKAGFIKRQLVETRQITKHVAQILDSRMNTKYDENDKLIREVKVITLKSKLVSDFRKDFQFYKVREINNYHHAHDAYLNAVVGTALIKKYPKLESEFVYGDYKVYDVRKMIAKSEQEIGKATAKYFFYSNIMNFFKTEITLANGEIRKRPLIETNGETGEIVWDKGRDFATVRKVLSMPQVNIVKKTEVQTGGFSKESILPKRNSDKLIARKKDWDPKKYGGFDSPTVAYSVLVVAKVEKGKSKKLKSVKELLGITIMERSSFEKNPIDFLEAKGYKEVKKDLIIKLPKYSLFELENGRKRMLASAGELQKGNELALPSKYVNFLYLASHYEKLKGSPEDNEQKQLFVEQHKHYLDEIIEQISEFSKRVILADANLDKVLSAYNKHRDKPIREQAENIIHLFTLTNLGAPAAFKYFDTTIDRKRYTSTKEVLDATLIHQSITGLYETRIDLSQLGGDGGGGGGSGGGGSGGGGSGGTLNIEDEYRLHETSKEPDVSLGSTWLSDFPQAWAETGGMGLAVRQAPLIIPLKATSTPVSIKQYPMSQEARLGIKPHIQRLLDQGILVPCQSPWNTPLLPVKKPGTNDYRPVQDLREVNKRVEDIHPTVPNPYNLLSGLPPSHQWYTVLDLKDAFFCLRLHPTSQPLFAFEWRDPEMGISGQLTWTRLPQGFKNSPTLFNEALHRDLAGFRIQHPDLILLQYVDDLLLAATSELDCQQGTRALLQTLGDLGYRASAKKAQICQKQVKYLGYLLKEGQRWLTEARKETVMGQPIPKTPRQLREFLGTAGFCRLWIPGFAEMAAPLYPLTKPGTLFNWGPDQQKAFQEIKQALLTAPALGLPDLTKPFELFVDEKQGYAKGVLTQKLGPWRRPVAYLSKKLDPVAAGWPPCLRMVAAIAVLTKDAGKLTMGQPLVILAPHAVEALVKQPPDRWLSNARMTHYQALLLDTDRVQFGPVVALNPATLLPLPEEGLQHDCLDILAEAHGTRSDLMDQPLPDADHTWYTDGSSFLQEGQRKAGAAVTTETEVIWARALPAGTSAQRAELIALTQALKMAEGKKLNVYTDSRYAFATAHIHGEIYRRRGWLTSEGKEIKNKDEILALLKALFLPKRLSIIHCPGHQKGNSAEARGNRMADQAAREVATRETPETSTLLAGKRTADGSEFEKRTADGSEFESPKKKAKVE

SEQ ID NO: 2241 - protein, 2093 aa, synthetic construct
MPAAKRVKLDGGDKKYSIGLDIGTNSVGWAVITDEYKVPSKKFKVLGNTDRHSIKKNLIGALLFDSGETAEATRLKRTARRRYTRRKNRICYLQEIFSNEMAKVDDSFFHRLEESFLVEEDKKHERHPIFGNIVDEVAYHEKYPTIYHLRKKLVDSTDKADLRLIYLALAHMIKFRGHFLIEGDLNPDNSDVDKLFIQLVQTYNQLFEENPINASGVDAKAILSARLSKSRRLENLIAQLPGEKKNGLFGNLIALSLGLTPNFKSNFDLAEDAKLQLSKDTYDDDLDNLLAQIGDQYADLFLAAKNLSDAILLSDILRVNTEITKAPLSASMIKRYDEHHQDLTLLKALVRQQLPEKYKEIFFDQSKNGYAGYIDGGASQEEFYKFIKPILEKMDGTEELLVKLNREDLLRKQRTFDNGSIPHQIHLGELHAILRRQEDFYPFLKDNREKIEKILTFRIPYYVGPLARGNSRFAWMTRKSEETITPWNFEEVVDKGASAQSFIERMTNFDKNLPNEKVLPKHSLLYEYFTVYNELTKVKYVTEGMRKPAFLSGEQKKAIVDLLFKTNRKVTVKQLKEDYFKKIECFDSVEISGVEDRFNASLGTYHDLLKIIKDKDFLDNEENEDILEDIVLTLTLFEDREMIEERLKTYAHLFDDKVMKQLKRRRYTGWGRLSRKLINGIRDKQSGKTILDFLKSDGFANRNFMQLIHDDSLTFKEDIQKAQVSGQGDSLHEHIANLAGSPAIKKGILQTVKVVDELVKVMGRHKPENIVIEMARENQTTQKGQKNSRERMKRIEEGIKELGSQILKEHPVENTQLQNEKLYLYYLQNGRDMYVDQELDINRLSDYDVDHIVPQSFLKDDSIDNKVLTRSDKARGKSDNVPSEEVVKKMKNYWRQLLNAKLITQRKFDNLTKAERGGLSELDKAGFIKRQLVETRQITKHVAQILDSRMNTKYDENDKLIREVKVITLKSKLVSDFRKDFQFYKVREINNYHHAHDAYLNAVVGTALIKKYPKLESEFVYGDYKVYDVRKMIAKSEQEIGKATAKYFFYSNIMNFFKTEITLANGEIRKRPLIETNGETGEIVWDKGRDFATVRKVLSMPQVNIVKKTEVQTGGFSKESILPKRNSDKLIARKKDWDPKKYGGFDSPTVAYSVLVVAKVEKGKSKKLKSVKELLGITIMERSSFEKNPIDFLEAKGYKEVKKDLIIKLPKYSLFELENGRKRMLASAGELQKGNELALPSKYVNFLYLASHYEKLKGSPEDNEQKQLFVEQHKHYLDEIIEQISEFSKRVILADANLDKVLSAYNKHRDKPIREQAENIIHLFTLTNLGAPAAFKYFDTTIDRKRYTSTKEVLDATLIHQSITGLYETRIDLSQLGGDGGGGGEAAAKGGTLNIEDEYRLHETSKEPDVSLGSTWLSDFPQAWAETGGMGLAVRQAPLIIPLKATSTPVSIKQYPMSQEARLGIKPHIQRLLDQGILVPCQSPWNTPLLPVKKPGTNDYRPVQDLREVNKRVEDIHPTVPNPYNLLSGLPPSHQWYTVLDLKDAFFCLRLHPTSQPLFAFEWRDPEMGISGQLTWTRLPQGFKNSPTLFNEALHRDLAGFRIQHPDLILLQYVDDLLLAATSELDCQQGTRALLQTLGDLGYRASAKKAQICQKQVKYLGYLLKEGQRWLTEARKETVMGQPIPKTPRQLREFLGTAGFCRLWIPGFAEMAAPLYPLTKPGTLFNWGPDQQKAFQEIKQALLTAPALGLPDLTKPFELFVDEKQGYAKGVLTQKLGPWRRPVAYLSKKLDPVAAGWPPCLRMVAAIAVLTKDAGKLTMGQPLVILAPHAVEALVKQPPDRWLSNARMTHYQALLLDTDRVQFGPVVALNPATLLPLPEEGLQHDCLDILAEAHGTRSDLMDQPLPDADHTWYTDGSSFLQEGQRKAGAAVTTETEVIWARALPAGTSAQRAELIALTQALKMAEGKKLNVYTDSRYAFATAHIHGEIYRRRGWLTSEGKEIKNKDEILALLKALFLPKRLSIIHCPGHQKGNSAEARGNRMADQAAREVATRETPETSTLLAGKRTADGSEFEKRTADGSEFESPKKKAKVE

SEQ ID NO: 2242 - protein, 2088 aa, synthetic construct
MPAAKRVKLDGGDKKYSIGLDIGTNSVGWAVITDEYKVPSKKFKVLGNTDRHSIKKNLIGALLFDSGETAEATRLKRTARRRYTRRKNRICYLQEIFSNEMAKVDDSFFHRLEESFLVEEDKKHERHPIFGNIVDEVAYHEKYPTIYHLRKKLVDSTDKADLRLIYLALAHMIKFRGHFLIEGDLNPDNSDVDKLFIQLVQTYNQLFEENPINASGVDAKAILSARLSKSRRLENLIAQLPGEKKNGLFGNLIALSLGLTPNFKSNFDLAEDAKLQLSKDTYDDDLDNLLAQIGDQYADLFLAAKNLSDAILLSDILRVNTEITKAPLSASMIKRYDEHHQDLTLLKALVRQQLPEKYKEIFFDQSKNGYAGYIDGGASQEEFYKFIKPILEKMDGTEELLVKLNREDLLRKQRTFDNGSIPHQIHLGELHAILRRQEDFYPFLKDNREKIEKILTFRIPYYVGPLARGNSRFAWMTRKSEETITPWNFEEVVDKGASAQSFIERMTNFDKNLPNEKVLPKHSLLYEYFTVYNELTKVKYVTEGMRKPAFLSGEQKKAIVDLLFKTNRKVTVKQLKEDYFKKIECFDSVEISGVEDRFNASLGTYHDLLKIIKDKDFLDNEENEDILEDIVLTLTLFEDREMIEERLKTYAHLFDDKVMKQLKRRRYTGWGRLSRKLINGIRDKQSGKTILDFLKSDGFANRNFMQLIHDDSLTFKEDIQKAQVSGQGDSLHEHIANLAGSPAIKKGILQTVKVVDELVKVMGRHKPENIVIEMARENQTTQKGQKNSRERMKRIEEGIKELGSQILKEHPVENTQLQNEKLYLYYLQNGRDMYVDQELDINRLSDYDVDHIVPQSFLKDDSIDNKVLTRSDKARGKSDNVPSEEVVKKMKNYWRQLLNAKLITQRKFDNLTKAERGGLSELDKAGFIKRQLVETRQITKHVAQILDSRMNTKYDENDKLIREVKVITLKSKLVSDFRKDFQFYKVREINNYHHAHDAYLNAVVGTALIKKYPKLESEFVYGDYKVYDVRKMIAKSEQEIGKATAKYFFYSNIMNFFKTEITLANGEIRKRPLIETNGETGEIVWDKGRDFATVRKVLSMPQVNIVKKTEVQTGGFSKESILPKRNSDKLIARKKDWDPKKYGGFDSPTVAYSVLVVAKVEKGKSKKLKSVKELLGITIMERSSFEKNPIDFLEAKGYKEVKKDLIIKLPKYSLFELENGRKRMLASAGELQKGNELALPSKYVNFLYLASHYEKLKGSPEDNEQKQLFVEQHKHYLDEIIEQISEFSKRVILADANLDKVLSAYNKHRDKPIREQAENIIHLFTLTNLGAPAAFKYFDTTIDRKRYTSTKEVLDATLIHQSITGLYETRIDLSQLGGDGGGSSGGTLNIEDEYRLHETSKEPDVSLGSTWLSDFPQAWAETGGMGLAVRQAPLIIPLKATSTPVSIKQYPMSQEARLGIKPHIQRLLDQGILVPCQSPWNTPLLPVKKPGTNDYRPVQDLREVNKRVEDIHPTVPNPYNLLSGLPPSHQWYTVLDLKDAFFCLRLHPTSQPLFAFEWRDPEMGISGQLTWTRLPQGFKNSPTLFNEALHRDLAGFRIQHPDLILLQYVDDLLLAATSELDCQQGTRALLQTLGDLGYRASAKKAQICQKQVKYLGYLLKEGQRWLTEARKETVMGQPIPKTPRQLREFLGTAGFCRLWIPGFAEMAAPLYPLTKPGTLFNWGPDQQKAFQEIKQALLTAPALGLPDLTKPFELFVDEKQGYAKGVLTQKLGPWRRPVAYLSKKLDPVAAGWPPCLRMVAAIAVLTKDAGKLTMGQPLVILAPHAVEALVKQPPDRWLSNARMTHYQALLLDTDRVQFGPVVALNPATLLPLPEEGLQHDCLDILAEAHGTRSDLMDQPLPDADHTWYTDGSSFLQEGQRKAGAAVTTETEVIWARALPAGTSAQRAELIALTQALKMAEGKKLNVYTDSRYAFATAHIHGEIYRRRGWLTSEGKEIKNKDEILALLKALFLPKRLSIIHCPGHQKGNSAEARGNRMADQAAREVATRETPETSTLLAGKRTADGSEFEKRTADGSEFESPKKKAKVE

SEQ ID NO: 2243 - protein, 2090 aa, synthetic construct
MPAAKRVKLDGGDKKYSIGLDIGTNSVGWAVITDEYKVPSKKFKVLGNTDRHSIKKNLIGALLFDSGETAEATRLKRTARRRYTRRKNRICYLQEIFSNEMAKVDDSFFHRLEESFLVEEDKKHERHPIFGNIVDEVAYHEKYPTIYHLRKKLVDSTDKADLRLIYLALAHMIKFRGHFLIEGDLNPDNSDVDKLFIQLVQTYNQLFEENPINASGVDAKAILSARLSKSRRLENLIAQLPGEKKNGLFGNLIALSLGLTPNFKSNFDLAEDAKLQLSKDTYDDDLDNLLAQIGDQYADLFLAAKNLSDAILLSDILRVNTEITKAPLSASMIKRYDEHHQDLTLLKALVRQQLPEKYKEIFFDQSKNGYAGYIDGGASQEEFYKFIKPILEKMDGTEELLVKLNREDLLRKQRTFDNGSIPHQIHLGELHAILRRQEDFYPFLKDNREKIEKILTFRIPYYVGPLARGNSRFAWMTRKSEETITPWNFEEVVDKGASAQSFIERMTNFDKNLPNEKVLPKHSLLYEYFTVYNELTKVKYVTEGMRKPAFLSGEQKKAIVDLLFKTNRKVTVKQLKEDYFKKIECFDSVEISGVEDRFNASLGTYHDLLKIIKDKDFLDNEENEDILEDIVLTLTLFEDREMIEERLKTYAHLFDDKVMKQLKRRRYTGWGRLSRKLINGIRDKQSGKTILDFLKSDGFANRNFMQLIHDDSLTFKEDIQKAQVSGQGDSLHEHIANLAGSPAIKKGILQTVKVVDELVKVMGRHKPENIVIEMARENQTTQKGQKNSRERMKRIEEGIKELGSQILKEHPVENTQLQNEKLYLYYLQNGRDMYVDQELDINRLSDYDVDHIVPQSFLKDDSIDNKVLTRSDKARGKSDNVPSEEVVKKMKNYWRQLLNAKLITQRKFDNLTKAERGGLSELDKAGFIKRQLVETRQITKHVAQILDSRMNTKYDENDKLIREVKVITLKSKLVSDFRKDFQFYKVREINNYHHAHDAYLNAVVGTALIKKYPKLESEFVYGDYKVYDVRKMIAKSEQEIGKATAKYFFYSNIMNFFKTEITLANGEIRKRPLIETNGETGEIVWDKGRDFATVRKVLSMPQVNIVKKTEVQTGGFSKESILPKRNSDKLIARKKDWDPKKYGGFDSPTVAYSVLVVAKVEKGKSKKLKSVKELLGITIMERSSFEKNPIDFLEAKGYKEVKKDLIIKLPKYSLFELENGRKRMLASAGELQKGNELALPSKYVNFLYLASHYEKLKGSPEDNEQKQLFVEQHKHYLDEIIEQISEFSKRVILADANLDKVLSAYNKHRDKPIREQAENIIHLFTLTNLGAPAAFKYFDTTIDRKRYTSTKEVLDATLIHQSITGLYETRIDLSQLGGDGGPAPAPGGTLNIEDEYRLHETSKEPDVSLGSTWLSDFPQAWAETGGMGLAVRQAPLIIPLKATSTPVSIKQYPMSQEARLGIKPHIQRLLDQGILVPCQSPWNTPLLPVKKPGTNDYRPVQDLREVNKRVEDIHPTVPNPYNLLSGLPPSHQWYTVLDLKDAFFCLRLHPTSQPLFAFEWRDPEMGISGQLTWTRLPQGFKNSPTLFNEALHRDLAGFRIQHPDLILLQYVDDLLLAATSELDCQQGTRALLQTLGDLGYRASAKKAQICQKQVKYLGYLLKEGQRWLTEARKETVMGQPIPKTPRQLREFLGTAGFCRLWIPGFAEMAAPLYPLTKPGTLFNWGPDQQKAFQEIKQALLTAPALGLPDLTKPFELFVDEKQGYAKGVLTQKLGPWRRPVAYLSKKLDPVAAGWPPCLRMVAAIAVLTKDAGKLTMGQPLVILAPHAVEALVKQPPDRWLSNARMTHYQALLLDTDRVQFGPVVALNPATLLPLPEEGLQHDCLDILAEAHGTRSDLMDQPLPDADHTWYTDGSSFLQEGQRKAGAAVTTETEVIWARALPAGTSAQRAELIALTQALKMAEGKKLNVYTDSRYAFATAHIHGEIYRRRGWLTSEGKEIKNKDEILALLKALFLPKRLSIIHCPGHQKGNSAEARGNRMADQAAREVATRETPETSTLLAGKRTADGSEFEKRTADGSEFESPKKKAKVE

SEQ ID NO: 2244 - protein, 2096 aa, synthetic construct
MPAAKRVKLDGGDKKYSIGLDIGTNSVGWAVITDEYKVPSKKFKVLGNTDRHSIKKNLIGALLFDSGETAEATRLKRTARRRYTRRKNRICYLQEIFSNEMAKVDDSFFHRLEESFLVEEDKKHERHPIFGNIVDEVAYHEKYPTIYHLRKKLVDSTDKADLRLIYLALAHMIKFRGHFLIEGDLNPDNSDVDKLFIQLVQTYNQLFEENPINASGVDAKAILSARLSKSRRLENLIAQLPGEKKNGLFGNLIALSLGLTPNFKSNFDLAEDAKLQLSKDTYDDDLDNLLAQIGDQYADLFLAAKNLSDAILLSDILRVNTEITKAPLSASMIKRYDEHHQDLTLLKALVRQQLPEKYKEIFFDQSKNGYAGYIDGGASQEEFYKFIKPILEKMDGTEELLVKLNREDLLRKQRTFDNGSIPHQIHLGELHAILRRQEDFYPFLKDNREKIEKILTFRIPYYVGPLARGNSRFAWMTRKSEETITPWNFEEVVDKGASAQSFIERMTNFDKNLPNEKVLPKHSLLYEYFTVYNELTKVKYVTEGMRKPAFLSGEQKKAIVDLLFKTNRKVTVKQLKEDYFKKIECFDSVEISGVEDRFNASLGTYHDLLKIIKDKDFLDNEENEDILEDIVLTLTLFEDREMIEERLKTYAHLFDDKVMKQLKRRRYTGWGRLSRKLINGIRDKQSGKTILDFLKSDGFANRNFMQLIHDDSLTFKEDIQKAQVSGQGDSLHEHIANLAGSPAIKKGILQTVKVVDELVKVMGRHKPENIVIEMARENQTTQKGQKNSRERMKRIEEGIKELGSQILKEHPVENTQLQNEKLYLYYLQNGRDMYVDQELDINRLSDYDVDHIVPQSFLKDDSIDNKVLTRSDKARGKSDNVPSEEVVKKMKNYWRQLLNAKLITQRKFDNLTKAERGGLSELDKAGFIKRQLVETRQITKHVAQILDSRMNTKYDENDKLIREVKVITLKSKLVSDFRKDFQFYKVREINNYHHAHDAYLNAVVGTALIKKYPKLESEFVYGDYKVYDVRKMIAKSEQEIGKATAKYFFYSNIMNFFKTEITLANGEIRKRPLIETNGETGEIVWDKGRDFATVRKVLSMPQVNIVKKTEVQTGGFSKESILPKRNSDKLIARKKDWDPKKYGGFDSPTVAYSVLVVAKVEKGKSKKLKSVKELLGITIMERSSFEKNPIDFLEAKGYKEVKKDLIIKLPKYSLFELENGRKRMLASAGELQKGNELALPSKYVNFLYLASHYEKLKGSPEDNEQKQLFVEQHKHYLDEIIEQISEFSKRVILADANLDKVLSAYNKHRDKPIREQAENIIHLFTLTNLGAPAAFKYFDTTIDRKRYTSTKEVLDATLIHQSITGLYETRIDLSQLGGDGGGSSEAAAKGGSGGTLNIEDEYRLHETSKEPDVSLGSTWLSDFPQAWAETGGMGLAVRQAPLIIPLKATSTPVSIKQYPMSQEARLGIKPHIQRLLDQGILVPCQSPWNTPLLPVKKPGTNDYRPVQDLREVNKRVEDIHPTVPNPYNLLSGLPPSHQWYTVLDLKDAFFCLRLHPTSQPLFAFEWRDPEMGISGQLTWTRLPQGFKNSPTLFNEALHRDLAGFRIQHPDLILLQYVDDLLLAATSELDCQQGTRALLQTLGDLGYRASAKKAQICQKQVKYLGYLLKEGQRWLTEARKETVMGQPIPKTPRQLREFLGTAGFCRLWIPGFAEMAAPLYPLTKPGTLFNWGPDQQKAFQEIKQALLTAPALGLPDLTKPFELFVDEKQGYAKGVLTQKLGPWRRPVAYLSKKLDPVAAGWPPCLRMVAAIAVLTKDAGKLTMGQPLVILAPHAVEALVKQPPDRWLSNARMTHYQALLLDTDRVQFGPVVALNPATLLPLPEEGLQHDCLDILAEAHGTRSDLMDQPLPDADHTWYTDGSSFLQEGQRKAGAAVTTETEVIWARALPAGTSAQRAELIALTQALKMAEGKKLNVYTDSRYAFATAHIHGEIYRRRGWLTSEGKEIKNKDEILALLKALFLPKRLSIIHCPGHQKGNSAEARGNRMADQAAREVATRETPETSTLLAGKRTADGSEFEKRTADGSEFESPKKKAKVE

SEQ ID NO: 2245 - protein, 2091 aa, synthetic construct
MPAAKRVKLDGGDKKYSIGLDIGTNSVGWAVITDEYKVPSKKFKVLGNTDRHSIKKNLIGALLFDSGETAEATRLKRTARRRYTRRKNRICYLQEIFSNEMAKVDDSFFHRLEESFLVEEDKKHERHPIFGNIVDEVAYHEKYPTIYHLRKKLVDSTDKADLRLIYLALAHMIKFRGHFLIEGDLNPDNSDVDKLFIQLVQTYNQLFEENPINASGVDAKAILSARLSKSRRLENLIAQLPGEKKNGLFGNLIALSLGLTPNFKSNFDLAEDAKLQLSKDTYDDDLDNLLAQIGDQYADLFLAAKNLSDAILLSDILRVNTEITKAPLSASMIKRYDEHHQDLTLLKALVRQQLPEKYKEIFFDQSKNGYAGYIDGGASQEEFYKFIKPILEKMDGTEELLVKLNREDLLRKQRTFDNGSIPHQIHLGELHAILRRQEDFYPFLKDNREKIEKILTFRIPYYVGPLARGNSRFAWMTRKSEETITPWNFEEVVDKGASAQSFIERMTNFDKNLPNEKVLPKHSLLYEYFTVYNELTKVKYVTEGMRKPAFLSGEQKKAIVDLLFKTNRKVTVKQLKEDYFKKIECFDSVEISGVEDRFNASLGTYHDLLKIIKDKDFLDNEENEDILEDIVLTLTLFEDREMIEERLKTYAHLFDDKVMKQLKRRRYTGWGRLSRKLINGIRDKQSGKTILDFLKSDGFANRNFMQLIHDDSLTFKEDIQKAQVSGQGDSLHEHIANLAGSPAIKKGILQTVKVVDELVKVMGRHKPENIVIEMARENQTTQKGQKNSRERMKRIEEGIKELGSQILKEHPVENTQLQNEKLYLYYLQNGRDMYVDQELDINRLSDYDVDHIVPQSFLKDDSIDNKVLTRSDKARGKSDNVPSEEVVKKMKNYWRQLLNAKLITQRKFDNLTKAERGGLSELDKAGFIKRQLVETRQITKHVAQILDSRMNTKYDENDKLIREVKVITLKSKLVSDFRKDFQFYKVREINNYHHAHDAYLNAVVGTALIKKYPKLESEFVYGDYKVYDVRKMIAKSEQEIGKATAKYFFYSNIMNFFKTEITLANGEIRKRPLIETNGETGEIVWDKGRDFATVRKVLSMPQVNIVKKTEVQTGGFSKESILPKRNSDKLIARKKDWDPKKYGGFDSPTVAYSVLVVAKVEKGKSKKLKSVKELLGITIMERSSFEKNPIDFLEAKGYKEVKKDLIIKLPKYSLFELENGRKRMLASAGELQKGNELALPSKYVNFLYLASHYEKLKGSPEDNEQKQLFVEQHKHYLDEIIEQISEFSKRVILADANLDKVLSAYNKHRDKPIREQAENIIHLFTLTNLGAPAAFKYFDTTIDRKRYTSTKEVLDATLIHQSITGLYETRIDLSQLGGDGGPAPGGSGGTLNIEDEYRLHETSKEPDVSLGSTWLSDFPQAWAETGGMGLAVRQAPLIIPLKATSTPVSIKQYPMSQEARLGIKPHIQRLLDQGILVPCQSPWNTPLLPVKKPGTNDYRPVQDLREVNKRVEDIHPTVPNPYNLLSGLPPSHQWYTVLDLKDAFFCLRLHPTSQPLFAFEWRDPEMGISGQLTWTRLPQGFKNSPTLFNEALHRDLAGFRIQHPDLILLQYVDDLLLAATSELDCQQGTRALLQTLGDLGYRASAKKAQICQKQVKYLGYLLKEGQRWLTEARKETVMGQPIPKTPRQLREFLGTAGFCRLWIPGFAEMAAPLYPLTKPGTLFNWGPDQQKAFQEIKQALLTAPALGLPDLTKPFELFVDEKQGYAKGVLTQKLGPWRRPVAYLSKKLDPVAAGWPPCLRMVAAIAVLTKDAGKLTMGQPLVILAPHAVEALVKQPPDRWLSNARMTHYQALLLDTDRVQFGPVVALNPATLLPLPEEGLQHDCLDILAEAHGTRSDLMDQPLPDADHTWYTDGSSFLQEGQRKAGAAVTTETEVIWARALPAGTSAQRAELIALTQALKMAEGKKLNVYTDSRYAFATAHIHGEIYRRRGWLTSEGKEIKNKDEILALLKALFLPKRLSIIHCPGHQKGNSAEARGNRMADQAAREVATRETPETSTLLAGKRTADGSEFEKRTADGSEFESPKKKAKVE

SEQ ID NO: 2246 - protein, 2096 aa, synthetic construct
MPAAKRVKLDGGDKKYSIGLDIGTNSVGWAVITDEYKVPSKKFKVLGNTDRHSIKKNLIGALLFDSGETAEATRLKRTARRRYTRRKNRICYLQEIFSNEMAKVDDSFFHRLEESFLVEEDKKHERHPIFGNIVDEVAYHEKYPTIYHLRKKLVDSTDKADLRLIYLALAHMIKFRGHFLIEGDLNPDNSDVDKLFIQLVQTYNQLFEENPINASGVDAKAILSARLSKSRRLENLIAQLPGEKKNGLFGNLIALSLGLTPNFKSNFDLAEDAKLQLSKDTYDDDLDNLLAQIGDQYADLFLAAKNLSDAILLSDILRVNTEITKAPLSASMIKRYDEHHQDLTLLKALVRQQLPEKYKEIFFDQSKNGYAGYIDGGASQEEFYKFIKPILEKMDGTEELLVKLNREDLLRKQRTFDNGSIPHQIHLGELHAILRRQEDFYPFLKDNREKIEKILTFRIPYYVGPLARGNSRFAWMTRKSEETITPWNFEEVVDKGASAQSFIERMTNFDKNLPNEKVLPKHSLLYEYFTVYNELTKVKYVTEGMRKPAFLSGEQKKAIVDLLFKTNRKVTVKQLKEDYFKKIECFDSVEISGVEDRFNASLGTYHDLLKIIKDKDFLDNEENEDILEDIVLTLTLFEDREMIEERLKTYAHLFDDKVMKQLKRRRYTGWGRLSRKLINGIRDKQSGKTILDFLKSDGFANRNFMQLIHDDSLTFKEDIQKAQVSGQGDSLHEHIANLAGSPAIKKGILQTVKVVDELVKVMGRHKPENIVIEMARENQTTQKGQKNSRERMKRIEEGIKELGSQILKEHPVENTQLQNEKLYLYYLQNGRDMYVDQELDINRLSDYDVDHIVPQSFLKDDSIDNKVLTRSDKARGKSDNVPSEEVVKKMKNYWRQLLNAKLITQRKFDNLTKAERGGLSELDKAGFIKRQLVETRQITKHVAQILDSRMNTKYDENDKLIREVKVITLKSKLVSDFRKDFQFYKVREINNYHHAHDAYLNAVVGTALIKKYPKLESEFVYGDYKVYDVRKMIAKSEQEIGKATAKYFFYSNIMNFFKTEITLANGEIRKRPLIETNGETGEIVWDKGRDFATVRKVLSMPQVNIVKKTEVQTGGFSKESILPKRNSDKLIARKKDWDPKKYGGFDSPTVAYSVLVVAKVEKGKSKKLKSVKELLGITIMERSSFEKNPIDFLEAKGYKEVKKDLIIKLPKYSLFELENGRKRMLASAGELQKGNELALPSKYVNFLYLASHYEKLKGSPEDNEQKQLFVEQHKHYLDEIIEQISEFSKRVILADANLDKVLSAYNKHRDKPIREQAENIIHLFTLTNLGAPAAFKYFDTTIDRKRYTSTKEVLDATLIHQSITGLYETRIDLSQLGGDGGGGGGGSEAAAKGGTLNIEDEYRLHETSKEPDVSLGSTWLSDFPQAWAETGGMGLAVRQAPLIIPLKATSTPVSIKQYPMSQEARLGIKPHIQRLLDQGILVPCQSPWNTPLLPVKKPGTNDYRPVQDLREVNKRVEDIHPTVPNPYNLLSGLPPSHQWYTVLDLKDAFFCLRLHPTSQPLFAFEWRDPEMGISGQLTWTRLPQGFKNSPTLFNEALHRDLAGFRIQHPDLILLQYVDDLLLAATSELDCQQGTRALLQTLGDLGYRASAKKAQICQKQVKYLGYLLKEGQRWLTEARKETVMGQPIPKTPRQLREFLGTAGFCRLWIPGFAEMAAPLYPLTKPGTLFNWGPDQQKAFQEIKQALLTAPALGLPDLTKPFELFVDEKQGYAKGVLTQKLGPWRRPVAYLSKKLDPVAAGWPPCLRMVAAIAVLTKDAGKLTMGQPLVILAPHAVEALVKQPPDRWLSNARMTHYQALLLDTDRVQFGPVVALNPATLLPLPEEGLQHDCLDILAEAHGTRSDLMDQPLPDADHTWYTDGSSFLQEGQRKAGAAVTTETEVIWARALPAGTSAQRAELIALTQALKMAEGKKLNVYTDSRYAFATAHIHGEIYRRRGWLTSEGKEIKNKDEILALLKALFLPKRLSIIHCPGHQKGNSAEARGNRMADQAAREVATRETPETSTLLAGKRTADGSEFEKRTADGSEFESPKKKAKVE

SEQ ID NO: 2247 - protein, 2096 aa, synthetic construct
MPAAKRVKLDGGDKKYSIGLDIGTNSVGWAVITDEYKVPSKKFKVLGNTDRHSIKKNLIGALLFDSGETAEATRLKRTARRRYTRRKNRICYLQEIFSNEMAKVDDSFFHRLEESFLVEEDKKHERHPIFGNIVDEVAYHEKYPTIYHLRKKLVDSTDKADLRLIYLALAHMIKFRGHFLIEGDLNPDNSDVDKLFIQLVQTYNQLFEENPINASGVDAKAILSARLSKSRRLENLIAQLPGEKKNGLFGNLIALSLGLTPNFKSNFDLAEDAKLQLSKDTYDDDLDNLLAQIGDQYADLFLAAKNLSDAILLSDILRVNTEITKAPLSASMIKRYDEHHQDLTLLKALVRQQLPEKYKEIFFDQSKNGYAGYIDGGASQEEFYKFIKPILEKMDGTEELLVKLNREDLLRKQRTFDNGSIPHQIHLGELHAILRRQEDFYPFLKDNREKIEKILTFRIPYYVGPLARGNSRFAWMTRKSEETITPWNFEEVVDKGASAQSFIERMTNFDKNLPNEKVLPKHSLLYEYFTVYNELTKVKYVTEGMRKPAFLSGEQKKAIVDLLFKTNRKVTVKQLKEDYFKKIECFDSVEISGVEDRFNASLGTYHDLLKIIKDKDFLDNEENEDILEDIVLTLTLFEDREMIEERLKTYAHLFDDKVMKQLKRRRYTGWGRLSRKLINGIRDKQSGKTILDFLKSDGFANRNFMQLIHDDSLTFKEDIQKAQVSGQGDSLHEHIANLAGSPAIKKGILQTVKVVDELVKVMGRHKPENIVIEMARENQTTQKGQKNSRERMKRIEEGIKELGSQILKEHPVENTQLQNEKLYLYYLQNGRDMYVDQELDINRLSDYDVDHIVPQSFLKDDSIDNKVLTRSDKARGKSDNVPSEEVVKKMKNYWRQLLNAKLITQRKFDNLTKAERGGLSELDKAGFIKRQLVETRQITKHVAQILDSRMNTKYDENDKLIREVKVITLKSKLVSDFRKDFQFYKVREINNYHHAHDAYLNAVVGTALIKKYPKLESEFVYGDYKVYDVRKMIAKSEQEIGKATAKYFFYSNIMNFFKTEITLANGEIRKRPLIETNGETGEIVWDKGRDFATVRKVLSMPQVNIVKKTEVQTGGFSKESILPKRNSDKLIARKKDWDPKKYGGFDSPTVAYSVLVVAKVEKGKSKKLKSVKELLGITIMERSSFEKNPIDFLEAKGYKEVKKDLIIKLPKYSLFELENGRKRMLASAGELQKGNELALPSKYVNFLYLASHYEKLKGSPEDNEQKQLFVEQHKHYLDEIIEQISEFSKRVILADANLDKVLSAYNKHRDKPIREQAENIIHLFTLTNLGAPAAFKYFDTTIDRKRYTSTKEVLDATLIHQSITGLYETRIDLSQLGGDGGPAPAPAPAPAPGGTLNIEDEYRLHETSKEPDVSLGSTWLSDFPQAWAETGGMGLAVRQAPLIIPLKATSTPVSIKQYPMSQEARLGIKPHIQRLLDQGILVPCQSPWNTPLLPVKKPGTNDYRPVQDLREVNKRVEDIHPTVPNPYNLLSGLPPSHQWYTVLDLKDAFFCLRLHPTSQPLFAFEWRDPEMGISGQLTWTRLPQGFKNSPTLFNEALHRDLAGFRIQHPDLILLQYVDDLLLAATSELDCQQGTRALLQTLGDLGYRASAKKAQICQKQVKYLGYLLKEGQRWLTEARKETVMGQPIPKTPRQLREFLGTAGFCRLWIPGFAEMAAPLYPLTKPGTLFNWGPDQQKAFQEIKQALLTAPALGLPDLTKPFELFVDEKQGYAKGVLTQKLGPWRRPVAYLSKKLDPVAAGWPPCLRMVAAIAVLTKDAGKLTMGQPLVILAPHAVEALVKQPPDRWLSNARMTHYQALLLDTDRVQFGPVVALNPATLLPLPEEGLQHDCLDILAEAHGTRSDLMDQPLPDADHTWYTDGSSFLQEGQRKAGAAVTTETEVIWARALPAGTSAQRAELIALTQALKMAEGKKLNVYTDSRYAFATAHIHGEIYRRRGWLTSEGKEIKNKDEILALLKALFLPKRLSIIHCPGHQKGNSAEARGNRMADQAAREVATRETPETSTLLAGKRTADGSEFEKRTADGSEFESPKKKAKVE

SEQ ID NO: 2248 - protein, 2096 aa, synthetic construct
MPAAKRVKLDGGDKKYSIGLDIGTNSVGWAVITDEYKVPSKKFKVLGNTDRHSIKKNLIGALLFDSGETAEATRLKRTARRRYTRRKNRICYLQEIFSNEMAKVDDSFFHRLEESFLVEEDKKHERHPIFGNIVDEVAYHEKYPTIYHLRKKLVDSTDKADLRLIYLALAHMIKFRGHFLIEGDLNPDNSDVDKLFIQLVQTYNQLFEENPINASGVDAKAILSARLSKSRRLENLIAQLPGEKKNGLFGNLIALSLGLTPNFKSNFDLAEDAKLQLSKDTYDDDLDNLLAQIGDQYADLFLAAKNLSDAILLSDILRVNTEITKAPLSASMIKRYDEHHQDLTLLKALVRQQLPEKYKEIFFDQSKNGYAGYIDGGASQEEFYKFIKPILEKMDGTEELLVKLNREDLLRKQRTFDNGSIPHQIHLGELHAILRRQEDFYPFLKDNREKIEKILTFRIPYYVGPLARGNSRFAWMTRKSEETITPWNFEEVVDKGASAQSFIERMTNFDKNLPNEKVLPKHSLLYEYFTVYNELTKVKYVTEGMRKPAFLSGEQKKAIVDLLFKTNRKVTVKQLKEDYFKKIECFDSVEISGVEDRFNASLGTYHDLLKIIKDKDFLDNEENEDILEDIVLTLTLFEDREMIEERLKTYAHLFDDKVMKQLKRRRYTGWGRLSRKLINGIRDKQSGKTILDFLKSDGFANRNFMQLIHDDSLTFKEDIQKAQVSGQGDSLHEHIANLAGSPAIKKGILQTVKVVDELVKVMGRHKPENIVIEMARENQTTQKGQKNSRERMKRIEEGIKELGSQILKEHPVENTQLQNEKLYLYYLQNGRDMYVDQELDINRLSDYDVDHIVPQSFLKDDSIDNKVLTRSDKARGKSDNVPSEEVVKKMKNYWRQLLNAKLITQRKFDNLTKAERGGLSELDKAGFIKRQLVETRQITKHVAQILDSRMNTKYDENDKLIREVKVITLKSKLVSDFRKDFQFYKVREINNYHHAHDAYLNAVVGTALIKKYPKLESEFVYGDYKVYDVRKMIAKSEQEIGKATAKYFFYSNIMNFFKTEITLANGEIRKRPLIETNGETGEIVWDKGRDFATVRKVLSMPQVNIVKKTEVQTGGFSKESILPKRNSDKLIARKKDWDPKKYGGFDSPTVAYSVLVVAKVEKGKSKKLKSVKELLGITIMERSSFEKNPIDFLEAKGYKEVKKDLIIKLPKYSLFELENGRKRMLASAGELQKGNELALPSKYVNFLYLASHYEKLKGSPEDNEQKQLFVEQHKHYLDEIIEQISEFSKRVILADANLDKVLSAYNKHRDKPIREQAENIIHLFTLTNLGAPAAFKYFDTTIDRKRYTSTKEVLDATLIHQSITGLYETRIDLSQLGGDGGPAPGGSEAAAKGGTLNIEDEYRLHETSKEPDVSLGSTWLSDFPQAWAETGGMGLAVRQAPLIIPLKATSTPVSIKQYPMSQEARLGIKPHIQRLLDQGILVPCQSPWNTPLLPVKKPGTNDYRPVQDLREVNKRVEDIHPTVPNPYNLLSGLPPSHQWYTVLDLKDAFFCLRLHPTSQPLFAFEWRDPEMGISGQLTWTRLPQGFKNSPTLFNEALHRDLAGFRIQHPDLILLQYVDDLLLAATSELDCQQGTRALLQTLGDLGYRASAKKAQICQKQVKYLGYLLKEGQRWLTEARKETVMGQPIPKTPRQLREFLGTAGFCRLWIPGFAEMAAPLYPLTKPGTLFNWGPDQQKAFQEIKQALLTAPALGLPDLTKPFELFVDEKQGYAKGVLTQKLGPWRRPVAYLSKKLDPVAAGWPPCLRMVAAIAVLTKDAGKLTMGQPLVILAPHAVEALVKQPPDRWLSNARMTHYQALLLDTDRVQFGPVVALNPATLLPLPEEGLQHDCLDILAEAHGTRSDLMDQPLPDADHTWYTDGSSFLQEGQRKAGAAVTTETEVIWARALPAGTSAQRAELIALTQALKMAEGKKLNVYTDSRYAFATAHIHGEIYRRRGWLTSEGKEIKNKDEILALLKALFLPKRLSIIHCPGHQKGNSAEARGNRMADQAAREVATRETPETSTLLAGKRTADGSEFEKRTADGSEFESPKKKAKVE

SEQ ID NO: 2249 - protein, 2115 aa, synthetic construct
MPAAKRVKLDGGDKKYSIGLDIGTNSVGWAVITDEYKVPSKKFKVLGNTDRHSIKKNLIGALLFDSGETAEATRLKRTARRRYTRRKNRICYLQEIFSNEMAKVDDSFFHRLEESFLVEEDKKHERHPIFGNIVDEVAYHEKYPTIYHLRKKLVDSTDKADLRLIYLALAHMIKFRGHFLIEGDLNPDNSDVDKLFIQLVQTYNQLFEENPINASGVDAKAILSARLSKSRRLENLIAQLPGEKKNGLFGNLIALSLGLTPNFKSNFDLAEDAKLQLSKDTYDDDLDNLLAQIGDQYADLFLAAKNLSDAILLSDILRVNTEITKAPLSASMIKRYDEHHQDLTLLKALVRQQLPEKYKEIFFDQSKNGYAGYIDGGASQEEFYKFIKPILEKMDGTEELLVKLNREDLLRKQRTFDNGSIPHQIHLGELHAILRRQEDFYPFLKDNREKIEKILTFRIPYYVGPLARGNSRFAWMTRKSEETITPWNFEEVVDKGASAQSFIERMTNFDKNLPNEKVLPKHSLLYEYFTVYNELTKVKYVTEGMRKPAFLSGEQKKAIVDLLFKTNRKVTVKQLKEDYFKKIECFDSVEISGVEDRFNASLGTYHDLLKIIKDKDFLDNEENEDILEDIVLTLTLFEDREMIEERLKTYAHLFDDKVMKQLKRRRYTGWGRLSRKLINGIRDKQSGKTILDFLKSDGFANRNFMQLIHDDSLTFKEDIQKAQVSGQGDSLHEHIANLAGSPAIKKGILQTVKVVDELVKVMGRHKPENIVIEMARENQTTQKGQKNSRERMKRIEEGIKELGSQILKEHPVENTQLQNEKLYLYYLQNGRDMYVDQELDINRLSDYDVDHIVPQSFLKDDSIDNKVLTRSDKARGKSDNVPSEEVVKKMKNYWRQLLNAKLITQRKFDNLTKAERGGLSELDKAGFIKRQLVETRQITKHVAQILDSRMNTKYDENDKLIREVKVITLKSKLVSDFRKDFQFYKVREINNYHHAHDAYLNAVVGTALIKKYPKLESEFVYGDYKVYDVRKMIAKSEQEIGKATAKYFFYSNIMNFFKTEITLANGEIRKRPLIETNGETGEIVWDKGRDFATVRKVLSMPQVNIVKKTEVQTGGFSKESILPKRNSDKLIARKKDWDPKKYGGFDSPTVAYSVLVVAKVEKGKSKKLKSVKELLGITIMERSSFEKNPIDFLEAKGYKEVKKDLIIKLPKYSLFELENGRKRMLASAGELQKGNELALPSKYVNFLYLASHYEKLKGSPEDNEQKQLFVEQHKHYLDEIIEQISEFSKRVILADANLDKVLSAYNKHRDKPIREQAENIIHLFTLTNLGAPAAFKYFDTTIDRKRYTSTKEVLDATLIHQSITGLYETRIDLSQLGGDGGEAAAKEAAAKEAAAKEAAAKEAAAKEAAAKGGTLNIEDEYRLHETSKEPDVSLGSTWLSDFPQAWAETGGMGLAVRQAPLIIPLKATSTPVSIKQYPMSQEARLGIKPHIQRLLDQGILVPCQSPWNTPLLPVKKPGTNDYRPVQDLREVNKRVEDIHPTVPNPYNLLSGLPPSHQWYTVLDLKDAFFCLRLHPTSQPLFAFEWRDPEMGISGQLTWTRLPQGFKNSPTLFNEALHRDLAGFRIQHPDLILLQYVDDLLLAATSELDCQQGTRALLQTLGDLGYRASAKKAQICQKQVKYLGYLLKEGQRWLTEARKETVMGQPIPKTPRQLREFLGTAGFCRLWIPGFAEMAAPLYPLTKPGTLFNWGPDQQKAFQEIKQALLTAPALGLPDLTKPFELFVDEKQGYAKGVLTQKLGPWRRPVAYLSKKLDPVAAGWPPCLRMVAAIAVLTKDAGKLTMGQPLVILAPHAVEALVKQPPDRWLSNARMTHYQALLLDTDRVQFGPVVALNPATLLPLPEEGLQHDCLDILAEAHGTRSDLMDQPLPDADHTWYTDGSSFLQEGQRKAGAAVTTETEVIWARALPAGTSAQRAELIALTQALKMAEGKKLNVYTDSRYAFATAHIHGEIYRRRGWLTSEGKEIKNKDEILALLKALFLPKRLSIIHCPGHQKGNSAEARGNRMADQAAREVATRETPETSTLLAGKRTADGSEFEKRTADGSEFESPKKKAKVE

SEQ ID NO: 2250 - protein, 2097 aa, synthetic construct
MPAAKRVKLDGGDKKYSIGLDIGTNSVGWAVITDEYKVPSKKFKVLGNTDRHSIKKNLIGALLFDSGETAEATRLKRTARRRYTRRKNRICYLQEIFSNEMAKVDDSFFHRLEESFLVEEDKKHERHPIFGNIVDEVAYHEKYPTIYHLRKKLVDSTDKADLRLIYLALAHMIKFRGHFLIEGDLNPDNSDVDKLFIQLVQTYNQLFEENPINASGVDAKAILSARLSKSRRLENLIAQLPGEKKNGLFGNLIALSLGLTPNFKSNFDLAEDAKLQLSKDTYDDDLDNLLAQIGDQYADLFLAAKNLSDAILLSDILRVNTEITKAPLSASMIKRYDEHHQDLTLLKALVRQQLPEKYKEIFFDQSKNGYAGYIDGGASQEEFYKFIKPILEKMDGTEELLVKLNREDLLRKQRTFDNGSIPHQIHLGELHAILRRQEDFYPFLKDNREKIEKILTFRIPYYVGPLARGNSRFAWMTRKSEETITPWNFEEVVDKGASAQSFIERMTNFDKNLPNEKVLPKHSLLYEYFTVYNELTKVKYVTEGMRKPAFLSGEQKKAIVDLLFKTNRKVTVKQLKEDYFKKIECFDSVEISGVEDRFNASLGTYHDLLKIIKDKDFLDNEENEDILEDIVLTLTLFEDREMIEERLKTYAHLFDDKVMKQLKRRRYTGWGRLSRKLINGIRDKQSGKTILDFLKSDGFANRNFMQLIHDDSLTFKEDIQKAQVSGQGDSLHEHIANLAGSPAIKKGILQTVKVVDELVKVMGRHKPENIVIEMARENQTTQKGQKNSRERMKRIEEGIKELGSQILKEHPVENTQLQNEKLYLYYLQNGRDMYVDQELDINRLSDYDVDHIVPQSFLKDDSIDNKVLTRSDKARGKSDNVPSEEVVKKMKNYWRQLLNAKLITQRKFDNLTKAERGGLSELDKAGFIKRQLVETRQITKHVAQILDSRMNTKYDENDKLIREVKVITLKSKLVSDFRKDFQFYKVREINNYHHAHDAYLNAVVGTALIKKYPKLESEFVYGDYKVYDVRKMIAKSEQEIGKATAKYFFYSNIMNFFKTEITLANGEIRKRPLIETNGETGEIVWDKGRDFATVRKVLSMPQVNIVKKTEVQTGGFSKESILPKRNSDKLIARKKDWDPKKYGGFDSPTVAYSVLVVAKVEKGKSKKLKSVKELLGITIMERSSFEKNPIDFLEAKGYKEVKKDLIIKLPKYSLFELENGRKRMLASAGELQKGNELALPSKYVNFLYLASHYEKLKGSPEDNEQKQLFVEQHKHYLDEIIEQISEFSKRVILADANLDKVLSAYNKHRDKPIREQAENIIHLFTLTNLGAPAAFKYFDTTIDRKRYTSTKEVLDATLIHQSITGLYETRIDLSQLGGDGGGGSGGSGGSGGSGGTLNIEDEYRLHETSKEPDVSLGSTWLSDFPQAWAETGGMGLAVRQAPLIIPLKATSTPVSIKQYPMSQEARLGIKPHIQRLLDQGILVPCQSPWNTPLLPVKKPGTNDYRPVQDLREVNKRVEDIHPTVPNPYNLLSGLPPSHQWYTVLDLKDAFFCLRLHPTSQPLFAFEWRDPEMGISGQLTWTRLPQGFKNSPTLFNEALHRDLAGFRIQHPDLILLQYVDDLLLAATSELDCQQGTRALLQTLGDLGYRASAKKAQICQKQVKYLGYLLKEGQRWLTEARKETVMGQPIPKTPRQLREFLGTAGFCRLWIPGFAEMAAPLYPLTKPGTLFNWGPDQQKAFQEIKQALLTAPALGLPDLTKPFELFVDEKQGYAKGVLTQKLGPWRRPVAYLSKKLDPVAAGWPPCLRMVAAIAVLTKDAGKLTMGQPLVILAPHAVEALVKQPPDRWLSNARMTHYQALLLDTDRVQFGPVVALNPATLLPLPEEGLQHDCLDILAEAHGTRSDLMDQPLPDADHTWYTDGSSFLQEGQRKAGAAVTTETEVIWARALPAGTSAQRAELIALTQALKMAEGKKLNVYTDSRYAFATAHIHGEIYRRRGWLTSEGKEIKNKDEILALLKALFLPKRLSIIHCPGHQKGNSAEARGNRMADQAAREVATRETPETSTLLAGKRTADGSEFEKRTADGSEFESPKKKAKVE

SEQ ID NO: 2251 - protein, 2096 aa, synthetic construct
MPAAKRVKLDGGDKKYSIGLDIGTNSVGWAVITDEYKVPSKKFKVLGNTDRHSIKKNLIGALLFDSGETAEATRLKRTARRRYTRRKNRICYLQEIFSNEMAKVDDSFFHRLEESFLVEEDKKHERHPIFGNIVDEVAYHEKYPTIYHLRKKLVDSTDKADLRLIYLALAHMIKFRGHFLIEGDLNPDNSDVDKLFIQLVQTYNQLFEENPINASGVDAKAILSARLSKSRRLENLIAQLPGEKKNGLFGNLIALSLGLTPNFKSNFDLAEDAKLQLSKDTYDDDLDNLLAQIGDQYADLFLAAKNLSDAILLSDILRVNTEITKAPLSASMIKRYDEHHQDLTLLKALVRQQLPEKYKEIFFDQSKNGYAGYIDGGASQEEFYKFIKPILEKMDGTEELLVKLNREDLLRKQRTFDNGSIPHQIHLGELHAILRRQEDFYPFLKDNREKIEKILTFRIPYYVGPLARGNSRFAWMTRKSEETITPWNFEEVVDKGASAQSFIERMTNFDKNLPNEKVLPKHSLLYEYFTVYNELTKVKYVTEGMRKPAFLSGEQKKAIVDLLFKTNRKVTVKQLKEDYFKKIECFDSVEISGVEDRFNASLGTYHDLLKIIKDKDFLDNEENEDILEDIVLTLTLFEDREMIEERLKTYAHLFDDKVMKQLKRRRYTGWGRLSRKLINGIRDKQSGKTILDFLKSDGFANRNFMQLIHDDSLTFKEDIQKAQVSGQGDSLHEHIANLAGSPAIKKGILQTVKVVDELVKVMGRHKPENIVIEMARENQTTQKGQKNSRERMKRIEEGIKELGSQILKEHPVENTQLQNEKLYLYYLQNGRDMYVDQELDINRLSDYDVDHIVPQSFLKDDSIDNKVLTRSDKARGKSDNVPSEEVVKKMKNYWRQLLNAKLITQRKFDNLTKAERGGLSELDKAGFIKRQLVETRQITKHVAQILDSRMNTKYDENDKLIREVKVITLKSKLVSDFRKDFQFYKVREINNYHHAHDAYLNAVVGTALIKKYPKLESEFVYGDYKVYDVRKMIAKSEQEIGKATAKYFFYSNIMNFFKTEITLANGEIRKRPLIETNGETGEIVWDKGRDFATVRKVLSMPQVNIVKKTEVQTGGFSKESILPKRNSDKLIARKKDWDPKKYGGFDSPTVAYSVLVVAKVEKGKSKKLKSVKELLGITIMERSSFEKNPIDFLEAKGYKEVKKDLIIKLPKYSLFELENGRKRMLASAGELQKGNELALPSKYVNFLYLASHYEKLKGSPEDNEQKQLFVEQHKHYLDEIIEQISEFSKRVILADANLDKVLSAYNKHRDKPIREQAENIIHLFTLTNLGAPAAFKYFDTTIDRKRYTSTKEVLDATLIHQSITGLYETRIDLSQLGGDGGGGSEAAAKPAPGGTLNIEDEYRLHETSKEPDVSLGSTWLSDFPQAWAETGGMGLAVRQAPLIIPLKATSTPVSIKQYPMSQEARLGIKPHIQRLLDQGILVPCQSPWNTPLLPVKKPGTNDYRPVQDLREVNKRVEDIHPTVPNPYNLLSGLPPSHQWYTVLDLKDAFFCLRLHPTSQPLFAFEWRDPEMGISGQLTWTRLPQGFKNSPTLFNEALHRDLAGFRIQHPDLILLQYVDDLLLAATSELDCQQGTRALLQTLGDLGYRASAKKAQICQKQVKYLGYLLKEGQRWLTEARKETVMGQPIPKTPRQLREFLGTAGFCRLWIPGFAEMAAPLYPLTKPGTLFNWGPDQQKAFQEIKQALLTAPALGLPDLTKPFELFVDEKQGYAKGVLTQKLGPWRRPVAYLSKKLDPVAAGWPPCLRMVAAIAVLTKDAGKLTMGQPLVILAPHAVEALVKQPPDRWLSNARMTHYQALLLDTDRVQFGPVVALNPATLLPLPEEGLQHDCLDILAEAHGTRSDLMDQPLPDADHTWYTDGSSFLQEGQRKAGAAVTTETEVIWARALPAGTSAQRAELIALTQALKMAEGKKLNVYTDSRYAFATAHIHGEIYRRRGWLTSEGKEIKNKDEILALLKALFLPKRLSIIHCPGHQKGNSAEARGNRMADQAAREVATRETPETSTLLAGKRTADGSEFEKRTADGSEFESPKKKAKVE

SEQ ID NO: 2252 - protein, 2100 aa, synthetic construct
MPAAKRVKLDGGDKKYSIGLDIGTNSVGWAVITDEYKVPSKKFKVLGNTDRHSIKKNLIGALLFDSGETAEATRLKRTARRRYTRRKNRICYLQEIFSNEMAKVDDSFFHRLEESFLVEEDKKHERHPIFGNIVDEVAYHEKYPTIYHLRKKLVDSTDKADLRLIYLALAHMIKFRGHFLIEGDLNPDNSDVDKLFIQLVQTYNQLFEENPINASGVDAKAILSARLSKSRRLENLIAQLPGEKKNGLFGNLIALSLGLTPNFKSNFDLAEDAKLQLSKDTYDDDLDNLLAQIGDQYADLFLAAKNLSDAILLSDILRVNTEITKAPLSASMIKRYDEHHQDLTLLKALVRQQLPEKYKEIFFDQSKNGYAGYIDGGASQEEFYKFIKPILEKMDGTEELLVKLNREDLLRKQRTFDNGSIPHQIHLGELHAILRRQEDFYPFLKDNREKIEKILTFRIPYYVGPLARGNSRFAWMTRKSEETITPWNFEEVVDKGASAQSFIERMTNFDKNLPNEKVLPKHSLLYEYFTVYNELTKVKYVTEGMRKPAFLSGEQKKAIVDLLFKTNRKVTVKQLKEDYFKKIECFDSVEISGVEDRFNASLGTYHDLLKIIKDKDFLDNEENEDILEDIVLTLTLFEDREMIEERLKTYAHLFDDKVMKQLKRRRYTGWGRLSRKLINGIRDKQSGKTILDFLKSDGFANRNFMQLIHDDSLTFKEDIQKAQVSGQGDSLHEHIANLAGSPAIKKGILQTVKVVDELVKVMGRHKPENIVIEMARENQTTQKGQKNSRERMKRIEEGIKELGSQILKEHPVENTQLQNEKLYLYYLQNGRDMYVDQELDINRLSDYDVDHIVPQSFLKDDSIDNKVLTRSDKARGKSDNVPSEEVVKKMKNYWRQLLNAKLITQRKFDNLTKAERGGLSELDKAGFIKRQLVETRQITKHVAQILDSRMNTKYDENDKLIREVKVITLKSKLVSDFRKDFQFYKVREINNYHHAHDAYLNAVVGTALIKKYPKLESEFVYGDYKVYDVRKMIAKSEQEIGKATAKYFFYSNIMNFFKTEITLANGEIRKRPLIETNGETGEIVWDKGRDFATVRKVLSMPQVNIVKKTEVQTGGFSKESILPKRNSDKLIARKKDWDPKKYGGFDSPTVAYSVLVVAKVEKGKSKKLKSVKELLGITIMERSSFEKNPIDFLEAKGYKEVKKDLIIKLPKYSLFELENGRKRMLASAGELQKGNELALPSKYVNFLYLASHYEKLKGSPEDNEQKQLFVEQHKHYLDEIIEQISEFSKRVILADANLDKVLSAYNKHRDKPIREQAENIIHLFTLTNLGAPAAFKYFDTTIDRKRYTSTKEVLDATLIHQSITGLYETRIDLSQLGGDGGEAAAKEAAAKEAAAKGGTLNIEDEYRLHETSKEPDVSLGSTWLSDFPQAWAETGGMGLAVRQAPLIIPLKATSTPVSIKQYPMSQEARLGIKPHIQRLLDQGILVPCQSPWNTPLLPVKKPGTNDYRPVQDLREVNKRVEDIHPTVPNPYNLLSGLPPSHQWYTVLDLKDAFFCLRLHPTSQPLFAFEWRDPEMGISGQLTWTRLPQGFKNSPTLFNEALHRDLAGFRIQHPDLILLQYVDDLLLAATSELDCQQGTRALLQTLGDLGYRASAKKAQICQKQVKYLGYLLKEGQRWLTEARKETVMGQPIPKTPRQLREFLGTAGFCRLWIPGFAEMAAPLYPLTKPGTLFNWGPDQQKAFQEIKQALLTAPALGLPDLTKPFELFVDEKQGYAKGVLTQKLGPWRRPVAYLSKKLDPVAAGWPPCLRMVAAIAVLTKDAGKLTMGQPLVILAPHAVEALVKQPPDRWLSNARMTHYQALLLDTDRVQFGPVVALNPATLLPLPEEGLQHDCLDILAEAHGTRSDLMDQPLPDADHTWYTDGSSFLQEGQRKAGAAVTTETEVIWARALPAGTSAQRAELIALTQALKMAEGKKLNVYTDSRYAFATAHIHGEIYRRRGWLTSEGKEIKNKDEILALLKALFLPKRLSIIHCPGHQKGNSAEARGNRMADQAAREVATRETPETSTLLAGKRTADGSEFEKRTADGSEFESPKKKAKVE

SEQ ID NO: 2253 - protein, 2096 aa, synthetic construct
MPAAKRVKLDGGDKKYSIGLDIGTNSVGWAVITDEYKVPSKKFKVLGNTDRHSIKKNLIGALLFDSGETAEATRLKRTARRRYTRRKNRICYLQEIFSNEMAKVDDSFFHRLEESFLVEEDKKHERHPIFGNIVDEVAYHEKYPTIYHLRKKLVDSTDKADLRLIYLALAHMIKFRGHFLIEGDLNPDNSDVDKLFIQLVQTYNQLFEENPINASGVDAKAILSARLSKSRRLENLIAQLPGEKKNGLFGNLIALSLGLTPNFKSNFDLAEDAKLQLSKDTYDDDLDNLLAQIGDQYADLFLAAKNLSDAILLSDILRVNTEITKAPLSASMIKRYDEHHQDLTLLKALVRQQLPEKYKEIFFDQSKNGYAGYIDGGASQEEFYKFIKPILEKMDGTEELLVKLNREDLLRKQRTFDNGSIPHQIHLGELHAILRRQEDFYPFLKDNREKIEKILTFRIPYYVGPLARGNSRFAWMTRKSEETITPWNFEEVVDKGASAQSFIERMTNFDKNLPNEKVLPKHSLLYEYFTVYNELTKVKYVTEGMRKPAFLSGEQKKAIVDLLFKTNRKVTVKQLKEDYFKKIECFDSVEISGVEDRFNASLGTYHDLLKIIKDKDFLDNEENEDILEDIVLTLTLFEDREMIEERLKTYAHLFDDKVMKQLKRRRYTGWGRLSRKLINGIRDKQSGKTILDFLKSDGFANRNFMQLIHDDSLTFKEDIQKAQVSGQGDSLHEHIANLAGSPAIKKGILQTVKVVDELVKVMGRHKPENIVIEMARENQTTQKGQKNSRERMKRIEEGIKELGSQILKEHPVENTQLQNEKLYLYYLQNGRDMYVDQELDINRLSDYDVDHIVPQSFLKDDSIDNKVLTRSDKARGKSDNVPSEEVVKKMKNYWRQLLNAKLITQRKFDNLTKAERGGLSELDKAGFIKRQLVETRQITKHVAQILDSRMNTKYDENDKLIREVKVITLKSKLVSDFRKDFQFYKVREINNYHHAHDAYLNAVVGTALIKKYPKLESEFVYGDYKVYDVRKMIAKSEQEIGKATAKYFFYSNIMNFFKTEITLANGEIRKRPLIETNGETGEIVWDKGRDFATVRKVLSMPQVNIVKKTEVQTGGFSKESILPKRNSDKLIARKKDWDPKKYGGFDSPTVAYSVLVVAKVEKGKSKKLKSVKELLGITIMERSSFEKNPIDFLEAKGYKEVKKDLIIKLPKYSLFELENGRKRMLASAGELQKGNELALPSKYVNFLYLASHYEKLKGSPEDNEQKQLFVEQHKHYLDEIIEQISEFSKRVILADANLDKVLSAYNKHRDKPIREQAENIIHLFTLTNLGAPAAFKYFDTTIDRKRYTSTKEVLDATLIHQSITGLYETRIDLSQLGGDGGPAPEAAAKGSSGGTLNIEDEYRLHETSKEPDVSLGSTWLSDFPQAWAETGGMGLAVRQAPLIIPLKATSTPVSIKQYPMSQEARLGIKPHIQRLLDQGILVPCQSPWNTPLLPVKKPGTNDYRPVQDLREVNKRVEDIHPTVPNPYNLLSGLPPSHQWYTVLDLKDAFFCLRLHPTSQPLFAFEWRDPEMGISGQLTWTRLPQGFKNSPTLFNEALHRDLAGFRIQHPDLILLQYVDDLLLAATSELDCQQGTRALLQTLGDLGYRASAKKAQICQKQVKYLGYLLKEGQRWLTEARKETVMGQPIPKTPRQLREFLGTAGFCRLWIPGFAEMAAPLYPLTKPGTLFNWGPDQQKAFQEIKQALLTAPALGLPDLTKPFELFVDEKQGYAKGVLTQKLGPWRRPVAYLSKKLDPVAAGWPPCLRMVAAIAVLTKDAGKLTMGQPLVILAPHAVEALVKQPPDRWLSNARMTHYQALLLDTDRVQFGPVVALNPATLLPLPEEGLQHDCLDILAEAHGTRSDLMDQPLPDADHTWYTDGSSFLQEGQRKAGAAVTTETEVIWARALPAGTSAQRAELIALTQALKMAEGKKLNVYTDSRYAFATAHIHGEIYRRRGWLTSEGKEIKNKDEILALLKALFLPKRLSIIHCPGHQKGNSAEARGNRMADQAAREVATRETPETSTLLAGKRTADGSEFEKRTADGSEFESPKKKAKVE

SEQ ID NO: 2254 - protein, 2090 aa, synthetic construct
MPAAKRVKLDGGDKKYSIGLDIGTNSVGWAVITDEYKVPSKKFKVLGNTDRHSIKKNLIGALLFDSGETAEATRLKRTARRRYTRRKNRICYLQEIFSNEMAKVDDSFFHRLEESFLVEEDKKHERHPIFGNIVDEVAYHEKYPTIYHLRKKLVDSTDKADLRLIYLALAHMIKFRGHFLIEGDLNPDNSDVDKLFIQLVQTYNQLFEENPINASGVDAKAILSARLSKSRRLENLIAQLPGEKKNGLFGNLIALSLGLTPNFKSNFDLAEDAKLQLSKDTYDDDLDNLLAQIGDQYADLFLAAKNLSDAILLSDILRVNTEITKAPLSASMIKRYDEHHQDLTLLKALVRQQLPEKYKEIFFDQSKNGYAGYIDGGASQEEFYKFIKPILEKMDGTEELLVKLNREDLLRKQRTFDNGSIPHQIHLGELHAILRRQEDFYPFLKDNREKIEKILTFRIPYYVGPLARGNSRFAWMTRKSEETITPWNFEEVVDKGASAQSFIERMTNFDKNLPNEKVLPKHSLLYEYFTVYNELTKVKYVTEGMRKPAFLSGEQKKAIVDLLFKTNRKVTVKQLKEDYFKKIECFDSVEISGVEDRFNASLGTYHDLLKIIKDKDFLDNEENEDILEDIVLTLTLFEDREMIEERLKTYAHLFDDKVMKQLKRRRYTGWGRLSRKLINGIRDKQSGKTILDFLKSDGFANRNFMQLIHDDSLTFKEDIQKAQVSGQGDSLHEHIANLAGSPAIKKGILQTVKVVDELVKVMGRHKPENIVIEMARENQTTQKGQKNSRERMKRIEEGIKELGSQILKEHPVENTQLQNEKLYLYYLQNGRDMYVDQELDINRLSDYDVDHIVPQSFLKDDSIDNKVLTRSDKARGKSDNVPSEEVVKKMKNYWRQLLNAKLITQRKFDNLTKAERGGLSELDKAGFIKRQLVETRQITKHVAQILDSRMNTKYDENDKLIREVKVITLKSKLVSDFRKDFQFYKVREINNYHHAHDAYLNAVVGTALIKKYPKLESEFVYGDYKVYDVRKMIAKSEQEIGKATAKYFFYSNIMNFFKTEITLANGEIRKRPLIETNGETGEIVWDKGRDFATVRKVLSMPQVNIVKKTEVQTGGFSKESILPKRNSDKLIARKKDWDPKKYGGFDSPTVAYSVLVVAKVEKGKSKKLKSVKELLGITIMERSSFEKNPIDFLEAKGYKEVKKDLIIKLPKYSLFELENGRKRMLASAGELQKGNELALPSKYVNFLYLASHYEKLKGSPEDNEQKQLFVEQHKHYLDEIIEQISEFSKRVILADANLDKVLSAYNKHRDKPIREQAENIIHLFTLTNLGAPAAFKYFDTTIDRKRYTSTKEVLDATLIHQSITGLYETRIDLSQLGGDGGGGGGGGGTLNIEDEYRLHETSKEPDVSLGSTWLSDFPQAWAETGGMGLAVRQAPLIIPLKATSTPVSIKQYPMSQEARLGIKPHIQRLLDQGILVPCQSPWNTPLLPVKKPGTNDYRPVQDLREVNKRVEDIHPTVPNPYNLLSGLPPSHQWYTVLDLKDAFFCLRLHPTSQPLFAFEWRDPEMGISGQLTWTRLPQGFKNSPTLFNEALHRDLAGFRIQHPDLILLQYVDDLLLAATSELDCQQGTRALLQTLGDLGYRASAKKAQICQKQVKYLGYLLKEGQRWLTEARKETVMGQPIPKTPRQLREFLGTAGFCRLWIPGFAEMAAPLYPLTKPGTLFNWGPDQQKAFQEIKQALLTAPALGLPDLTKPFELFVDEKQGYAKGVLTQKLGPWRRPVAYLSKKLDPVAAGWPPCLRMVAAIAVLTKDAGKLTMGQPLVILAPHAVEALVKQPPDRWLSNARMTHYQALLLDTDRVQFGPVVALNPATLLPLPEEGLQHDCLDILAEAHGTRSDLMDQPLPDADHTWYTDGSSFLQEGQRKAGAAVTTETEVIWARALPAGTSAQRAELIALTQALKMAEGKKLNVYTDSRYAFATAHIHGEIYRRRGWLTSEGKEIKNKDEILALLKALFLPKRLSIIHCPGHQKGNSAEARGNRMADQAAREVATRETPETSTLLAGKRTADGSEFEKRTADGSEFESPKKKAKVE

SEQ ID NO: 2255 - protein, 2096 aa, synthetic construct
MPAAKRVKLDGGDKKYSIGLDIGTNSVGWAVITDEYKVPSKKFKVLGNTDRHSIKKNLIGALLFDSGETAEATRLKRTARRRYTRRKNRICYLQEIFSNEMAKVDDSFFHRLEESFLVEEDKKHERHPIFGNIVDEVAYHEKYPTIYHLRKKLVDSTDKADLRLIYLALAHMIKFRGHFLIEGDLNPDNSDVDKLFIQLVQTYNQLFEENPINASGVDAKAILSARLSKSRRLENLIAQLPGEKKNGLFGNLIALSLGLTPNFKSNFDLAEDAKLQLSKDTYDDDLDNLLAQIGDQYADLFLAAKNLSDAILLSDILRVNTEITKAPLSASMIKRYDEHHQDLTLLKALVRQQLPEKYKEIFFDQSKNGYAGYIDGGASQEEFYKFIKPILEKMDGTEELLVKLNREDLLRKQRTFDNGSIPHQIHLGELHAILRRQEDFYPFLKDNREKIEKILTFRIPYYVGPLARGNSRFAWMTRKSEETITPWNFEEVVDKGASAQSFIERMTNFDKNLPNEKVLPKHSLLYEYFTVYNELTKVKYVTEGMRKPAFLSGEQKKAIVDLLFKTNRKVTVKQLKEDYFKKIECFDSVEISGVEDRFNASLGTYHDLLKIIKDKDFLDNEENEDILEDIVLTLTLFEDREMIEERLKTYAHLFDDKVMKQLKRRRYTGWGRLSRKLINGIRDKQSGKTILDFLKSDGFANRNFMQLIHDDSLTFKEDIQKAQVSGQGDSLHEHIANLAGSPAIKKGILQTVKVVDELVKVMGRHKPENIVIEMARENQTTQKGQKNSRERMKRIEEGIKELGSQILKEHPVENTQLQNEKLYLYYLQNGRDMYVDQELDINRLSDYDVDHIVPQSFLKDDSIDNKVLTRSDKARGKSDNVPSEEVVKKMKNYWRQLLNAKLITQRKFDNLTKAERGGLSELDKAGFIKRQLVETRQITKHVAQILDSRMNTKYDENDKLIREVKVITLKSKLVSDFRKDFQFYKVREINNYHHAHDAYLNAVVGTALIKKYPKLESEFVYGDYKVYDVRKMIAKSEQEIGKATAKYFFYSNIMNFFKTEITLANGEIRKRPLIETNGETGEIVWDKGRDFATVRKVLSMPQVNIVKKTEVQTGGFSKESILPKRNSDKLIARKKDWDPKKYGGFDSPTVAYSVLVVAKVEKGKSKKLKSVKELLGITIMERSSFEKNPIDFLEAKGYKEVKKDLIIKLPKYSLFELENGRKRMLASAGELQKGNELALPSKYVNFLYLASHYEKLKGSPEDNEQKQLFVEQHKHYLDEIIEQISEFSKRVILADANLDKVLSAYNKHRDKPIREQAENIIHLFTLTNLGAPAAFKYFDTTIDRKRYTSTKEVLDATLIHQSITGLYETRIDLSQLGGDGGEAAAKPAPGSSGGTLNIEDEYRLHETSKEPDVSLGSTWLSDFPQAWAETGGMGLAVRQAPLIIPLKATSTPVSIKQYPMSQEARLGIKPHIQRLLDQGILVPCQSPWNTPLLPVKKPGTNDYRPVQDLREVNKRVEDIHPTVPNPYNLLSGLPPSHQWYTVLDLKDAFFCLRLHPTSQPLFAFEWRDPEMGISGQLTWTRLPQGFKNSPTLFNEALHRDLAGFRIQHPDLILLQYVDDLLLAATSELDCQQGTRALLQTLGDLGYRASAKKAQICQKQVKYLGYLLKEGQRWLTEARKETVMGQPIPKTPRQLREFLGTAGFCRLWIPGFAEMAAPLYPLTKPGTLFNWGPDQQKAFQEIKQALLTAPALGLPDLTKPFELFVDEKQGYAKGVLTQKLGPWRRPVAYLSKKLDPVAAGWPPCLRMVAAIAVLTKDAGKLTMGQPLVILAPHAVEALVKQPPDRWLSNARMTHYQALLLDTDRVQFGPVVALNPATLLPLPEEGLQHDCLDILAEAHGTRSDLMDQPLPDADHTWYTDGSSFLQEGQRKAGAAVTTETEVIWARALPAGTSAQRAELIALTQALKMAEGKKLNVYTDSRYAFATAHIHGEIYRRRGWLTSEGKEIKNKDEILALLKALFLPKRLSIIHCPGHQKGNSAEARGNRMADQAAREVATRETPETSTLLAGKRTADGSEFEKRTADGSEFESPKKKAKVE

SEQ ID NO: 2256 - protein, 2096 aa, synthetic construct
MPAAKRVKLDGGDKKYSIGLDIGTNSVGWAVITDEYKVPSKKFKVLGNTDRHSIKKNLIGALLFDSGETAEATRLKRTARRRYTRRKNRICYLQEIFSNEMAKVDDSFFHRLEESFLVEEDKKHERHPIFGNIVDEVAYHEKYPTIYHLRKKLVDSTDKADLRLIYLALAHMIKFRGHFLIEGDLNPDNSDVDKLFIQLVQTYNQLFEENPINASGVDAKAILSARLSKSRRLENLIAQLPGEKKNGLFGNLIALSLGLTPNFKSNFDLAEDAKLQLSKDTYDDDLDNLLAQIGDQYADLFLAAKNLSDAILLSDILRVNTEITKAPLSASMIKRYDEHHQDLTLLKALVRQQLPEKYKEIFFDQSKNGYAGYIDGGASQEEFYKFIKPILEKMDGTEELLVKLNREDLLRKQRTFDNGSIPHQIHLGELHAILRRQEDFYPFLKDNREKIEKILTFRIPYYVGPLARGNSRFAWMTRKSEETITPWNFEEVVDKGASAQSFIERMTNFDKNLPNEKVLPKHSLLYEYFTVYNELTKVKYVTEGMRKPAFLSGEQKKAIVDLLFKTNRKVTVKQLKEDYFKKIECFDSVEISGVEDRFNASLGTYHDLLKIIKDKDFLDNEENEDILEDIVLTLTLFEDREMIEERLKTYAHLFDDKVMKQLKRRRYTGWGRLSRKLINGIRDKQSGKTILDFLKSDGFANRNFMQLIHDDSLTFKEDIQKAQVSGQGDSLHEHIANLAGSPAIKKGILQTVKVVDELVKVMGRHKPENIVIEMARENQTTQKGQKNSRERMKRIEEGIKELGSQILKEHPVENTQLQNEKLYLYYLQNGRDMYVDQELDINRLSDYDVDHIVPQSFLKDDSIDNKVLTRSDKARGKSDNVPSEEVVKKMKNYWRQLLNAKLITQRKFDNLTKAERGGLSELDKAGFIKRQLVETRQITKHVAQILDSRMNTKYDENDKLIREVKVITLKSKLVSDFRKDFQFYKVREINNYHHAHDAYLNAVVGTALIKKYPKLESEFVYGDYKVYDVRKMIAKSEQEIGKATAKYFFYSNIMNFFKTEITLANGEIRKRPLIETNGETGEIVWDKGRDFATVRKVLSMPQVNIVKKTEVQTGGFSKESILPKRNSDKLIARKKDWDPKKYGGFDSPTVAYSVLVVAKVEKGKSKKLKSVKELLGITIMERSSFEKNPIDFLEAKGYKEVKKDLIIKLPKYSLFELENGRKRMLASAGELQKGNELALPSKYVNFLYLASHYEKLKGSPEDNEQKQLFVEQHKHYLDEIIEQISEFSKRVILADANLDKVLSAYNKHRDKPIREQAENIIHLFTLTNLGAPAAFKYFDTTIDRKRYTSTKEVLDATLIHQSITGLYETRIDLSQLGGDGGEAAAKGGGGGSGGTLNIEDEYRLHETSKEPDVSLGSTWLSDFPQAWAETGGMGLAVRQAPLIIPLKATSTPVSIKQYPMSQEARLGIKPHIQRLLDQGILVPCQSPWNTPLLPVKKPGTNDYRPVQDLREVNKRVEDIHPTVPNPYNLLSGLPPSHQWYTVLDLKDAFFCLRLHPTSQPLFAFEWRDPEMGISGQLTWTRLPQGFKNSPTLFNEALHRDLAGFRIQHPDLILLQYVDDLLLAATSELDCQQGTRALLQTLGDLGYRASAKKAQICQKQVKYLGYLLKEGQRWLTEARKETVMGQPIPKTPRQLREFLGTAGFCRLWIPGFAEMAAPLYPLTKPGTLFNWGPDQQKAFQEIKQALLTAPALGLPDLTKPFELFVDEKQGYAKGVLTQKLGPWRRPVAYLSKKLDPVAAGWPPCLRMVAAIAVLTKDAGKLTMGQPLVILAPHAVEALVKQPPDRWLSNARMTHYQALLLDTDRVQFGPVVALNPATLLPLPEEGLQHDCLDILAEAHGTRSDLMDQPLPDADHTWYTDGSSFLQEGQRKAGAAVTTETEVIWARALPAGTSAQRAELIALTQALKMAEGKKLNVYTDSRYAFATAHIHGEIYRRRGWLTSEGKEIKNKDEILALLKALFLPKRLSIIHCPGHQKGNSAEARGNRMADQAAREVATRETPETSTLLAGKRTADGSEFEKRTADGSEFESPKKKAKVE

SEQ ID NO: 2257 - protein, 2096 aa, synthetic construct
MPAAKRVKLDGGDKKYSIGLDIGTNSVGWAVITDEYKVPSKKFKVLGNTDRHSIKKNLIGALLFDSGETAEATRLKRTARRRYTRRKNRICYLQEIFSNEMAKVDDSFFHRLEESFLVEEDKKHERHPIFGNIVDEVAYHEKYPTIYHLRKKLVDSTDKADLRLIYLALAHMIKFRGHFLIEGDLNPDNSDVDKLFIQLVQTYNQLFEENPINASGVDAKAILSARLSKSRRLENLIAQLPGEKKNGLFGNLIALSLGLTPNFKSNFDLAEDAKLQLSKDTYDDDLDNLLAQIGDQYADLFLAAKNLSDAILLSDILRVNTEITKAPLSASMIKRYDEHHQDLTLLKALVRQQLPEKYKEIFFDQSKNGYAGYIDGGASQEEFYKFIKPILEKMDGTEELLVKLNREDLLRKQRTFDNGSIPHQIHLGELHAILRRQEDFYPFLKDNREKIEKILTFRIPYYVGPLARGNSRFAWMTRKSEETITPWNFEEVVDKGASAQSFIERMTNFDKNLPNEKVLPKHSLLYEYFTVYNELTKVKYVTEGMRKPAFLSGEQKKAIVDLLFKTNRKVTVKQLKEDYFKKIECFDSVEISGVEDRFNASLGTYHDLLKIIKDKDFLDNEENEDILEDIVLTLTLFEDREMIEERLKTYAHLFDDKVMKQLKRRRYTGWGRLSRKLINGIRDKQSGKTILDFLKSDGFANRNFMQLIHDDSLTFKEDIQKAQVSGQGDSLHEHIANLAGSPAIKKGILQTVKVVDELVKVMGRHKPENIVIEMARENQTTQKGQKNSRERMKRIEEGIKELGSQILKEHPVENTQLQNEKLYLYYLQNGRDMYVDQELDINRLSDYDVDHIVPQSFLKDDSIDNKVLTRSDKARGKSDNVPSEEVVKKMKNYWRQLLNAKLITQRKFDNLTKAERGGLSELDKAGFIKRQLVETRQITKHVAQILDSRMNTKYDENDKLIREVKVITLKSKLVSDFRKDFQFYKVREINNYHHAHDAYLNAVVGTALIKKYPKLESEFVYGDYKVYDVRKMIAKSEQEIGKATAKYFFYSNIMNFFKTEITLANGEIRKRPLIETNGETGEIVWDKGRDFATVRKVLSMPQVNIVKKTEVQTGGFSKESILPKRNSDKLIARKKDWDPKKYGGFDSPTVAYSVLVVAKVEKGKSKKLKSVKELLGITIMERSSFEKNPIDFLEAKGYKEVKKDLIIKLPKYSLFELENGRKRMLASAGELQKGNELALPSKYVNFLYLASHYEKLKGSPEDNEQKQLFVEQHKHYLDEIIEQISEFSKRVILADANLDKVLSAYNKHRDKPIREQAENIIHLFTLTNLGAPAAFKYFDTTIDRKRYTSTKEVLDATLIHQSITGLYETRIDLSQLGGDGGEAAAKGGSPAPGGTLNIEDEYRLHETSKEPDVSLGSTWLSDFPQAWAETGGMGLAVRQAPLIIPLKATSTPVSIKQYPMSQEARLGIKPHIQRLLDQGILVPCQSPWNTPLLPVKKPGTNDYRPVQDLREVNKRVEDIHPTVPNPYNLLSGLPPSHQWYTVLDLKDAFFCLRLHPTSQPLFAFEWRDPEMGISGQLTWTRLPQGFKNSPTLFNEALHRDLAGFRIQHPDLILLQYVDDLLLAATSELDCQQGTRALLQTLGDLGYRASAKKAQICQKQVKYLGYLLKEGQRWLTEARKETVMGQPIPKTPRQLREFLGTAGFCRLWIPGFAEMAAPLYPLTKPGTLFNWGPDQQKAFQEIKQALLTAPALGLPDLTKPFELFVDEKQGYAKGVLTQKLGPWRRPVAYLSKKLDPVAAGWPPCLRMVAAIAVLTKDAGKLTMGQPLVILAPHAVEALVKQPPDRWLSNARMTHYQALLLDTDRVQFGPVVALNPATLLPLPEEGLQHDCLDILAEAHGTRSDLMDQPLPDADHTWYTDGSSFLQEGQRKAGAAVTTETEVIWARALPAGTSAQRAELIALTQALKMAEGKKLNVYTDSRYAFATAHIHGEIYRRRGWLTSEGKEIKNKDEILALLKALFLPKRLSIIHCPGHQKGNSAEARGNRMADQAAREVATRETPETSTLLAGKRTADGSEFEKRTADGSEFESPKKKAKVE

SEQ ID NO: 2258 - protein, 2088 aa, synthetic construct
MPAAKRVKLDGGDKKYSIGLDIGTNSVGWAVITDEYKVPSKKFKVLGNTDRHSIKKNLIGALLFDSGETAEATRLKRTARRRYTRRKNRICYLQEIFSNEMAKVDDSFFHRLEESFLVEEDKKHERHPIFGNIVDEVAYHEKYPTIYHLRKKLVDSTDKADLRLIYLALAHMIKFRGHFLIEGDLNPDNSDVDKLFIQLVQTYNQLFEENPINASGVDAKAILSARLSKSRRLENLIAQLPGEKKNGLFGNLIALSLGLTPNFKSNFDLAEDAKLQLSKDTYDDDLDNLLAQIGDQYADLFLAAKNLSDAILLSDILRVNTEITKAPLSASMIKRYDEHHQDLTLLKALVRQQLPEKYKEIFFDQSKNGYAGYIDGGASQEEFYKFIKPILEKMDGTEELLVKLNREDLLRKQRTFDNGSIPHQIHLGELHAILRRQEDFYPFLKDNREKIEKILTFRIPYYVGPLARGNSRFAWMTRKSEETITPWNFEEVVDKGASAQSFIERMTNFDKNLPNEKVLPKHSLLYEYFTVYNELTKVKYVTEGMRKPAFLSGEQKKAIVDLLFKTNRKVTVKQLKEDYFKKIECFDSVEISGVEDRFNASLGTYHDLLKIIKDKDFLDNEENEDILEDIVLTLTLFEDREMIEERLKTYAHLFDDKVMKQLKRRRYTGWGRLSRKLINGIRDKQSGKTILDFLKSDGFANRNFMQLIHDDSLTFKEDIQKAQVSGQGDSLHEHIANLAGSPAIKKGILQTVKVVDELVKVMGRHKPENIVIEMARENQTTQKGQKNSRERMKRIEEGIKELGSQILKEHPVENTQLQNEKLYLYYLQNGRDMYVDQELDINRLSDYDVDHIVPQSFLKDDSIDNKVLTRSDKARGKSDNVPSEEVVKKMKNYWRQLLNAKLITQRKFDNLTKAERGGLSELDKAGFIKRQLVETRQITKHVAQILDSRMNTKYDENDKLIREVKVITLKSKLVSDFRKDFQFYKVREINNYHHAHDAYLNAVVGTALIKKYPKLESEFVYGDYKVYDVRKMIAKSEQEIGKATAKYFFYSNIMNFFKTEITLANGEIRKRPLIETNGETGEIVWDKGRDFATVRKVLSMPQVNIVKKTEVQTGGFSKESILPKRNSDKLIARKKDWDPKKYGGFDSPTVAYSVLVVAKVEKGKSKKLKSVKELLGITIMERSSFEKNPIDFLEAKGYKEVKKDLIIKLPKYSLFELENGRKRMLASAGELQKGNELALPSKYVNFLYLASHYEKLKGSPEDNEQKQLFVEQHKHYLDEIIEQISEFSKRVILADANLDKVLSAYNKHRDKPIREQAENIIHLFTLTNLGAPAAFKYFDTTIDRKRYTSTKEVLDATLIHQSITGLYETRIDLSQLGGDGGPAPGGTLNIEDEYRLHETSKEPDVSLGSTWLSDFPQAWAETGGMGLAVRQAPLIIPLKATSTPVSIKQYPMSQEARLGIKPHIQRLLDQGILVPCQSPWNTPLLPVKKPGTNDYRPVQDLREVNKRVEDIHPTVPNPYNLLSGLPPSHQWYTVLDLKDAFFCLRLHPTSQPLFAFEWRDPEMGISGQLTWTRLPQGFKNSPTLFNEALHRDLAGFRIQHPDLILLQYVDDLLLAATSELDCQQGTRALLQTLGDLGYRASAKKAQICQKQVKYLGYLLKEGQRWLTEARKETVMGQPIPKTPRQLREFLGTAGFCRLWIPGFAEMAAPLYPLTKPGTLFNWGPDQQKAFQEIKQALLTAPALGLPDLTKPFELFVDEKQGYAKGVLTQKLGPWRRPVAYLSKKLDPVAAGWPPCLRMVAAIAVLTKDAGKLTMGQPLVILAPHAVEALVKQPPDRWLSNARMTHYQALLLDTDRVQFGPVVALNPATLLPLPEEGLQHDCLDILAEAHGTRSDLMDQPLPDADHTWYTDGSSFLQEGQRKAGAAVTTETEVIWARALPAGTSAQRAELIALTQALKMAEGKKLNVYTDSRYAFATAHIHGEIYRRRGWLTSEGKEIKNKDEILALLKALFLPKRLSIIHCPGHQKGNSAEARGNRMADQAAREVATRETPETSTLLAGKRTADGSEFEKRTADGSEFESPKKKAKVE

SEQ ID NO: 2259 - protein, 2094 aa, synthetic construct
MPAAKRVKLDGGDKKYSIGLDIGTNSVGWAVITDEYKVPSKKFKVLGNTDRHSIKKNLIGALLFDSGETAEATRLKRTARRRYTRRKNRICYLQEIFSNEMAKVDDSFFHRLEESFLVEEDKKHERHPIFGNIVDEVAYHEKYPTIYHLRKKLVDSTDKADLRLIYLALAHMIKFRGHFLIEGDLNPDNSDVDKLFIQLVQTYNQLFEENPINASGVDAKAILSARLSKSRRLENLIAQLPGEKKNGLFGNLIALSLGLTPNFKSNFDLAEDAKLQLSKDTYDDDLDNLLAQIGDQYADLFLAAKNLSDAILLSDILRVNTEITKAPLSASMIKRYDEHHQDLTLLKALVRQQLPEKYKEIFFDQSKNGYAGYIDGGASQEEFYKFIKPILEKMDGTEELLVKLNREDLLRKQRTFDNGSIPHQIHLGELHAILRRQEDFYPFLKDNREKIEKILTFRIPYYVGPLARGNSRFAWMTRKSEETITPWNFEEVVDKGASAQSFIERMTNFDKNLPNEKVLPKHSLLYEYFTVYNELTKVKYVTEGMRKPAFLSGEQKKAIVDLLFKTNRKVTVKQLKEDYFKKIECFDSVEISGVEDRFNASLGTYHDLLKIIKDKDFLDNEENEDILEDIVLTLTLFEDREMIEERLKTYAHLFDDKVMKQLKRRRYTGWGRLSRKLINGIRDKQSGKTILDFLKSDGFANRNFMQLIHDDSLTFKEDIQKAQVSGQGDSLHEHIANLAGSPAIKKGILQTVKVVDELVKVMGRHKPENIVIEMARENQTTQKGQKNSRERMKRIEEGIKELGSQILKEHPVENTQLQNEKLYLYYLQNGRDMYVDQELDINRLSDYDVDHIVPQSFLKDDSIDNKVLTRSDKARGKSDNVPSEEVVKKMKNYWRQLLNAKLITQRKFDNLTKAERGGLSELDKAGFIKRQLVETRQITKHVAQILDSRMNTKYDENDKLIREVKVITLKSKLVSDFRKDFQFYKVREINNYHHAHDAYLNAVVGTALIKKYPKLESEFVYGDYKVYDVRKMIAKSEQEIGKATAKYFFYSNIMNFFKTEITLANGEIRKRPLIETNGETGEIVWDKGRDFATVRKVLSMPQVNIVKKTEVQTGGFSKESILPKRNSDKLIARKKDWDPKKYGGFDSPTVAYSVLVVAKVEKGKSKKLKSVKELLGITIMERSSFEKNPIDFLEAKGYKEVKKDLIIKLPKYSLFELENGRKRMLASAGELQKGNELALPSKYVNFLYLASHYEKLKGSPEDNEQKQLFVEQHKHYLDEIIEQISEFSKRVILADANLDKVLSAYNKHRDKPIREQAENIIHLFTLTNLGAPAAFKYFDTTIDRKRYTSTKEVLDATLIHQSITGLYETRIDLSQLGGDGGGGSGGGPAPGGTLNIEDEYRLHETSKEPDVSLGSTWLSDFPQAWAETGGMGLAVRQAPLIIPLKATSTPVSIKQYPMSQEARLGIKPHIQRLLDQGILVPCQSPWNTPLLPVKKPGTNDYRPVQDLREVNKRVEDIHPTVPNPYNLLSGLPPSHQWYTVLDLKDAFFCLRLHPTSQPLFAFEWRDPEMGISGQLTWTRLPQGFKNSPTLFNEALHRDLAGFRIQHPDLILLQYVDDLLLAATSELDCQQGTRALLQTLGDLGYRASAKKAQICQKQVKYLGYLLKEGQRWLTEARKETVMGQPIPKTPRQLREFLGTAGFCRLWIPGFAEMAAPLYPLTKPGTLFNWGPDQQKAFQEIKQALLTAPALGLPDLTKPFELFVDEKQGYAKGVLTQKLGPWRRPVAYLSKKLDPVAAGWPPCLRMVAAIAVLTKDAGKLTMGQPLVILAPHAVEALVKQPPDRWLSNARMTHYQALLLDTDRVQFGPVVALNPATLLPLPEEGLQHDCLDILAEAHGTRSDLMDQPLPDADHTWYTDGSSFLQEGQRKAGAAVTTETEVIWARALPAGTSAQRAELIALTQALKMAEGKKLNVYTDSRYAFATAHIHGEIYRRRGWLTSEGKEIKNKDEILALLKALFLPKRLSIIHCPGHQKGNSAEARGNRMADQAAREVATRETPETSTLLAGKRTADGSEFEKRTADGSEFESPKKKAKVE

SEQ ID NO: 2260 - protein, 2094 aa, synthetic construct
MPAAKRVKLDGGDKKYSIGLDIGTNSVGWAVITDEYKVPSKKFKVLGNTDRHSIKKNLIGALLFDSGETAEATRLKRTARRRYTRRKNRICYLQEIFSNEMAKVDDSFFHRLEESFLVEEDKKHERHPIFGNIVDEVAYHEKYPTIYHLRKKLVDSTDKADLRLIYLALAHMIKFRGHFLIEGDLNPDNSDVDKLFIQLVQTYNQLFEENPINASGVDAKAILSARLSKSRRLENLIAQLPGEKKNGLFGNLIALSLGLTPNFKSNFDLAEDAKLQLSKDTYDDDLDNLLAQIGDQYADLFLAAKNLSDAILLSDILRVNTEITKAPLSASMIKRYDEHHQDLTLLKALVRQQLPEKYKEIFFDQSKNGYAGYIDGGASQEEFYKFIKPILEKMDGTEELLVKLNREDLLRKQRTFDNGSIPHQIHLGELHAILRRQEDFYPFLKDNREKIEKILTFRIPYYVGPLARGNSRFAWMTRKSEETITPWNFEEVVDKGASAQSFIERMTNFDKNLPNEKVLPKHSLLYEYFTVYNELTKVKYVTEGMRKPAFLSGEQKKAIVDLLFKTNRKVTVKQLKEDYFKKIECFDSVEISGVEDRFNASLGTYHDLLKIIKDKDFLDNEENEDILEDIVLTLTLFEDREMIEERLKTYAHLFDDKVMKQLKRRRYTGWGRLSRKLINGIRDKQSGKTILDFLKSDGFANRNFMQLIHDDSLTFKEDIQKAQVSGQGDSLHEHIANLAGSPAIKKGILQTVKVVDELVKVMGRHKPENIVIEMARENQTTQKGQKNSRERMKRIEEGIKELGSQILKEHPVENTQLQNEKLYLYYLQNGRDMYVDQELDINRLSDYDVDHIVPQSFLKDDSIDNKVLTRSDKARGKSDNVPSEEVVKKMKNYWRQLLNAKLITQRKFDNLTKAERGGLSELDKAGFIKRQLVETRQITKHVAQILDSRMNTKYDENDKLIREVKVITLKSKLVSDFRKDFQFYKVREINNYHHAHDAYLNAVVGTALIKKYPKLESEFVYGDYKVYDVRKMIAKSEQEIGKATAKYFFYSNIMNFFKTEITLANGEIRKRPLIETNGETGEIVWDKGRDFATVRKVLSMPQVNIVKKTEVQTGGFSKESILPKRNSDKLIARKKDWDPKKYGGFDSPTVAYSVLVVAKVEKGKSKKLKSVKELLGITIMERSSFEKNPIDFLEAKGYKEVKKDLIIKLPKYSLFELENGRKRMLASAGELQKGNELALPSKYVNFLYLASHYEKLKGSPEDNEQKQLFVEQHKHYLDEIIEQISEFSKRVILADANLDKVLSAYNKHRDKPIREQAENIIHLFTLTNLGAPAAFKYFDTTIDRKRYTSTKEVLDATLIHQSITGLYETRIDLSQLGGDGGGGSPAPGSSGGTLNIEDEYRLHETSKEPDVSLGSTWLSDFPQAWAETGGMGLAVRQAPLIIPLKATSTPVSIKQYPMSQEARLGIKPHIQRLLDQGILVPCQSPWNTPLLPVKKPGTNDYRPVQDLREVNKRVEDIHPTVPNPYNLLSGLPPSHQWYTVLDLKDAFFCLRLHPTSQPLFAFEWRDPEMGISGQLTWTRLPQGFKNSPTLFNEALHRDLAGFRIQHPDLILLQYVDDLLLAATSELDCQQGTRALLQTLGDLGYRASAKKAQICQKQVKYLGYLLKEGQRWLTEARKETVMGQPIPKTPRQLREFLGTAGFCRLWIPGFAEMAAPLYPLTKPGTLFNWGPDQQKAFQEIKQALLTAPALGLPDLTKPFELFVDEKQGYAKGVLTQKLGPWRRPVAYLSKKLDPVAAGWPPCLRMVAAIAVLTKDAGKLTMGQPLVILAPHAVEALVKQPPDRWLSNARMTHYQALLLDTDRVQFGPVVALNPATLLPLPEEGLQHDCLDILAEAHGTRSDLMDQPLPDADHTWYTDGSSFLQEGQRKAGAAVTTETEVIWARALPAGTSAQRAELIALTQALKMAEGKKLNVYTDSRYAFATAHIHGEIYRRRGWLTSEGKEIKNKDEILALLKALFLPKRLSIIHCPGHQKGNSAEARGNRMADQAAREVATRETPETSTLLAGKRTADGSEFEKRTADGSEFESPKKKAKVE

SEQ ID NO: 2261 - protein, 2096 aa, synthetic construct
MPAAKRVKLDGGDKKYSIGLDIGTNSVGWAVITDEYKVPSKKFKVLGNTDRHSIKKNLIGALLFDSGETAEATRLKRTARRRYTRRKNRICYLQEIFSNEMAKVDDSFFHRLEESFLVEEDKKHERHPIFGNIVDEVAYHEKYPTIYHLRKKLVDSTDKADLRLIYLALAHMIKFRGHFLIEGDLNPDNSDVDKLFIQLVQTYNQLFEENPINASGVDAKAILSARLSKSRRLENLIAQLPGEKKNGLFGNLIALSLGLTPNFKSNFDLAEDAKLQLSKDTYDDDLDNLLAQIGDQYADLFLAAKNLSDAILLSDILRVNTEITKAPLSASMIKRYDEHHQDLTLLKALVRQQLPEKYKEIFFDQSKNGYAGYIDGGASQEEFYKFIKPILEKMDGTEELLVKLNREDLLRKQRTFDNGSIPHQIHLGELHAILRRQEDFYPFLKDNREKIEKILTFRIPYYVGPLARGNSRFAWMTRKSEETITPWNFEEVVDKGASAQSFIERMTNFDKNLPNEKVLPKHSLLYEYFTVYNELTKVKYVTEGMRKPAFLSGEQKKAIVDLLFKTNRKVTVKQLKEDYFKKIECFDSVEISGVEDRFNASLGTYHDLLKIIKDKDFLDNEENEDILEDIVLTLTLFEDREMIEERLKTYAHLFDDKVMKQLKRRRYTGWGRLSRKLINGIRDKQSGKTILDFLKSDGFANRNFMQLIHDDSLTFKEDIQKAQVSGQGDSLHEHIANLAGSPAIKKGILQTVKVVDELVKVMGRHKPENIVIEMARENQTTQKGQKNSRERMKRIEEGIKELGSQILKEHPVENTQLQNEKLYLYYLQNGRDMYVDQELDINRLSDYDVDHIVPQSFLKDDSIDNKVLTRSDKARGKSDNVPSEEVVKKMKNYWRQLLNAKLITQRKFDNLTKAERGGLSELDKAGFIKRQLVETRQITKHVAQILDSRMNTKYDENDKLIREVKVITLKSKLVSDFRKDFQFYKVREINNYHHAHDAYLNAVVGTALIKKYPKLESEFVYGDYKVYDVRKMIAKSEQEIGKATAKYFFYSNIMNFFKTEITLANGEIRKRPLIETNGETGEIVWDKGRDFATVRKVLSMPQVNIVKKTEVQTGGFSKESILPKRNSDKLIARKKDWDPKKYGGFDSPTVAYSVLVVAKVEKGKSKKLKSVKELLGITIMERSSFEKNPIDFLEAKGYKEVKKDLIIKLPKYSLFELENGRKRMLASAGELQKGNELALPSKYVNFLYLASHYEKLKGSPEDNEQKQLFVEQHKHYLDEIIEQISEFSKRVILADANLDKVLSAYNKHRDKPIREQAENIIHLFTLTNLGAPAAFKYFDTTIDRKRYTSTKEVLDATLIHQSITGLYETRIDLSQLGGDGGEAAAKGGGGSSGGTLNIEDEYRLHETSKEPDVSLGSTWLSDFPQAWAETGGMGLAVRQAPLIIPLKATSTPVSIKQYPMSQEARLGIKPHIQRLLDQGILVPCQSPWNTPLLPVKKPGTNDYRPVQDLREVNKRVEDIHPTVPNPYNLLSGLPPSHQWYTVLDLKDAFFCLRLHPTSQPLFAFEWRDPEMGISGQLTWTRLPQGFKNSPTLFNEALHRDLAGFRIQHPDLILLQYVDDLLLAATSELDCQQGTRALLQTLGDLGYRASAKKAQICQKQVKYLGYLLKEGQRWLTEARKETVMGQPIPKTPRQLREFLGTAGFCRLWIPGFAEMAAPLYPLTKPGTLFNWGPDQQKAFQEIKQALLTAPALGLPDLTKPFELFVDEKQGYAKGVLTQKLGPWRRPVAYLSKKLDPVAAGWPPCLRMVAAIAVLTKDAGKLTMGQPLVILAPHAVEALVKQPPDRWLSNARMTHYQALLLDTDRVQFGPVVALNPATLLPLPEEGLQHDCLDILAEAHGTRSDLMDQPLPDADHTWYTDGSSFLQEGQRKAGAAVTTETEVIWARALPAGTSAQRAELIALTQALKMAEGKKLNVYTDSRYAFATAHIHGEIYRRRGWLTSEGKEIKNKDEILALLKALFLPKRLSIIHCPGHQKGNSAEARGNRMADQAAREVATRETPETSTLLAGKRTADGSEFEKRTADGSEFESPKKKAKVE

SEQ ID NO: 2262 - protein, 2094 aa, synthetic construct
MPAAKRVKLDGGDKKYSIGLDIGTNSVGWAVITDEYKVPSKKFKVLGNTDRHSIKKNLIGALLFDSGETAEATRLKRTARRRYTRRKNRICYLQEIFSNEMAKVDDSFFHRLEESFLVEEDKKHERHPIFGNIVDEVAYHEKYPTIYHLRKKLVDSTDKADLRLIYLALAHMIKFRGHFLIEGDLNPDNSDVDKLFIQLVQTYNQLFEENPINASGVDAKAILSARLSKSRRLENLIAQLPGEKKNGLFGNLIALSLGLTPNFKSNFDLAEDAKLQLSKDTYDDDLDNLLAQIGDQYADLFLAAKNLSDAILLSDILRVNTEITKAPLSASMIKRYDEHHQDLTLLKALVRQQLPEKYKEIFFDQSKNGYAGYIDGGASQEEFYKFIKPILEKMDGTEELLVKLNREDLLRKQRTFDNGSIPHQIHLGELHAILRRQEDFYPFLKDNREKIEKILTFRIPYYVGPLARGNSRFAWMTRKSEETITPWNFEEVVDKGASAQSFIERMTNFDKNLPNEKVLPKHSLLYEYFTVYNELTKVKYVTEGMRKPAFLSGEQKKAIVDLLFKTNRKVTVKQLKEDYFKKIECFDSVEISGVEDRFNASLGTYHDLLKIIKDKDFLDNEENEDILEDIVLTLTLFEDREMIEERLKTYAHLFDDKVMKQLKRRRYTGWGRLSRKLINGIRDKQSGKTILDFLKSDGFANRNFMQLIHDDSLTFKEDIQKAQVSGQGDSLHEHIANLAGSPAIKKGILQTVKVVDELVKVMGRHKPENIVIEMARENQTTQKGQKNSRERMKRIEEGIKELGSQILKEHPVENTQLQNEKLYLYYLQNGRDMYVDQELDINRLSDYDVDHIVPQSFLKDDSIDNKVLTRSDKARGKSDNVPSEEVVKKMKNYWRQLLNAKLITQRKFDNLTKAERGGLSELDKAGFIKRQLVETRQITKHVAQILDSRMNTKYDENDKLIREVKVITLKSKLVSDFRKDFQFYKVREINNYHHAHDAYLNAVVGTALIKKYPKLESEFVYGDYKVYDVRKMIAKSEQEIGKATAKYFFYSNIMNFFKTEITLANGEIRKRPLIETNGETGEIVWDKGRDFATVRKVLSMPQVNIVKKTEVQTGGFSKESILPKRNSDKLIARKKDWDPKKYGGFDSPTVAYSVLVVAKVEKGKSKKLKSVKELLGITIMERSSFEKNPIDFLEAKGYKEVKKDLIIKLPKYSLFELENGRKRMLASAGELQKGNELALPSKYVNFLYLASHYEKLKGSPEDNEQKQLFVEQHKHYLDEIIEQISEFSKRVILADANLDKVLSAYNKHRDKPIREQAENIIHLFTLTNLGAPAAFKYFDTTIDRKRYTSTKEVLDATLIHQSITGLYETRIDLSQLGGDGGPAPGSSGGGGGTLNIEDEYRLHETSKEPDVSLGSTWLSDFPQAWAETGGMGLAVRQAPLIIPLKATSTPVSIKQYPMSQEARLGIKPHIQRLLDQGILVPCQSPWNTPLLPVKKPGTNDYRPVQDLREVNKRVEDIHPTVPNPYNLLSGLPPSHQWYTVLDLKDAFFCLRLHPTSQPLFAFEWRDPEMGISGQLTWTRLPQGFKNSPTLFNEALHRDLAGFRIQHPDLILLQYVDDLLLAATSELDCQQGTRALLQTLGDLGYRASAKKAQICQKQVKYLGYLLKEGQRWLTEARKETVMGQPIPKTPRQLREFLGTAGFCRLWIPGFAEMAAPLYPLTKPGTLFNWGPDQQKAFQEIKQALLTAPALGLPDLTKPFELFVDEKQGYAKGVLTQKLGPWRRPVAYLSKKLDPVAAGWPPCLRMVAAIAVLTKDAGKLTMGQPLVILAPHAVEALVKQPPDRWLSNARMTHYQALLLDTDRVQFGPVVALNPATLLPLPEEGLQHDCLDILAEAHGTRSDLMDQPLPDADHTWYTDGSSFLQEGQRKAGAAVTTETEVIWARALPAGTSAQRAELIALTQALKMAEGKKLNVYTDSRYAFATAHIHGEIYRRRGWLTSEGKEIKNKDEILALLKALFLPKRLSIIHCPGHQKGNSAEARGNRMADQAAREVATRETPETSTLLAGKRTADGSEFEKRTADGSEFESPKKKAKVE

SEQ ID NO: 2263 - protein, 2096 aa, synthetic construct
MPAAKRVKLDGGDKKYSIGLDIGTNSVGWAVITDEYKVPSKKFKVLGNTDRHSIKKNLIGALLFDSGETAEATRLKRTARRRYTRRKNRICYLQEIFSNEMAKVDDSFFHRLEESFLVEEDKKHERHPIFGNIVDEVAYHEKYPTIYHLRKKLVDSTDKADLRLIYLALAHMIKFRGHFLIEGDLNPDNSDVDKLFIQLVQTYNQLFEENPINASGVDAKAILSARLSKSRRLENLIAQLPGEKKNGLFGNLIALSLGLTPNFKSNFDLAEDAKLQLSKDTYDDDLDNLLAQIGDQYADLFLAAKNLSDAILLSDILRVNTEITKAPLSASMIKRYDEHHQDLTLLKALVRQQLPEKYKEIFFDQSKNGYAGYIDGGASQEEFYKFIKPILEKMDGTEELLVKLNREDLLRKQRTFDNGSIPHQIHLGELHAILRRQEDFYPFLKDNREKIEKILTFRIPYYVGPLARGNSRFAWMTRKSEETITPWNFEEVVDKGASAQSFIERMTNFDKNLPNEKVLPKHSLLYEYFTVYNELTKVKYVTEGMRKPAFLSGEQKKAIVDLLFKTNRKVTVKQLKEDYFKKIECFDSVEISGVEDRFNASLGTYHDLLKIIKDKDFLDNEENEDILEDIVLTLTLFEDREMIEERLKTYAHLFDDKVMKQLKRRRYTGWGRLSRKLINGIRDKQSGKTILDFLKSDGFANRNFMQLIHDDSLTFKEDIQKAQVSGQGDSLHEHIANLAGSPAIKKGILQTVKVVDELVKVMGRHKPENIVIEMARENQTTQKGQKNSRERMKRIEEGIKELGSQILKEHPVENTQLQNEKLYLYYLQNGRDMYVDQELDINRLSDYDVDHIVPQSFLKDDSIDNKVLTRSDKARGKSDNVPSEEVVKKMKNYWRQLLNAKLITQRKFDNLTKAERGGLSELDKAGFIKRQLVETRQITKHVAQILDSRMNTKYDENDKLIREVKVITLKSKLVSDFRKDFQFYKVREINNYHHAHDAYLNAVVGTALIKKYPKLESEFVYGDYKVYDVRKMIAKSEQEIGKATAKYFFYSNIMNFFKTEITLANGEIRKRPLIETNGETGEIVWDKGRDFATVRKVLSMPQVNIVKKTEVQTGGFSKESILPKRNSDKLIARKKDWDPKKYGGFDSPTVAYSVLVVAKVEKGKSKKLKSVKELLGITIMERSSFEKNPIDFLEAKGYKEVKKDLIIKLPKYSLFELENGRKRMLASAGELQKGNELALPSKYVNFLYLASHYEKLKGSPEDNEQKQLFVEQHKHYLDEIIEQISEFSKRVILADANLDKVLSAYNKHRDKPIREQAENIIHLFTLTNLGAPAAFKYFDTTIDRKRYTSTKEVLDATLIHQSITGLYETRIDLSQLGGDGGGGSGSSEAAAKGGTLNIEDEYRLHETSKEPDVSLGSTWLSDFPQAWAETGGMGLAVRQAPLIIPLKATSTPVSIKQYPMSQEARLGIKPHIQRLLDQGILVPCQSPWNTPLLPVKKPGTNDYRPVQDLREVNKRVEDIHPTVPNPYNLLSGLPPSHQWYTVLDLKDAFFCLRLHPTSQPLFAFEWRDPEMGISGQLTWTRLPQGFKNSPTLFNEALHRDLAGFRIQHPDLILLQYVDDLLLAATSELDCQQGTRALLQTLGDLGYRASAKKAQICQKQVKYLGYLLKEGQRWLTEARKETVMGQPIPKTPRQLREFLGTAGFCRLWIPGFAEMAAPLYPLTKPGTLFNWGPDQQKAFQEIKQALLTAPALGLPDLTKPFELFVDEKQGYAKGVLTQKLGPWRRPVAYLSKKLDPVAAGWPPCLRMVAAIAVLTKDAGKLTMGQPLVILAPHAVEALVKQPPDRWLSNARMTHYQALLLDTDRVQFGPVVALNPATLLPLPEEGLQHDCLDILAEAHGTRSDLMDQPLPDADHTWYTDGSSFLQEGQRKAGAAVTTETEVIWARALPAGTSAQRAELIALTQALKMAEGKKLNVYTDSRYAFATAHIHGEIYRRRGWLTSEGKEIKNKDEILALLKALFLPKRLSIIHCPGHQKGNSAEARGNRMADQAAREVATRETPETSTLLAGKRTADGSEFEKRTADGSEFESPKKKAKVE

SEQ ID NO: 2264 - protein, 2091 aa, synthetic construct
MPAAKRVKLDGGDKKYSIGLDIGTNSVGWAVITDEYKVPSKKFKVLGNTDRHSIKKNLIGALLFDSGETAEATRLKRTARRRYTRRKNRICYLQEIFSNEMAKVDDSFFHRLEESFLVEEDKKHERHPIFGNIVDEVAYHEKYPTIYHLRKKLVDSTDKADLRLIYLALAHMIKFRGHFLIEGDLNPDNSDVDKLFIQLVQTYNQLFEENPINASGVDAKAILSARLSKSRRLENLIAQLPGEKKNGLFGNLIALSLGLTPNFKSNFDLAEDAKLQLSKDTYDDDLDNLLAQIGDQYADLFLAAKNLSDAILLSDILRVNTEITKAPLSASMIKRYDEHHQDLTLLKALVRQQLPEKYKEIFFDQSKNGYAGYIDGGASQEEFYKFIKPILEKMDGTEELLVKLNREDLLRKQRTFDNGSIPHQIHLGELHAILRRQEDFYPFLKDNREKIEKILTFRIPYYVGPLARGNSRFAWMTRKSEETITPWNFEEVVDKGASAQSFIERMTNFDKNLPNEKVLPKHSLLYEYFTVYNELTKVKYVTEGMRKPAFLSGEQKKAIVDLLFKTNRKVTVKQLKEDYFKKIECFDSVEISGVEDRFNASLGTYHDLLKIIKDKDFLDNEENEDILEDIVLTLTLFEDREMIEERLKTYAHLFDDKVMKQLKRRRYTGWGRLSRKLINGIRDKQSGKTILDFLKSDGFANRNFMQLIHDDSLTFKEDIQKAQVSGQGDSLHEHIANLAGSPAIKKGILQTVKVVDELVKVMGRHKPENIVIEMARENQTTQKGQKNSRERMKRIEEGIKELGSQILKEHPVENTQLQNEKLYLYYLQNGRDMYVDQELDINRLSDYDVDHIVPQSFLKDDSIDNKVLTRSDKARGKSDNVPSEEVVKKMKNYWRQLLNAKLITQRKFDNLTKAERGGLSELDKAGFIKRQLVETRQITKHVAQILDSRMNTKYDENDKLIREVKVITLKSKLVSDFRKDFQFYKVREINNYHHAHDAYLNAVVGTALIKKYPKLESEFVYGDYKVYDVRKMIAKSEQEIGKATAKYFFYSNIMNFFKTEITLANGEIRKRPLIETNGETGEIVWDKGRDFATVRKVLSMPQVNIVKKTEVQTGGFSKESILPKRNSDKLIARKKDWDPKKYGGFDSPTVAYSVLVVAKVEKGKSKKLKSVKELLGITIMERSSFEKNPIDFLEAKGYKEVKKDLIIKLPKYSLFELENGRKRMLASAGELQKGNELALPSKYVNFLYLASHYEKLKGSPEDNEQKQLFVEQHKHYLDEIIEQISEFSKRVILADANLDKVLSAYNKHRDKPIREQAENIIHLFTLTNLGAPAAFKYFDTTIDRKRYTSTKEVLDATLIHQSITGLYETRIDLSQLGGDGGGSSGGGGGTLNIEDEYRLHETSKEPDVSLGSTWLSDFPQAWAETGGMGLAVRQAPLIIPLKATSTPVSIKQYPMSQEARLGIKPHIQRLLDQGILVPCQSPWNTPLLPVKKPGTNDYRPVQDLREVNKRVEDIHPTVPNPYNLLSGLPPSHQWYTVLDLKDAFFCLRLHPTSQPLFAFEWRDPEMGISGQLTWTRLPQGFKNSPTLFNEALHRDLAGFRIQHPDLILLQYVDDLLLAATSELDCQQGTRALLQTLGDLGYRASAKKAQICQKQVKYLGYLLKEGQRWLTEARKETVMGQPIPKTPRQLREFLGTAGFCRLWIPGFAEMAAPLYPLTKPGTLFNWGPDQQKAFQEIKQALLTAPALGLPDLTKPFELFVDEKQGYAKGVLTQKLGPWRRPVAYLSKKLDPVAAGWPPCLRMVAAIAVLTKDAGKLTMGQPLVILAPHAVEALVKQPPDRWLSNARMTHYQALLLDTDRVQFGPVVALNPATLLPLPEEGLQHDCLDILAEAHGTRSDLMDQPLPDADHTWYTDGSSFLQEGQRKAGAAVTTETEVIWARALPAGTSAQRAELIALTQALKMAEGKKLNVYTDSRYAFATAHIHGEIYRRRGWLTSEGKEIKNKDEILALLKALFLPKRLSIIHCPGHQKGNSAEARGNRMADQAAREVATRETPETSTLLAGKRTADGSEFEKRTADGSEFESPKKKAKVE

SEQ ID NO: 2265 - protein, 2094 aa, synthetic construct
MPAAKRVKLDGGDKKYSIGLDIGTNSVGWAVITDEYKVPSKKFKVLGNTDRHSIKKNLIGALLFDSGETAEATRLKRTARRRYTRRKNRICYLQEIFSNEMAKVDDSFFHRLEESFLVEEDKKHERHPIFGNIVDEVAYHEKYPTIYHLRKKLVDSTDKADLRLIYLALAHMIKFRGHFLIEGDLNPDNSDVDKLFIQLVQTYNQLFEENPINASGVDAKAILSARLSKSRRLENLIAQLPGEKKNGLFGNLIALSLGLTPNFKSNFDLAEDAKLQLSKDTYDDDLDNLLAQIGDQYADLFLAAKNLSDAILLSDILRVNTEITKAPLSASMIKRYDEHHQDLTLLKALVRQQLPEKYKEIFFDQSKNGYAGYIDGGASQEEFYKFIKPILEKMDGTEELLVKLNREDLLRKQRTFDNGSIPHQIHLGELHAILRRQEDFYPFLKDNREKIEKILTFRIPYYVGPLARGNSRFAWMTRKSEETITPWNFEEVVDKGASAQSFIERMTNFDKNLPNEKVLPKHSLLYEYFTVYNELTKVKYVTEGMRKPAFLSGEQKKAIVDLLFKTNRKVTVKQLKEDYFKKIECFDSVEISGVEDRFNASLGTYHDLLKIIKDKDFLDNEENEDILEDIVLTLTLFEDREMIEERLKTYAHLFDDKVMKQLKRRRYTGWGRLSRKLINGIRDKQSGKTILDFLKSDGFANRNFMQLIHDDSLTFKEDIQKAQVSGQGDSLHEHIANLAGSPAIKKGILQTVKVVDELVKVMGRHKPENIVIEMARENQTTQKGQKNSRERMKRIEEGIKELGSQILKEHPVENTQLQNEKLYLYYLQNGRDMYVDQELDINRLSDYDVDHIVPQSFLKDDSIDNKVLTRSDKARGKSDNVPSEEVVKKMKNYWRQLLNAKLITQRKFDNLTKAERGGLSELDKAGFIKRQLVETRQITKHVAQILDSRMNTKYDENDKLIREVKVITLKSKLVSDFRKDFQFYKVREINNYHHAHDAYLNAVVGTALIKKYPKLESEFVYGDYKVYDVRKMIAKSEQEIGKATAKYFFYSNIMNFFKTEITLANGEIRKRPLIETNGETGEIVWDKGRDFATVRKVLSMPQVNIVKKTEVQTGGFSKESILPKRNSDKLIARKKDWDPKKYGGFDSPTVAYSVLVVAKVEKGKSKKLKSVKELLGITIMERSSFEKNPIDFLEAKGYKEVKKDLIIKLPKYSLFELENGRKRMLASAGELQKGNELALPSKYVNFLYLASHYEKLKGSPEDNEQKQLFVEQHKHYLDEIIEQISEFSKRVILADANLDKVLSAYNKHRDKPIREQAENIIHLFTLTNLGAPAAFKYFDTTIDRKRYTSTKEVLDATLIHQSITGLYETRIDLSQLGGDGGGGSGSSPAPGGTLNIEDEYRLHETSKEPDVSLGSTWLSDFPQAWAETGGMGLAVRQAPLIIPLKATSTPVSIKQYPMSQEARLGIKPHIQRLLDQGILVPCQSPWNTPLLPVKKPGTNDYRPVQDLREVNKRVEDIHPTVPNPYNLLSGLPPSHQWYTVLDLKDAFFCLRLHPTSQPLFAFEWRDPEMGISGQLTWTRLPQGFKNSPTLFNEALHRDLAGFRIQHPDLILLQYVDDLLLAATSELDCQQGTRALLQTLGDLGYRASAKKAQICQKQVKYLGYLLKEGQRWLTEARKETVMGQPIPKTPRQLREFLGTAGFCRLWIPGFAEMAAPLYPLTKPGTLFNWGPDQQKAFQEIKQALLTAPALGLPDLTKPFELFVDEKQGYAKGVLTQKLGPWRRPVAYLSKKLDPVAAGWPPCLRMVAAIAVLTKDAGKLTMGQPLVILAPHAVEALVKQPPDRWLSNARMTHYQALLLDTDRVQFGPVVALNPATLLPLPEEGLQHDCLDILAEAHGTRSDLMDQPLPDADHTWYTDGSSFLQEGQRKAGAAVTTETEVIWARALPAGTSAQRAELIALTQALKMAEGKKLNVYTDSRYAFATAHIHGEIYRRRGWLTSEGKEIKNKDEILALLKALFLPKRLSIIHCPGHQKGNSAEARGNRMADQAAREVATRETPETSTLLAGKRTADGSEFEKRTADGSEFESPKKKAKVE

SEQ ID NO: 2266 - protein, 2096 aa, synthetic construct
MPAAKRVKLDGGDKKYSIGLDIGTNSVGWAVITDEYKVPSKKFKVLGNTDRHSIKKNLIGALLFDSGETAEATRLKRTARRRYTRRKNRICYLQEIFSNEMAKVDDSFFHRLEESFLVEEDKKHERHPIFGNIVDEVAYHEKYPTIYHLRKKLVDSTDKADLRLIYLALAHMIKFRGHFLIEGDLNPDNSDVDKLFIQLVQTYNQLFEENPINASGVDAKAILSARLSKSRRLENLIAQLPGEKKNGLFGNLIALSLGLTPNFKSNFDLAEDAKLQLSKDTYDDDLDNLLAQIGDQYADLFLAAKNLSDAILLSDILRVNTEITKAPLSASMIKRYDEHHQDLTLLKALVRQQLPEKYKEIFFDQSKNGYAGYIDGGASQEEFYKFIKPILEKMDGTEELLVKLNREDLLRKQRTFDNGSIPHQIHLGELHAILRRQEDFYPFLKDNREKIEKILTFRIPYYVGPLARGNSRFAWMTRKSEETITPWNFEEVVDKGASAQSFIERMTNFDKNLPNEKVLPKHSLLYEYFTVYNELTKVKYVTEGMRKPAFLSGEQKKAIVDLLFKTNRKVTVKQLKEDYFKKIECFDSVEISGVEDRFNASLGTYHDLLKIIKDKDFLDNEENEDILEDIVLTLTLFEDREMIEERLKTYAHLFDDKVMKQLKRRRYTGWGRLSRKLINGIRDKQSGKTILDFLKSDGFANRNFMQLIHDDSLTFKEDIQKAQVSGQGDSLHEHIANLAGSPAIKKGILQTVKVVDELVKVMGRHKPENIVIEMARENQTTQKGQKNSRERMKRIEEGIKELGSQILKEHPVENTQLQNEKLYLYYLQNGRDMYVDQELDINRLSDYDVDHIVPQSFLKDDSIDNKVLTRSDKARGKSDNVPSEEVVKKMKNYWRQLLNAKLITQRKFDNLTKAERGGLSELDKAGFIKRQLVETRQITKHVAQILDSRMNTKYDENDKLIREVKVITLKSKLVSDFRKDFQFYKVREINNYHHAHDAYLNAVVGTALIKKYPKLESEFVYGDYKVYDVRKMIAKSEQEIGKATAKYFFYSNIMNFFKTEITLANGEIRKRPLIETNGETGEIVWDKGRDFATVRKVLSMPQVNIVKKTEVQTGGFSKESILPKRNSDKLIARKKDWDPKKYGGFDSPTVAYSVLVVAKVEKGKSKKLKSVKELLGITIMERSSFEKNPIDFLEAKGYKEVKKDLIIKLPKYSLFELENGRKRMLASAGELQKGNELALPSKYVNFLYLASHYEKLKGSPEDNEQKQLFVEQHKHYLDEIIEQISEFSKRVILADANLDKVLSAYNKHRDKPIREQAENIIHLFTLTNLGAPAAFKYFDTTIDRKRYTSTKEVLDATLIHQSITGLYETRIDLSQLGGDGGGGSGGGEAAAKGGTLNIEDEYRLHETSKEPDVSLGSTWLSDFPQAWAETGGMGLAVRQAPLIIPLKATSTPVSIKQYPMSQEARLGIKPHIQRLLDQGILVPCQSPWNTPLLPVKKPGTNDYRPVQDLREVNKRVEDIHPTVPNPYNLLSGLPPSHQWYTVLDLKDAFFCLRLHPTSQPLFAFEWRDPEMGISGQLTWTRLPQGFKNSPTLFNEALHRDLAGFRIQHPDLILLQYVDDLLLAATSELDCQQGTRALLQTLGDLGYRASAKKAQICQKQVKYLGYLLKEGQRWLTEARKETVMGQPIPKTPRQLREFLGTAGFCRLWIPGFAEMAAPLYPLTKPGTLFNWGPDQQKAFQEIKQALLTAPALGLPDLTKPFELFVDEKQGYAKGVLTQKLGPWRRPVAYLSKKLDPVAAGWPPCLRMVAAIAVLTKDAGKLTMGQPLVILAPHAVEALVKQPPDRWLSNARMTHYQALLLDTDRVQFGPVVALNPATLLPLPEEGLQHDCLDILAEAHGTRSDLMDQPLPDADHTWYTDGSSFLQEGQRKAGAAVTTETEVIWARALPAGTSAQRAELIALTQALKMAEGKKLNVYTDSRYAFATAHIHGEIYRRRGWLTSEGKEIKNKDEILALLKALFLPKRLSIIHCPGHQKGNSAEARGNRMADQAAREVATRETPETSTLLAGKRTADGSEFEKRTADGSEFESPKKKAKVE

SEQ ID NO: 2267 - protein, 2092 aa, synthetic construct
MPAAKRVKLDGGDKKYSIGLDIGTNSVGWAVITDEYKVPSKKFKVLGNTDRHSIKKNLIGALLFDSGETAEATRLKRTARRRYTRRKNRICYLQEIFSNEMAKVDDSFFHRLEESFLVEEDKKHERHPIFGNIVDEVAYHEKYPTIYHLRKKLVDSTDKADLRLIYLALAHMIKFRGHFLIEGDLNPDNSDVDKLFIQLVQTYNQLFEENPINASGVDAKAILSARLSKSRRLENLIAQLPGEKKNGLFGNLIALSLGLTPNFKSNFDLAEDAKLQLSKDTYDDDLDNLLAQIGDQYADLFLAAKNLSDAILLSDILRVNTEITKAPLSASMIKRYDEHHQDLTLLKALVRQQLPEKYKEIFFDQSKNGYAGYIDGGASQEEFYKFIKPILEKMDGTEELLVKLNREDLLRKQRTFDNGSIPHQIHLGELHAILRRQEDFYPFLKDNREKIEKILTFRIPYYVGPLARGNSRFAWMTRKSEETITPWNFEEVVDKGASAQSFIERMTNFDKNLPNEKVLPKHSLLYEYFTVYNELTKVKYVTEGMRKPAFLSGEQKKAIVDLLFKTNRKVTVKQLKEDYFKKIECFDSVEISGVEDRFNASLGTYHDLLKIIKDKDFLDNEENEDILEDIVLTLTLFEDREMIEERLKTYAHLFDDKVMKQLKRRRYTGWGRLSRKLINGIRDKQSGKTILDFLKSDGFANRNFMQLIHDDSLTFKEDIQKAQVSGQGDSLHEHIANLAGSPAIKKGILQTVKVVDELVKVMGRHKPENIVIEMARENQTTQKGQKNSRERMKRIEEGIKELGSQILKEHPVENTQLQNEKLYLYYLQNGRDMYVDQELDINRLSDYDVDHIVPQSFLKDDSIDNKVLTRSDKARGKSDNVPSEEVVKKMKNYWRQLLNAKLITQRKFDNLTKAERGGLSELDKAGFIKRQLVETRQITKHVAQILDSRMNTKYDENDKLIREVKVITLKSKLVSDFRKDFQFYKVREINNYHHAHDAYLNAVVGTALIKKYPKLESEFVYGDYKVYDVRKMIAKSEQEIGKATAKYFFYSNIMNFFKTEITLANGEIRKRPLIETNGETGEIVWDKGRDFATVRKVLSMPQVNIVKKTEVQTGGFSKESILPKRNSDKLIARKKDWDPKKYGGFDSPTVAYSVLVVAKVEKGKSKKLKSVKELLGITIMERSSFEKNPIDFLEAKGYKEVKKDLIIKLPKYSLFELENGRKRMLASAGELQKGNELALPSKYVNFLYLASHYEKLKGSPEDNEQKQLFVEQHKHYLDEIIEQISEFSKRVILADANLDKVLSAYNKHRDKPIREQAENIIHLFTLTNLGAPAAFKYFDTTIDRKRYTSTKEVLDATLIHQSITGLYETRIDLSQLGGDGGGGGGGGGGGTLNIEDEYRLHETSKEPDVSLGSTWLSDFPQAWAETGGMGLAVRQAPLIIPLKATSTPVSIKQYPMSQEARLGIKPHIQRLLDQGILVPCQSPWNTPLLPVKKPGTNDYRPVQDLREVNKRVEDIHPTVPNPYNLLSGLPPSHQWYTVLDLKDAFFCLRLHPTSQPLFAFEWRDPEMGISGQLTWTRLPQGFKNSPTLFNEALHRDLAGFRIQHPDLILLQYVDDLLLAATSELDCQQGTRALLQTLGDLGYRASAKKAQICQKQVKYLGYLLKEGQRWLTEARKETVMGQPIPKTPRQLREFLGTAGFCRLWIPGFAEMAAPLYPLTKPGTLFNWGPDQQKAFQEIKQALLTAPALGLPDLTKPFELFVDEKQGYAKGVLTQKLGPWRRPVAYLSKKLDPVAAGWPPCLRMVAAIAVLTKDAGKLTMGQPLVILAPHAVEALVKQPPDRWLSNARMTHYQALLLDTDRVQFGPVVALNPATLLPLPEEGLQHDCLDILAEAHGTRSDLMDQPLPDADHTWYTDGSSFLQEGQRKAGAAVTTETEVIWARALPAGTSAQRAELIALTQALKMAEGKKLNVYTDSRYAFATAHIHGEIYRRRGWLTSEGKEIKNKDEILALLKALFLPKRLSIIHCPGHQKGNSAEARGNRMADQAAREVATRETPETSTLLAGKRTADGSEFEKRTADGSEFESPKKKAKVE

SEQ ID NO: 2268 - protein, 2089 aa, synthetic construct
MPAAKRVKLDGGDKKYSIGLDIGTNSVGWAVITDEYKVPSKKFKVLGNTDRHSIKKNLIGALLFDSGETAEATRLKRTARRRYTRRKNRICYLQEIFSNEMAKVDDSFFHRLEESFLVEEDKKHERHPIFGNIVDEVAYHEKYPTIYHLRKKLVDSTDKADLRLIYLALAHMIKFRGHFLIEGDLNPDNSDVDKLFIQLVQTYNQLFEENPINASGVDAKAILSARLSKSRRLENLIAQLPGEKKNGLFGNLIALSLGLTPNFKSNFDLAEDAKLQLSKDTYDDDLDNLLAQIGDQYADLFLAAKNLSDAILLSDILRVNTEITKAPLSASMIKRYDEHHQDLTLLKALVRQQLPEKYKEIFFDQSKNGYAGYIDGGASQEEFYKFIKPILEKMDGTEELLVKLNREDLLRKQRTFDNGSIPHQIHLGELHAILRRQEDFYPFLKDNREKIEKILTFRIPYYVGPLARGNSRFAWMTRKSEETITPWNFEEVVDKGASAQSFIERMTNFDKNLPNEKVLPKHSLLYEYFTVYNELTKVKYVTEGMRKPAFLSGEQKKAIVDLLFKTNRKVTVKQLKEDYFKKIECFDSVEISGVEDRFNASLGTYHDLLKIIKDKDFLDNEENEDILEDIVLTLTLFEDREMIEERLKTYAHLFDDKVMKQLKRRRYTGWGRLSRKLINGIRDKQSGKTILDFLKSDGFANRNFMQLIHDDSLTFKEDIQKAQVSGQGDSLHEHIANLAGSPAIKKGILQTVKVVDELVKVMGRHKPENIVIEMARENQTTQKGQKNSRERMKRIEEGIKELGSQILKEHPVENTQLQNEKLYLYYLQNGRDMYVDQELDINRLSDYDVDHIVPQSFLKDDSIDNKVLTRSDKARGKSDNVPSEEVVKKMKNYWRQLLNAKLITQRKFDNLTKAERGGLSELDKAGFIKRQLVETRQITKHVAQILDSRMNTKYDENDKLIREVKVITLKSKLVSDFRKDFQFYKVREINNYHHAHDAYLNAVVGTALIKKYPKLESEFVYGDYKVYDVRKMIAKSEQEIGKATAKYFFYSNIMNFFKTEITLANGEIRKRPLIETNGETGEIVWDKGRDFATVRKVLSMPQVNIVKKTEVQTGGFSKESILPKRNSDKLIARKKDWDPKKYGGFDSPTVAYSVLVVAKVEKGKSKKLKSVKELLGITIMERSSFEKNPIDFLEAKGYKEVKKDLIIKLPKYSLFELENGRKRMLASAGELQKGNELALPSKYVNFLYLASHYEKLKGSPEDNEQKQLFVEQHKHYLDEIIEQISEFSKRVILADANLDKVLSAYNKHRDKPIREQAENIIHLFTLTNLGAPAAFKYFDTTIDRKRYTSTKEVLDATLIHQSITGLYETRIDLSQLGGDGGGGGGGGTLNIEDEYRLHETSKEPDVSLGSTWLSDFPQAWAETGGMGLAVRQAPLIIPLKATSTPVSIKQYPMSQEARLGIKPHIQRLLDQGILVPCQSPWNTPLLPVKKPGTNDYRPVQDLREVNKRVEDIHPTVPNPYNLLSGLPPSHQWYTVLDLKDAFFCLRLHPTSQPLFAFEWRDPEMGISGQLTWTRLPQGFKNSPTLFNEALHRDLAGFRIQHPDLILLQYVDDLLLAATSELDCQQGTRALLQTLGDLGYRASAKKAQICQKQVKYLGYLLKEGQRWLTEARKETVMGQPIPKTPRQLREFLGTAGFCRLWIPGFAEMAAPLYPLTKPGTLFNWGPDQQKAFQEIKQALLTAPALGLPDLTKPFELFVDEKQGYAKGVLTQKLGPWRRPVAYLSKKLDPVAAGWPPCLRMVAAIAVLTKDAGKLTMGQPLVILAPHAVEALVKQPPDRWLSNARMTHYQALLLDTDRVQFGPVVALNPATLLPLPEEGLQHDCLDILAEAHGTRSDLMDQPLPDADHTWYTDGSSFLQEGQRKAGAAVTTETEVIWARALPAGTSAQRAELIALTQALKMAEGKKLNVYTDSRYAFATAHIHGEIYRRRGWLTSEGKEIKNKDEILALLKALFLPKRLSIIHCPGHQKGNSAEARGNRMADQAAREVATRETPETSTLLAGKRTADGSEFEKRTADGSEFESPKKKAKVE

SEQ ID NO: 2269 - protein, 2096 aa, synthetic construct
MPAAKRVKLDGGDKKYSIGLDIGTNSVGWAVITDEYKVPSKKFKVLGNTDRHSIKKNLIGALLFDSGETAEATRLKRTARRRYTRRKNRICYLQEIFSNEMAKVDDSFFHRLEESFLVEEDKKHERHPIFGNIVDEVAYHEKYPTIYHLRKKLVDSTDKADLRLIYLALAHMIKFRGHFLIEGDLNPDNSDVDKLFIQLVQTYNQLFEENPINASGVDAKAILSARLSKSRRLENLIAQLPGEKKNGLFGNLIALSLGLTPNFKSNFDLAEDAKLQLSKDTYDDDLDNLLAQIGDQYADLFLAAKNLSDAILLSDILRVNTEITKAPLSASMIKRYDEHHQDLTLLKALVRQQLPEKYKEIFFDQSKNGYAGYIDGGASQEEFYKFIKPILEKMDGTEELLVKLNREDLLRKQRTFDNGSIPHQIHLGELHAILRRQEDFYPFLKDNREKIEKILTFRIPYYVGPLARGNSRFAWMTRKSEETITPWNFEEVVDKGASAQSFIERMTNFDKNLPNEKVLPKHSLLYEYFTVYNELTKVKYVTEGMRKPAFLSGEQKKAIVDLLFKTNRKVTVKQLKEDYFKKIECFDSVEISGVEDRFNASLGTYHDLLKIIKDKDFLDNEENEDILEDIVLTLTLFEDREMIEERLKTYAHLFDDKVMKQLKRRRYTGWGRLSRKLINGIRDKQSGKTILDFLKSDGFANRNFMQLIHDDSLTFKEDIQKAQVSGQGDSLHEHIANLAGSPAIKKGILQTVKVVDELVKVMGRHKPENIVIEMARENQTTQKGQKNSRERMKRIEEGIKELGSQILKEHPVENTQLQNEKLYLYYLQNGRDMYVDQELDINRLSDYDVDHIVPQSFLKDDSIDNKVLTRSDKARGKSDNVPSEEVVKKMKNYWRQLLNAKLITQRKFDNLTKAERGGLSELDKAGFIKRQLVETRQITKHVAQILDSRMNTKYDENDKLIREVKVITLKSKLVSDFRKDFQFYKVREINNYHHAHDAYLNAVVGTALIKKYPKLESEFVYGDYKVYDVRKMIAKSEQEIGKATAKYFFYSNIMNFFKTEITLANGEIRKRPLIETNGETGEIVWDKGRDFATVRKVLSMPQVNIVKKTEVQTGGFSKESILPKRNSDKLIARKKDWDPKKYGGFDSPTVAYSVLVVAKVEKGKSKKLKSVKELLGITIMERSSFEKNPIDFLEAKGYKEVKKDLIIKLPKYSLFELENGRKRMLASAGELQKGNELALPSKYVNFLYLASHYEKLKGSPEDNEQKQLFVEQHKHYLDEIIEQISEFSKRVILADANLDKVLSAYNKHRDKPIREQAENIIHLFTLTNLGAPAAFKYFDTTIDRKRYTSTKEVLDATLIHQSITGLYETRIDLSQLGGDGGPAPEAAAKGGGGGTLNIEDEYRLHETSKEPDVSLGSTWLSDFPQAWAETGGMGLAVRQAPLIIPLKATSTPVSIKQYPMSQEARLGIKPHIQRLLDQGILVPCQSPWNTPLLPVKKPGTNDYRPVQDLREVNKRVEDIHPTVPNPYNLLSGLPPSHQWYTVLDLKDAFFCLRLHPTSQPLFAFEWRDPEMGISGQLTWTRLPQGFKNSPTLFNEALHRDLAGFRIQHPDLILLQYVDDLLLAATSELDCQQGTRALLQTLGDLGYRASAKKAQICQKQVKYLGYLLKEGQRWLTEARKETVMGQPIPKTPRQLREFLGTAGFCRLWIPGFAEMAAPLYPLTKPGTLFNWGPDQQKAFQEIKQALLTAPALGLPDLTKPFELFVDEKQGYAKGVLTQKLGPWRRPVAYLSKKLDPVAAGWPPCLRMVAAIAVLTKDAGKLTMGQPLVILAPHAVEALVKQPPDRWLSNARMTHYQALLLDTDRVQFGPVVALNPATLLPLPEEGLQHDCLDILAEAHGTRSDLMDQPLPDADHTWYTDGSSFLQEGQRKAGAAVTTETEVIWARALPAGTSAQRAELIALTQALKMAEGKKLNVYTDSRYAFATAHIHGEIYRRRGWLTSEGKEIKNKDEILALLKALFLPKRLSIIHCPGHQKGNSAEARGNRMADQAAREVATRETPETSTLLAGKRTADGSEFEKRTADGSEFESPKKKAKVE

SEQ ID NO: 2270 - protein, 2091 aa, synthetic construct
MPAAKRVKLDGGDKKYSIGLDIGTNSVGWAVITDEYKVPSKKFKVLGNTDRHSIKKNLIGALLFDSGETAEATRLKRTARRRYTRRKNRICYLQEIFSNEMAKVDDSFFHRLEESFLVEEDKKHERHPIFGNIVDEVAYHEKYPTIYHLRKKLVDSTDKADLRLIYLALAHMIKFRGHFLIEGDLNPDNSDVDKLFIQLVQTYNQLFEENPINASGVDAKAILSARLSKSRRLENLIAQLPGEKKNGLFGNLIALSLGLTPNFKSNFDLAEDAKLQLSKDTYDDDLDNLLAQIGDQYADLFLAAKNLSDAILLSDILRVNTEITKAPLSASMIKRYDEHHQDLTLLKALVRQQLPEKYKEIFFDQSKNGYAGYIDGGASQEEFYKFIKPILEKMDGTEELLVKLNREDLLRKQRTFDNGSIPHQIHLGELHAILRRQEDFYPFLKDNREKIEKILTFRIPYYVGPLARGNSRFAWMTRKSEETITPWNFEEVVDKGASAQSFIERMTNFDKNLPNEKVLPKHSLLYEYFTVYNELTKVKYVTEGMRKPAFLSGEQKKAIVDLLFKTNRKVTVKQLKEDYFKKIECFDSVEISGVEDRFNASLGTYHDLLKIIKDKDFLDNEENEDILEDIVLTLTLFEDREMIEERLKTYAHLFDDKVMKQLKRRRYTGWGRLSRKLINGIRDKQSGKTILDFLKSDGFANRNFMQLIHDDSLTFKEDIQKAQVSGQGDSLHEHIANLAGSPAIKKGILQTVKVVDELVKVMGRHKPENIVIEMARENQTTQKGQKNSRERMKRIEEGIKELGSQILKEHPVENTQLQNEKLYLYYLQNGRDMYVDQELDINRLSDYDVDHIVPQSFLKDDSIDNKVLTRSDKARGKSDNVPSEEVVKKMKNYWRQLLNAKLITQRKFDNLTKAERGGLSELDKAGFIKRQLVETRQITKHVAQILDSRMNTKYDENDKLIREVKVITLKSKLVSDFRKDFQFYKVREINNYHHAHDAYLNAVVGTALIKKYPKLESEFVYGDYKVYDVRKMIAKSEQEIGKATAKYFFYSNIMNFFKTEITLANGEIRKRPLIETNGETGEIVWDKGRDFATVRKVLSMPQVNIVKKTEVQTGGFSKESILPKRNSDKLIARKKDWDPKKYGGFDSPTVAYSVLVVAKVEKGKSKKLKSVKELLGITIMERSSFEKNPIDFLEAKGYKEVKKDLIIKLPKYSLFELENGRKRMLASAGELQKGNELALPSKYVNFLYLASHYEKLKGSPEDNEQKQLFVEQHKHYLDEIIEQISEFSKRVILADANLDKVLSAYNKHRDKPIREQAENIIHLFTLTNLGAPAAFKYFDTTIDRKRYTSTKEVLDATLIHQSITGLYETRIDLSQLGGDGGGGSGSSGGTLNIEDEYRLHETSKEPDVSLGSTWLSDFPQAWAETGGMGLAVRQAPLIIPLKATSTPVSIKQYPMSQEARLGIKPHIQRLLDQGILVPCQSPWNTPLLPVKKPGTNDYRPVQDLREVNKRVEDIHPTVPNPYNLLSGLPPSHQWYTVLDLKDAFFCLRLHPTSQPLFAFEWRDPEMGISGQLTWTRLPQGFKNSPTLFNEALHRDLAGFRIQHPDLILLQYVDDLLLAATSELDCQQGTRALLQTLGDLGYRASAKKAQICQKQVKYLGYLLKEGQRWLTEARKETVMGQPIPKTPRQLREFLGTAGFCRLWIPGFAEMAAPLYPLTKPGTLFNWGPDQQKAFQEIKQALLTAPALGLPDLTKPFELFVDEKQGYAKGVLTQKLGPWRRPVAYLSKKLDPVAAGWPPCLRMVAAIAVLTKDAGKLTMGQPLVILAPHAVEALVKQPPDRWLSNARMTHYQALLLDTDRVQFGPVVALNPATLLPLPEEGLQHDCLDILAEAHGTRSDLMDQPLPDADHTWYTDGSSFLQEGQRKAGAAVTTETEVIWARALPAGTSAQRAELIALTQALKMAEGKKLNVYTDSRYAFATAHIHGEIYRRRGWLTSEGKEIKNKDEILALLKALFLPKRLSIIHCPGHQKGNSAEARGNRMADQAAREVATRETPETSTLLAGKRTADGSEFEKRTADGSEFESPKKKAKVE

SEQ ID NO: 2271 - protein, 2091 aa, synthetic construct
MPAAKRVKLDGGDKKYSIGLDIGTNSVGWAVITDEYKVPSKKFKVLGNTDRHSIKKNLIGALLFDSGETAEATRLKRTARRRYTRRKNRICYLQEIFSNEMAKVDDSFFHRLEESFLVEEDKKHERHPIFGNIVDEVAYHEKYPTIYHLRKKLVDSTDKADLRLIYLALAHMIKFRGHFLIEGDLNPDNSDVDKLFIQLVQTYNQLFEENPINASGVDAKAILSARLSKSRRLENLIAQLPGEKKNGLFGNLIALSLGLTPNFKSNFDLAEDAKLQLSKDTYDDDLDNLLAQIGDQYADLFLAAKNLSDAILLSDILRVNTEITKAPLSASMIKRYDEHHQDLTLLKALVRQQLPEKYKEIFFDQSKNGYAGYIDGGASQEEFYKFIKPILEKMDGTEELLVKLNREDLLRKQRTFDNGSIPHQIHLGELHAILRRQEDFYPFLKDNREKIEKILTFRIPYYVGPLARGNSRFAWMTRKSEETITPWNFEEVVDKGASAQSFIERMTNFDKNLPNEKVLPKHSLLYEYFTVYNELTKVKYVTEGMRKPAFLSGEQKKAIVDLLFKTNRKVTVKQLKEDYFKKIECFDSVEISGVEDRFNASLGTYHDLLKIIKDKDFLDNEENEDILEDIVLTLTLFEDREMIEERLKTYAHLFDDKVMKQLKRRRYTGWGRLSRKLINGIRDKQSGKTILDFLKSDGFANRNFMQLIHDDSLTFKEDIQKAQVSGQGDSLHEHIANLAGSPAIKKGILQTVKVVDELVKVMGRHKPENIVIEMARENQTTQKGQKNSRERMKRIEEGIKELGSQILKEHPVENTQLQNEKLYLYYLQNGRDMYVDQELDINRLSDYDVDHIVPQSFLKDDSIDNKVLTRSDKARGKSDNVPSEEVVKKMKNYWRQLLNAKLITQRKFDNLTKAERGGLSELDKAGFIKRQLVETRQITKHVAQILDSRMNTKYDENDKLIREVKVITLKSKLVSDFRKDFQFYKVREINNYHHAHDAYLNAVVGTALIKKYPKLESEFVYGDYKVYDVRKMIAKSEQEIGKATAKYFFYSNIMNFFKTEITLANGEIRKRPLIETNGETGEIVWDKGRDFATVRKVLSMPQVNIVKKTEVQTGGFSKESILPKRNSDKLIARKKDWDPKKYGGFDSPTVAYSVLVVAKVEKGKSKKLKSVKELLGITIMERSSFEKNPIDFLEAKGYKEVKKDLIIKLPKYSLFELENGRKRMLASAGELQKGNELALPSKYVNFLYLASHYEKLKGSPEDNEQKQLFVEQHKHYLDEIIEQISEFSKRVILADANLDKVLSAYNKHRDKPIREQAENIIHLFTLTNLGAPAAFKYFDTTIDRKRYTSTKEVLDATLIHQSITGLYETRIDLSQLGGDGGPAPGSSGGTLNIEDEYRLHETSKEPDVSLGSTWLSDFPQAWAETGGMGLAVRQAPLIIPLKATSTPVSIKQYPMSQEARLGIKPHIQRLLDQGILVPCQSPWNTPLLPVKKPGTNDYRPVQDLREVNKRVEDIHPTVPNPYNLLSGLPPSHQWYTVLDLKDAFFCLRLHPTSQPLFAFEWRDPEMGISGQLTWTRLPQGFKNSPTLFNEALHRDLAGFRIQHPDLILLQYVDDLLLAATSELDCQQGTRALLQTLGDLGYRASAKKAQICQKQVKYLGYLLKEGQRWLTEARKETVMGQPIPKTPRQLREFLGTAGFCRLWIPGFAEMAAPLYPLTKPGTLFNWGPDQQKAFQEIKQALLTAPALGLPDLTKPFELFVDEKQGYAKGVLTQKLGPWRRPVAYLSKKLDPVAAGWPPCLRMVAAIAVLTKDAGKLTMGQPLVILAPHAVEALVKQPPDRWLSNARMTHYQALLLDTDRVQFGPVVALNPATLLPLPEEGLQHDCLDILAEAHGTRSDLMDQPLPDADHTWYTDGSSFLQEGQRKAGAAVTTETEVIWARALPAGTSAQRAELIALTQALKMAEGKKLNVYTDSRYAFATAHIHGEIYRRRGWLTSEGKEIKNKDEILALLKALFLPKRLSIIHCPGHQKGNSAEARGNRMADQAAREVATRETPETSTLLAGKRTADGSEFEKRTADGSEFESPKKKAKVE

SEQ ID NO: 2272 - protein, 2094 aa, synthetic construct
MPAAKRVKLDGGDKKYSIGLDIGTNSVGWAVITDEYKVPSKKFKVLGNTDRHSIKKNLIGALLFDSGETAEATRLKRTARRRYTRRKNRICYLQEIFSNEMAKVDDSFFHRLEESFLVEEDKKHERHPIFGNIVDEVAYHEKYPTIYHLRKKLVDSTDKADLRLIYLALAHMIKFRGHFLIEGDLNPDNSDVDKLFIQLVQTYNQLFEENPINASGVDAKAILSARLSKSRRLENLIAQLPGEKKNGLFGNLIALSLGLTPNFKSNFDLAEDAKLQLSKDTYDDDLDNLLAQIGDQYADLFLAAKNLSDAILLSDILRVNTEITKAPLSASMIKRYDEHHQDLTLLKALVRQQLPEKYKEIFFDQSKNGYAGYIDGGASQEEFYKFIKPILEKMDGTEELLVKLNREDLLRKQRTFDNGSIPHQIHLGELHAILRRQEDFYPFLKDNREKIEKILTFRIPYYVGPLARGNSRFAWMTRKSEETITPWNFEEVVDKGASAQSFIERMTNFDKNLPNEKVLPKHSLLYEYFTVYNELTKVKYVTEGMRKPAFLSGEQKKAIVDLLFKTNRKVTVKQLKEDYFKKIECFDSVEISGVEDRFNASLGTYHDLLKIIKDKDFLDNEENEDILEDIVLTLTLFEDREMIEERLKTYAHLFDDKVMKQLKRRRYTGWGRLSRKLINGIRDKQSGKTILDFLKSDGFANRNFMQLIHDDSLTFKEDIQKAQVSGQGDSLHEHIANLAGSPAIKKGILQTVKVVDELVKVMGRHKPENIVIEMARENQTTQKGQKNSRERMKRIEEGIKELGSQILKEHPVENTQLQNEKLYLYYLQNGRDMYVDQELDINRLSDYDVDHIVPQSFLKDDSIDNKVLTRSDKARGKSDNVPSEEVVKKMKNYWRQLLNAKLITQRKFDNLTKAERGGLSELDKAGFIKRQLVETRQITKHVAQILDSRMNTKYDENDKLIREVKVITLKSKLVSDFRKDFQFYKVREINNYHHAHDAYLNAVVGTALIKKYPKLESEFVYGDYKVYDVRKMIAKSEQEIGKATAKYFFYSNIMNFFKTEITLANGEIRKRPLIETNGETGEIVWDKGRDFATVRKVLSMPQVNIVKKTEVQTGGFSKESILPKRNSDKLIARKKDWDPKKYGGFDSPTVAYSVLVVAKVEKGKSKKLKSVKELLGITIMERSSFEKNPIDFLEAKGYKEVKKDLIIKLPKYSLFELENGRKRMLASAGELQKGNELALPSKYVNFLYLASHYEKLKGSPEDNEQKQLFVEQHKHYLDEIIEQISEFSKRVILADANLDKVLSAYNKHRDKPIREQAENIIHLFTLTNLGAPAAFKYFDTTIDRKRYTSTKEVLDATLIHQSITGLYETRIDLSQLGGDGGGGSPAPGGGGGTLNIEDEYRLHETSKEPDVSLGSTWLSDFPQAWAETGGMGLAVRQAPLIIPLKATSTPVSIKQYPMSQEARLGIKPHIQRLLDQGILVPCQSPWNTPLLPVKKPGTNDYRPVQDLREVNKRVEDIHPTVPNPYNLLSGLPPSHQWYTVLDLKDAFFCLRLHPTSQPLFAFEWRDPEMGISGQLTWTRLPQGFKNSPTLFNEALHRDLAGFRIQHPDLILLQYVDDLLLAATSELDCQQGTRALLQTLGDLGYRASAKKAQICQKQVKYLGYLLKEGQRWLTEARKETVMGQPIPKTPRQLREFLGTAGFCRLWIPGFAEMAAPLYPLTKPGTLFNWGPDQQKAFQEIKQALLTAPALGLPDLTKPFELFVDEKQGYAKGVLTQKLGPWRRPVAYLSKKLDPVAAGWPPCLRMVAAIAVLTKDAGKLTMGQPLVILAPHAVEALVKQPPDRWLSNARMTHYQALLLDTDRVQFGPVVALNPATLLPLPEEGLQHDCLDILAEAHGTRSDLMDQPLPDADHTWYTDGSSFLQEGQRKAGAAVTTETEVIWARALPAGTSAQRAELIALTQALKMAEGKKLNVYTDSRYAFATAHIHGEIYRRRGWLTSEGKEIKNKDEILALLKALFLPKRLSIIHCPGHQKGNSAEARGNRMADQAAREVATRETPETSTLLAGKRTADGSEFEKRTADGSEFESPKKKAKVE

SEQ ID NO: 2273 - protein, 2096 aa, synthetic construct
MPAAKRVKLDGGDKKYSIGLDIGTNSVGWAVITDEYKVPSKKFKVLGNTDRHSIKKNLIGALLFDSGETAEATRLKRTARRRYTRRKNRICYLQEIFSNEMAKVDDSFFHRLEESFLVEEDKKHERHPIFGNIVDEVAYHEKYPTIYHLRKKLVDSTDKADLRLIYLALAHMIKFRGHFLIEGDLNPDNSDVDKLFIQLVQTYNQLFEENPINASGVDAKAILSARLSKSRRLENLIAQLPGEKKNGLFGNLIALSLGLTPNFKSNFDLAEDAKLQLSKDTYDDDLDNLLAQIGDQYADLFLAAKNLSDAILLSDILRVNTEITKAPLSASMIKRYDEHHQDLTLLKALVRQQLPEKYKEIFFDQSKNGYAGYIDGGASQEEFYKFIKPILEKMDGTEELLVKLNREDLLRKQRTFDNGSIPHQIHLGELHAILRRQEDFYPFLKDNREKIEKILTFRIPYYVGPLARGNSRFAWMTRKSEETITPWNFEEVVDKGASAQSFIERMTNFDKNLPNEKVLPKHSLLYEYFTVYNELTKVKYVTEGMRKPAFLSGEQKKAIVDLLFKTNRKVTVKQLKEDYFKKIECFDSVEISGVEDRFNASLGTYHDLLKIIKDKDFLDNEENEDILEDIVLTLTLFEDREMIEERLKTYAHLFDDKVMKQLKRRRYTGWGRLSRKLINGIRDKQSGKTILDFLKSDGFANRNFMQLIHDDSLTFKEDIQKAQVSGQGDSLHEHIANLAGSPAIKKGILQTVKVVDELVKVMGRHKPENIVIEMARENQTTQKGQKNSRERMKRIEEGIKELGSQILKEHPVENTQLQNEKLYLYYLQNGRDMYVDQELDINRLSDYDVDHIVPQSFLKDDSIDNKVLTRSDKARGKSDNVPSEEVVKKMKNYWRQLLNAKLITQRKFDNLTKAERGGLSELDKAGFIKRQLVETRQITKHVAQILDSRMNTKYDENDKLIREVKVITLKSKLVSDFRKDFQFYKVREINNYHHAHDAYLNAVVGTALIKKYPKLESEFVYGDYKVYDVRKMIAKSEQEIGKATAKYFFYSNIMNFFKTEITLANGEIRKRPLIETNGETGEIVWDKGRDFATVRKVLSMPQVNIVKKTEVQTGGFSKESILPKRNSDKLIARKKDWDPKKYGGFDSPTVAYSVLVVAKVEKGKSKKLKSVKELLGITIMERSSFEKNPIDFLEAKGYKEVKKDLIIKLPKYSLFELENGRKRMLASAGELQKGNELALPSKYVNFLYLASHYEKLKGSPEDNEQKQLFVEQHKHYLDEIIEQISEFSKRVILADANLDKVLSAYNKHRDKPIREQAENIIHLFTLTNLGAPAAFKYFDTTIDRKRYTSTKEVLDATLIHQSITGLYETRIDLSQLGGDGGGSSGGSEAAAKGGTLNIEDEYRLHETSKEPDVSLGSTWLSDFPQAWAETGGMGLAVRQAPLIIPLKATSTPVSIKQYPMSQEARLGIKPHIQRLLDQGILVPCQSPWNTPLLPVKKPGTNDYRPVQDLREVNKRVEDIHPTVPNPYNLLSGLPPSHQWYTVLDLKDAFFCLRLHPTSQPLFAFEWRDPEMGISGQLTWTRLPQGFKNSPTLFNEALHRDLAGFRIQHPDLILLQYVDDLLLAATSELDCQQGTRALLQTLGDLGYRASAKKAQICQKQVKYLGYLLKEGQRWLTEARKETVMGQPIPKTPRQLREFLGTAGFCRLWIPGFAEMAAPLYPLTKPGTLFNWGPDQQKAFQEIKQALLTAPALGLPDLTKPFELFVDEKQGYAKGVLTQKLGPWRRPVAYLSKKLDPVAAGWPPCLRMVAAIAVLTKDAGKLTMGQPLVILAPHAVEALVKQPPDRWLSNARMTHYQALLLDTDRVQFGPVVALNPATLLPLPEEGLQHDCLDILAEAHGTRSDLMDQPLPDADHTWYTDGSSFLQEGQRKAGAAVTTETEVIWARALPAGTSAQRAELIALTQALKMAEGKKLNVYTDSRYAFATAHIHGEIYRRRGWLTSEGKEIKNKDEILALLKALFLPKRLSIIHCPGHQKGNSAEARGNRMADQAAREVATRETPETSTLLAGKRTADGSEFEKRTADGSEFESPKKKAKVE

SEQ ID NO: 2274 - protein, 2094 aa, synthetic construct
MPAAKRVKLDGGDKKYSIGLDIGTNSVGWAVITDEYKVPSKKFKVLGNTDRHSIKKNLIGALLFDSGETAEATRLKRTARRRYTRRKNRICYLQEIFSNEMAKVDDSFFHRLEESFLVEEDKKHERHPIFGNIVDEVAYHEKYPTIYHLRKKLVDSTDKADLRLIYLALAHMIKFRGHFLIEGDLNPDNSDVDKLFIQLVQTYNQLFEENPINASGVDAKAILSARLSKSRRLENLIAQLPGEKKNGLFGNLIALSLGLTPNFKSNFDLAEDAKLQLSKDTYDDDLDNLLAQIGDQYADLFLAAKNLSDAILLSDILRVNTEITKAPLSASMIKRYDEHHQDLTLLKALVRQQLPEKYKEIFFDQSKNGYAGYIDGGASQEEFYKFIKPILEKMDGTEELLVKLNREDLLRKQRTFDNGSIPHQIHLGELHAILRRQEDFYPFLKDNREKIEKILTFRIPYYVGPLARGNSRFAWMTRKSEETITPWNFEEVVDKGASAQSFIERMTNFDKNLPNEKVLPKHSLLYEYFTVYNELTKVKYVTEGMRKPAFLSGEQKKAIVDLLFKTNRKVTVKQLKEDYFKKIECFDSVEISGVEDRFNASLGTYHDLLKIIKDKDFLDNEENEDILEDIVLTLTLFEDREMIEERLKTYAHLFDDKVMKQLKRRRYTGWGRLSRKLINGIRDKQSGKTILDFLKSDGFANRNFMQLIHDDSLTFKEDIQKAQVSGQGDSLHEHIANLAGSPAIKKGILQTVKVVDELVKVMGRHKPENIVIEMARENQTTQKGQKNSRERMKRIEEGIKELGSQILKEHPVENTQLQNEKLYLYYLQNGRDMYVDQELDINRLSDYDVDHIVPQSFLKDDSIDNKVLTRSDKARGKSDNVPSEEVVKKMKNYWRQLLNAKLITQRKFDNLTKAERGGLSELDKAGFIKRQLVETRQITKHVAQILDSRMNTKYDENDKLIREVKVITLKSKLVSDFRKDFQFYKVREINNYHHAHDAYLNAVVGTALIKKYPKLESEFVYGDYKVYDVRKMIAKSEQEIGKATAKYFFYSNIMNFFKTEITLANGEIRKRPLIETNGETGEIVWDKGRDFATVRKVLSMPQVNIVKKTEVQTGGFSKESILPKRNSDKLIARKKDWDPKKYGGFDSPTVAYSVLVVAKVEKGKSKKLKSVKELLGITIMERSSFEKNPIDFLEAKGYKEVKKDLIIKLPKYSLFELENGRKRMLASAGELQKGNELALPSKYVNFLYLASHYEKLKGSPEDNEQKQLFVEQHKHYLDEIIEQISEFSKRVILADANLDKVLSAYNKHRDKPIREQAENIIHLFTLTNLGAPAAFKYFDTTIDRKRYTSTKEVLDATLIHQSITGLYETRIDLSQLGGDGGGGSGGSGGSGGTLNIEDEYRLHETSKEPDVSLGSTWLSDFPQAWAETGGMGLAVRQAPLIIPLKATSTPVSIKQYPMSQEARLGIKPHIQRLLDQGILVPCQSPWNTPLLPVKKPGTNDYRPVQDLREVNKRVEDIHPTVPNPYNLLSGLPPSHQWYTVLDLKDAFFCLRLHPTSQPLFAFEWRDPEMGISGQLTWTRLPQGFKNSPTLFNEALHRDLAGFRIQHPDLILLQYVDDLLLAATSELDCQQGTRALLQTLGDLGYRASAKKAQICQKQVKYLGYLLKEGQRWLTEARKETVMGQPIPKTPRQLREFLGTAGFCRLWIPGFAEMAAPLYPLTKPGTLFNWGPDQQKAFQEIKQALLTAPALGLPDLTKPFELFVDEKQGYAKGVLTQKLGPWRRPVAYLSKKLDPVAAGWPPCLRMVAAIAVLTKDAGKLTMGQPLVILAPHAVEALVKQPPDRWLSNARMTHYQALLLDTDRVQFGPVVALNPATLLPLPEEGLQHDCLDILAEAHGTRSDLMDQPLPDADHTWYTDGSSFLQEGQRKAGAAVTTETEVIWARALPAGTSAQRAELIALTQALKMAEGKKLNVYTDSRYAFATAHIHGEIYRRRGWLTSEGKEIKNKDEILALLKALFLPKRLSIIHCPGHQKGNSAEARGNRMADQAAREVATRETPETSTLLAGKRTADGSEFEKRTADGSEFESPKKKAKVE

SEQ ID NO: 2275 - protein, 2096 aa, synthetic construct
MPAAKRVKLDGGDKKYSIGLDIGTNSVGWAVITDEYKVPSKKFKVLGNTDRHSIKKNLIGALLFDSGETAEATRLKRTARRRYTRRKNRICYLQEIFSNEMAKVDDSFFHRLEESFLVEEDKKHERHPIFGNIVDEVAYHEKYPTIYHLRKKLVDSTDKADLRLIYLALAHMIKFRGHFLIEGDLNPDNSDVDKLFIQLVQTYNQLFEENPINASGVDAKAILSARLSKSRRLENLIAQLPGEKKNGLFGNLIALSLGLTPNFKSNFDLAEDAKLQLSKDTYDDDLDNLLAQIGDQYADLFLAAKNLSDAILLSDILRVNTEITKAPLSASMIKRYDEHHQDLTLLKALVRQQLPEKYKEIFFDQSKNGYAGYIDGGASQEEFYKFIKPILEKMDGTEELLVKLNREDLLRKQRTFDNGSIPHQIHLGELHAILRRQEDFYPFLKDNREKIEKILTFRIPYYVGPLARGNSRFAWMTRKSEETITPWNFEEVVDKGASAQSFIERMTNFDKNLPNEKVLPKHSLLYEYFTVYNELTKVKYVTEGMRKPAFLSGEQKKAIVDLLFKTNRKVTVKQLKEDYFKKIECFDSVEISGVEDRFNASLGTYHDLLKIIKDKDFLDNEENEDILEDIVLTLTLFEDREMIEERLKTYAHLFDDKVMKQLKRRRYTGWGRLSRKLINGIRDKQSGKTILDFLKSDGFANRNFMQLIHDDSLTFKEDIQKAQVSGQGDSLHEHIANLAGSPAIKKGILQTVKVVDELVKVMGRHKPENIVIEMARENQTTQKGQKNSRERMKRIEEGIKELGSQILKEHPVENTQLQNEKLYLYYLQNGRDMYVDQELDINRLSDYDVDHIVPQSFLKDDSIDNKVLTRSDKARGKSDNVPSEEVVKKMKNYWRQLLNAKLITQRKFDNLTKAERGGLSELDKAGFIKRQLVETRQITKHVAQILDSRMNTKYDENDKLIREVKVITLKSKLVSDFRKDFQFYKVREINNYHHAHDAYLNAVVGTALIKKYPKLESEFVYGDYKVYDVRKMIAKSEQEIGKATAKYFFYSNIMNFFKTEITLANGEIRKRPLIETNGETGEIVWDKGRDFATVRKVLSMPQVNIVKKTEVQTGGFSKESILPKRNSDKLIARKKDWDPKKYGGFDSPTVAYSVLVVAKVEKGKSKKLKSVKELLGITIMERSSFEKNPIDFLEAKGYKEVKKDLIIKLPKYSLFELENGRKRMLASAGELQKGNELALPSKYVNFLYLASHYEKLKGSPEDNEQKQLFVEQHKHYLDEIIEQISEFSKRVILADANLDKVLSAYNKHRDKPIREQAENIIHLFTLTNLGAPAAFKYFDTTIDRKRYTSTKEVLDATLIHQSITGLYETRIDLSQLGGDGGGGGEAAAKGGSGGTLNIEDEYRLHETSKEPDVSLGSTWLSDFPQAWAETGGMGLAVRQAPLIIPLKATSTPVSIKQYPMSQEARLGIKPHIQRLLDQGILVPCQSPWNTPLLPVKKPGTNDYRPVQDLREVNKRVEDIHPTVPNPYNLLSGLPPSHQWYTVLDLKDAFFCLRLHPTSQPLFAFEWRDPEMGISGQLTWTRLPQGFKNSPTLFNEALHRDLAGFRIQHPDLILLQYVDDLLLAATSELDCQQGTRALLQTLGDLGYRASAKKAQICQKQVKYLGYLLKEGQRWLTEARKETVMGQPIPKTPRQLREFLGTAGFCRLWIPGFAEMAAPLYPLTKPGTLFNWGPDQQKAFQEIKQALLTAPALGLPDLTKPFELFVDEKQGYAKGVLTQKLGPWRRPVAYLSKKLDPVAAGWPPCLRMVAAIAVLTKDAGKLTMGQPLVILAPHAVEALVKQPPDRWLSNARMTHYQALLLDTDRVQFGPVVALNPATLLPLPEEGLQHDCLDILAEAHGTRSDLMDQPLPDADHTWYTDGSSFLQEGQRKAGAAVTTETEVIWARALPAGTSAQRAELIALTQALKMAEGKKLNVYTDSRYAFATAHIHGEIYRRRGWLTSEGKEIKNKDEILALLKALFLPKRLSIIHCPGHQKGNSAEARGNRMADQAAREVATRETPETSTLLAGKRTADGSEFEKRTADGSEFESPKKKAKVE

SEQ ID NO: 2276 - protein, 2095 aa, synthetic construct
MPAAKRVKLDGGDKKYSIGLDIGTNSVGWAVITDEYKVPSKKFKVLGNTDRHSIKKNLIGALLFDSGETAEATRLKRTARRRYTRRKNRICYLQEIFSNEMAKVDDSFFHRLEESFLVEEDKKHERHPIFGNIVDEVAYHEKYPTIYHLRKKLVDSTDKADLRLIYLALAHMIKFRGHFLIEGDLNPDNSDVDKLFIQLVQTYNQLFEENPINASGVDAKAILSARLSKSRRLENLIAQLPGEKKNGLFGNLIALSLGLTPNFKSNFDLAEDAKLQLSKDTYDDDLDNLLAQIGDQYADLFLAAKNLSDAILLSDILRVNTEITKAPLSASMIKRYDEHHQDLTLLKALVRQQLPEKYKEIFFDQSKNGYAGYIDGGASQEEFYKFIKPILEKMDGTEELLVKLNREDLLRKQRTFDNGSIPHQIHLGELHAILRRQEDFYPFLKDNREKIEKILTFRIPYYVGPLARGNSRFAWMTRKSEETITPWNFEEVVDKGASAQSFIERMTNFDKNLPNEKVLPKHSLLYEYFTVYNELTKVKYVTEGMRKPAFLSGEQKKAIVDLLFKTNRKVTVKQLKEDYFKKIECFDSVEISGVEDRFNASLGTYHDLLKIIKDKDFLDNEENEDILEDIVLTLTLFEDREMIEERLKTYAHLFDDKVMKQLKRRRYTGWGRLSRKLINGIRDKQSGKTILDFLKSDGFANRNFMQLIHDDSLTFKEDIQKAQVSGQGDSLHEHIANLAGSPAIKKGILQTVKVVDELVKVMGRHKPENIVIEMARENQTTQKGQKNSRERMKRIEEGIKELGSQILKEHPVENTQLQNEKLYLYYLQNGRDMYVDQELDINRLSDYDVDHIVPQSFLKDDSIDNKVLTRSDKARGKSDNVPSEEVVKKMKNYWRQLLNAKLITQRKFDNLTKAERGGLSELDKAGFIKRQLVETRQITKHVAQILDSRMNTKYDENDKLIREVKVITLKSKLVSDFRKDFQFYKVREINNYHHAHDAYLNAVVGTALIKKYPKLESEFVYGDYKVYDVRKMIAKSEQEIGKATAKYFFYSNIMNFFKTEITLANGEIRKRPLIETNGETGEIVWDKGRDFATVRKVLSMPQVNIVKKTEVQTGGFSKESILPKRNSDKLIARKKDWDPKKYGGFDSPTVAYSVLVVAKVEKGKSKKLKSVKELLGITIMERSSFEKNPIDFLEAKGYKEVKKDLIIKLPKYSLFELENGRKRMLASAGELQKGNELALPSKYVNFLYLASHYEKLKGSPEDNEQKQLFVEQHKHYLDEIIEQISEFSKRVILADANLDKVLSAYNKHRDKPIREQAENIIHLFTLTNLGAPAAFKYFDTTIDRKRYTSTKEVLDATLIHQSITGLYETRIDLSQLGGDGGGGGGSGGGGSGGTLNIEDEYRLHETSKEPDVSLGSTWLSDFPQAWAETGGMGLAVRQAPLIIPLKATSTPVSIKQYPMSQEARLGIKPHIQRLLDQGILVPCQSPWNTPLLPVKKPGTNDYRPVQDLREVNKRVEDIHPTVPNPYNLLSGLPPSHQWYTVLDLKDAFFCLRLHPTSQPLFAFEWRDPEMGISGQLTWTRLPQGFKNSPTLFNEALHRDLAGFRIQHPDLILLQYVDDLLLAATSELDCQQGTRALLQTLGDLGYRASAKKAQICQKQVKYLGYLLKEGQRWLTEARKETVMGQPIPKTPRQLREFLGTAGFCRLWIPGFAEMAAPLYPLTKPGTLFNWGPDQQKAFQEIKQALLTAPALGLPDLTKPFELFVDEKQGYAKGVLTQKLGPWRRPVAYLSKKLDPVAAGWPPCLRMVAAIAVLTKDAGKLTMGQPLVILAPHAVEALVKQPPDRWLSNARMTHYQALLLDTDRVQFGPVVALNPATLLPLPEEGLQHDCLDILAEAHGTRSDLMDQPLPDADHTWYTDGSSFLQEGQRKAGAAVTTETEVIWARALPAGTSAQRAELIALTQALKMAEGKKLNVYTDSRYAFATAHIHGEIYRRRGWLTSEGKEIKNKDEILALLKALFLPKRLSIIHCPGHQKGNSAEARGNRMADQAAREVATRETPETSTLLAGKRTADGSEFEKRTADGSEFESPKKKAKVE

SEQ ID NO: 2277 - protein, 2096 aa, synthetic construct
MPAAKRVKLDGGDKKYSIGLDIGTNSVGWAVITDEYKVPSKKFKVLGNTDRHSIKKNLIGALLFDSGETAEATRLKRTARRRYTRRKNRICYLQEIFSNEMAKVDDSFFHRLEESFLVEEDKKHERHPIFGNIVDEVAYHEKYPTIYHLRKKLVDSTDKADLRLIYLALAHMIKFRGHFLIEGDLNPDNSDVDKLFIQLVQTYNQLFEENPINASGVDAKAILSARLSKSRRLENLIAQLPGEKKNGLFGNLIALSLGLTPNFKSNFDLAEDAKLQLSKDTYDDDLDNLLAQIGDQYADLFLAAKNLSDAILLSDILRVNTEITKAPLSASMIKRYDEHHQDLTLLKALVRQQLPEKYKEIFFDQSKNGYAGYIDGGASQEEFYKFIKPILEKMDGTEELLVKLNREDLLRKQRTFDNGSIPHQIHLGELHAILRRQEDFYPFLKDNREKIEKILTFRIPYYVGPLARGNSRFAWMTRKSEETITPWNFEEVVDKGASAQSFIERMTNFDKNLPNEKVLPKHSLLYEYFTVYNELTKVKYVTEGMRKPAFLSGEQKKAIVDLLFKTNRKVTVKQLKEDYFKKIECFDSVEISGVEDRFNASLGTYHDLLKIIKDKDFLDNEENEDILEDIVLTLTLFEDREMIEERLKTYAHLFDDKVMKQLKRRRYTGWGRLSRKLINGIRDKQSGKTILDFLKSDGFANRNFMQLIHDDSLTFKEDIQKAQVSGQGDSLHEHIANLAGSPAIKKGILQTVKVVDELVKVMGRHKPENIVIEMARENQTTQKGQKNSRERMKRIEEGIKELGSQILKEHPVENTQLQNEKLYLYYLQNGRDMYVDQELDINRLSDYDVDHIVPQSFLKDDSIDNKVLTRSDKARGKSDNVPSEEVVKKMKNYWRQLLNAKLITQRKFDNLTKAERGGLSELDKAGFIKRQLVETRQITKHVAQILDSRMNTKYDENDKLIREVKVITLKSKLVSDFRKDFQFYKVREINNYHHAHDAYLNAVVGTALIKKYPKLESEFVYGDYKVYDVRKMIAKSEQEIGKATAKYFFYSNIMNFFKTEITLANGEIRKRPLIETNGETGEIVWDKGRDFATVRKVLSMPQVNIVKKTEVQTGGFSKESILPKRNSDKLIARKKDWDPKKYGGFDSPTVAYSVLVVAKVEKGKSKKLKSVKELLGITIMERSSFEKNPIDFLEAKGYKEVKKDLIIKLPKYSLFELENGRKRMLASAGELQKGNELALPSKYVNFLYLASHYEKLKGSPEDNEQKQLFVEQHKHYLDEIIEQISEFSKRVILADANLDKVLSAYNKHRDKPIREQAENIIHLFTLTNLGAPAAFKYFDTTIDRKRYTSTKEVLDATLIHQSITGLYETRIDLSQLGGDGGEAAAKPAPGGSGGTLNIEDEYRLHETSKEPDVSLGSTWLSDFPQAWAETGGMGLAVRQAPLIIPLKATSTPVSIKQYPMSQEARLGIKPHIQRLLDQGILVPCQSPWNTPLLPVKKPGTNDYRPVQDLREVNKRVEDIHPTVPNPYNLLSGLPPSHQWYTVLDLKDAFFCLRLHPTSQPLFAFEWRDPEMGISGQLTWTRLPQGFKNSPTLFNEALHRDLAGFRIQHPDLILLQYVDDLLLAATSELDCQQGTRALLQTLGDLGYRASAKKAQICQKQVKYLGYLLKEGQRWLTEARKETVMGQPIPKTPRQLREFLGTAGFCRLWIPGFAEMAAPLYPLTKPGTLFNWGPDQQKAFQEIKQALLTAPALGLPDLTKPFELFVDEKQGYAKGVLTQKLGPWRRPVAYLSKKLDPVAAGWPPCLRMVAAIAVLTKDAGKLTMGQPLVILAPHAVEALVKQPPDRWLSNARMTHYQALLLDTDRVQFGPVVALNPATLLPLPEEGLQHDCLDILAEAHGTRSDLMDQPLPDADHTWYTDGSSFLQEGQRKAGAAVTTETEVIWARALPAGTSAQRAELIALTQALKMAEGKKLNVYTDSRYAFATAHIHGEIYRRRGWLTSEGKEIKNKDEILALLKALFLPKRLSIIHCPGHQKGNSAEARGNRMADQAAREVATRETPETSTLLAGKRTADGSEFEKRTADGSEFESPKKKAKVE

SEQ ID NO: 2278 - protein, 2096 aa, synthetic construct
MPAAKRVKLDGGDKKYSIGLDIGTNSVGWAVITDEYKVPSKKFKVLGNTDRHSIKKNLIGALLFDSGETAEATRLKRTARRRYTRRKNRICYLQEIFSNEMAKVDDSFFHRLEESFLVEEDKKHERHPIFGNIVDEVAYHEKYPTIYHLRKKLVDSTDKADLRLIYLALAHMIKFRGHFLIEGDLNPDNSDVDKLFIQLVQTYNQLFEENPINASGVDAKAILSARLSKSRRLENLIAQLPGEKKNGLFGNLIALSLGLTPNFKSNFDLAEDAKLQLSKDTYDDDLDNLLAQIGDQYADLFLAAKNLSDAILLSDILRVNTEITKAPLSASMIKRYDEHHQDLTLLKALVRQQLPEKYKEIFFDQSKNGYAGYIDGGASQEEFYKFIKPILEKMDGTEELLVKLNREDLLRKQRTFDNGSIPHQIHLGELHAILRRQEDFYPFLKDNREKIEKILTFRIPYYVGPLARGNSRFAWMTRKSEETITPWNFEEVVDKGASAQSFIERMTNFDKNLPNEKVLPKHSLLYEYFTVYNELTKVKYVTEGMRKPAFLSGEQKKAIVDLLFKTNRKVTVKQLKEDYFKKIECFDSVEISGVEDRFNASLGTYHDLLKIIKDKDFLDNEENEDILEDIVLTLTLFEDREMIEERLKTYAHLFDDKVMKQLKRRRYTGWGRLSRKLINGIRDKQSGKTILDFLKSDGFANRNFMQLIHDDSLTFKEDIQKAQVSGQGDSLHEHIANLAGSPAIKKGILQTVKVVDELVKVMGRHKPENIVIEMARENQTTQKGQKNSRERMKRIEEGIKELGSQILKEHPVENTQLQNEKLYLYYLQNGRDMYVDQELDINRLSDYDVDHIVPQSFLKDDSIDNKVLTRSDKARGKSDNVPSEEVVKKMKNYWRQLLNAKLITQRKFDNLTKAERGGLSELDKAGFIKRQLVETRQITKHVAQILDSRMNTKYDENDKLIREVKVITLKSKLVSDFRKDFQFYKVREINNYHHAHDAYLNAVVGTALIKKYPKLESEFVYGDYKVYDVRKMIAKSEQEIGKATAKYFFYSNIMNFFKTEITLANGEIRKRPLIETNGETGEIVWDKGRDFATVRKVLSMPQVNIVKKTEVQTGGFSKESILPKRNSDKLIARKKDWDPKKYGGFDSPTVAYSVLVVAKVEKGKSKKLKSVKELLGITIMERSSFEKNPIDFLEAKGYKEVKKDLIIKLPKYSLFELENGRKRMLASAGELQKGNELALPSKYVNFLYLASHYEKLKGSPEDNEQKQLFVEQHKHYLDEIIEQISEFSKRVILADANLDKVLSAYNKHRDKPIREQAENIIHLFTLTNLGAPAAFKYFDTTIDRKRYTSTKEVLDATLIHQSITGLYETRIDLSQLGGDGGEAAAKGGGPAPGGTLNIEDEYRLHETSKEPDVSLGSTWLSDFPQAWAETGGMGLAVRQAPLIIPLKATSTPVSIKQYPMSQEARLGIKPHIQRLLDQGILVPCQSPWNTPLLPVKKPGTNDYRPVQDLREVNKRVEDIHPTVPNPYNLLSGLPPSHQWYTVLDLKDAFFCLRLHPTSQPLFAFEWRDPEMGISGQLTWTRLPQGFKNSPTLFNEALHRDLAGFRIQHPDLILLQYVDDLLLAATSELDCQQGTRALLQTLGDLGYRASAKKAQICQKQVKYLGYLLKEGQRWLTEARKETVMGQPIPKTPRQLREFLGTAGFCRLWIPGFAEMAAPLYPLTKPGTLFNWGPDQQKAFQEIKQALLTAPALGLPDLTKPFELFVDEKQGYAKGVLTQKLGPWRRPVAYLSKKLDPVAAGWPPCLRMVAAIAVLTKDAGKLTMGQPLVILAPHAVEALVKQPPDRWLSNARMTHYQALLLDTDRVQFGPVVALNPATLLPLPEEGLQHDCLDILAEAHGTRSDLMDQPLPDADHTWYTDGSSFLQEGQRKAGAAVTTETEVIWARALPAGTSAQRAELIALTQALKMAEGKKLNVYTDSRYAFATAHIHGEIYRRRGWLTSEGKEIKNKDEILALLKALFLPKRLSIIHCPGHQKGNSAEARGNRMADQAAREVATRETPETSTLLAGKRTADGSEFEKRTADGSEFESPKKKAKVE

SEQ ID NO: 2279 - protein, 2096 aa, synthetic construct
MPAAKRVKLDGGDKKYSIGLDIGTNSVGWAVITDEYKVPSKKFKVLGNTDRHSIKKNLIGALLFDSGETAEATRLKRTARRRYTRRKNRICYLQEIFSNEMAKVDDSFFHRLEESFLVEEDKKHERHPIFGNIVDEVAYHEKYPTIYHLRKKLVDSTDKADLRLIYLALAHMIKFRGHFLIEGDLNPDNSDVDKLFIQLVQTYNQLFEENPINASGVDAKAILSARLSKSRRLENLIAQLPGEKKNGLFGNLIALSLGLTPNFKSNFDLAEDAKLQLSKDTYDDDLDNLLAQIGDQYADLFLAAKNLSDAILLSDILRVNTEITKAPLSASMIKRYDEHHQDLTLLKALVRQQLPEKYKEIFFDQSKNGYAGYIDGGASQEEFYKFIKPILEKMDGTEELLVKLNREDLLRKQRTFDNGSIPHQIHLGELHAILRRQEDFYPFLKDNREKIEKILTFRIPYYVGPLARGNSRFAWMTRKSEETITPWNFEEVVDKGASAQSFIERMTNFDKNLPNEKVLPKHSLLYEYFTVYNELTKVKYVTEGMRKPAFLSGEQKKAIVDLLFKTNRKVTVKQLKEDYFKKIECFDSVEISGVEDRFNASLGTYHDLLKIIKDKDFLDNEENEDILEDIVLTLTLFEDREMIEERLKTYAHLFDDKVMKQLKRRRYTGWGRLSRKLINGIRDKQSGKTILDFLKSDGFANRNFMQLIHDDSLTFKEDIQKAQVSGQGDSLHEHIANLAGSPAIKKGILQTVKVVDELVKVMGRHKPENIVIEMARENQTTQKGQKNSRERMKRIEEGIKELGSQILKEHPVENTQLQNEKLYLYYLQNGRDMYVDQELDINRLSDYDVDHIVPQSFLKDDSIDNKVLTRSDKARGKSDNVPSEEVVKKMKNYWRQLLNAKLITQRKFDNLTKAERGGLSELDKAGFIKRQLVETRQITKHVAQILDSRMNTKYDENDKLIREVKVITLKSKLVSDFRKDFQFYKVREINNYHHAHDAYLNAVVGTALIKKYPKLESEFVYGDYKVYDVRKMIAKSEQEIGKATAKYFFYSNIMNFFKTEITLANGEIRKRPLIETNGETGEIVWDKGRDFATVRKVLSMPQVNIVKKTEVQTGGFSKESILPKRNSDKLIARKKDWDPKKYGGFDSPTVAYSVLVVAKVEKGKSKKLKSVKELLGITIMERSSFEKNPIDFLEAKGYKEVKKDLIIKLPKYSLFELENGRKRMLASAGELQKGNELALPSKYVNFLYLASHYEKLKGSPEDNEQKQLFVEQHKHYLDEIIEQISEFSKRVILADANLDKVLSAYNKHRDKPIREQAENIIHLFTLTNLGAPAAFKYFDTTIDRKRYTSTKEVLDATLIHQSITGLYETRIDLSQLGGDGGGGGEAAAKPAPGGTLNIEDEYRLHETSKEPDVSLGSTWLSDFPQAWAETGGMGLAVRQAPLIIPLKATSTPVSIKQYPMSQEARLGIKPHIQRLLDQGILVPCQSPWNTPLLPVKKPGTNDYRPVQDLREVNKRVEDIHPTVPNPYNLLSGLPPSHQWYTVLDLKDAFFCLRLHPTSQPLFAFEWRDPEMGISGQLTWTRLPQGFKNSPTLFNEALHRDLAGFRIQHPDLILLQYVDDLLLAATSELDCQQGTRALLQTLGDLGYRASAKKAQICQKQVKYLGYLLKEGQRWLTEARKETVMGQPIPKTPRQLREFLGTAGFCRLWIPGFAEMAAPLYPLTKPGTLFNWGPDQQKAFQEIKQALLTAPALGLPDLTKPFELFVDEKQGYAKGVLTQKLGPWRRPVAYLSKKLDPVAAGWPPCLRMVAAIAVLTKDAGKLTMGQPLVILAPHAVEALVKQPPDRWLSNARMTHYQALLLDTDRVQFGPVVALNPATLLPLPEEGLQHDCLDILAEAHGTRSDLMDQPLPDADHTWYTDGSSFLQEGQRKAGAAVTTETEVIWARALPAGTSAQRAELIALTQALKMAEGKKLNVYTDSRYAFATAHIHGEIYRRRGWLTSEGKEIKNKDEILALLKALFLPKRLSIIHCPGHQKGNSAEARGNRMADQAAREVATRETPETSTLLAGKRTADGSEFEKRTADGSEFESPKKKAKVE

SEQ ID NO: 2280 - protein, 2100 aa, synthetic construct
MPAAKRVKLDGGDKKYSIGLDIGTNSVGWAVITDEYKVPSKKFKVLGNTDRHSIKKNLIGALLFDSGETAEATRLKRTARRRYTRRKNRICYLQEIFSNEMAKVDDSFFHRLEESFLVEEDKKHERHPIFGNIVDEVAYHEKYPTIYHLRKKLVDSTDKADLRLIYLALAHMIKFRGHFLIEGDLNPDNSDVDKLFIQLVQTYNQLFEENPINASGVDAKAILSARLSKSRRLENLIAQLPGEKKNGLFGNLIALSLGLTPNFKSNFDLAEDAKLQLSKDTYDDDLDNLLAQIGDQYADLFLAAKNLSDAILLSDILRVNTEITKAPLSASMIKRYDEHHQDLTLLKALVRQQLPEKYKEIFFDQSKNGYAGYIDGGASQEEFYKFIKPILEKMDGTEELLVKLNREDLLRKQRTFDNGSIPHQIHLGELHAILRRQEDFYPFLKDNREKIEKILTFRIPYYVGPLARGNSRFAWMTRKSEETITPWNFEEVVDKGASAQSFIERMTNFDKNLPNEKVLPKHSLLYEYFTVYNELTKVKYVTEGMRKPAFLSGEQKKAIVDLLFKTNRKVTVKQLKEDYFKKIECFDSVEISGVEDRFNASLGTYHDLLKIIKDKDFLDNEENEDILEDIVLTLTLFEDREMIEERLKTYAHLFDDKVMKQLKRRRYTGWGRLSRKLINGIRDKQSGKTILDFLKSDGFANRNFMQLIHDDSLTFKEDIQKAQVSGQGDSLHEHIANLAGSPAIKKGILQTVKVVDELVKVMGRHKPENIVIEMARENQTTQKGQKNSRERMKRIEEGIKELGSQILKEHPVENTQLQNEKLYLYYLQNGRDMYVDQELDINRLSDYDVDHIVPQSFLKDDSIDNKVLTRSDKARGKSDNVPSEEVVKKMKNYWRQLLNAKLITQRKFDNLTKAERGGLSELDKAGFIKRQLVETRQITKHVAQILDSRMNTKYDENDKLIREVKVITLKSKLVSDFRKDFQFYKVREINNYHHAHDAYLNAVVGTALIKKYPKLESEFVYGDYKVYDVRKMIAKSEQEIGKATAKYFFYSNIMNFFKTEITLANGEIRKRPLIETNGETGEIVWDKGRDFATVRKVLSMPQVNIVKKTEVQTGGFSKESILPKRNSDKLIARKKDWDPKKYGGFDSPTVAYSVLVVAKVEKGKSKKLKSVKELLGITIMERSSFEKNPIDFLEAKGYKEVKKDLIIKLPKYSLFELENGRKRMLASAGELQKGNELALPSKYVNFLYLASHYEKLKGSPEDNEQKQLFVEQHKHYLDEIIEQISEFSKRVILADANLDKVLSAYNKHRDKPIREQAENIIHLFTLTNLGAPAAFKYFDTTIDRKRYTSTKEVLDATLIHQSITGLYETRIDLSQLGGDGGGSSGSSGSSGSSGSSGGTLNIEDEYRLHETSKEPDVSLGSTWLSDFPQAWAETGGMGLAVRQAPLIIPLKATSTPVSIKQYPMSQEARLGIKPHIQRLLDQGILVPCQSPWNTPLLPVKKPGTNDYRPVQDLREVNKRVEDIHPTVPNPYNLLSGLPPSHQWYTVLDLKDAFFCLRLHPTSQPLFAFEWRDPEMGISGQLTWTRLPQGFKNSPTLFNEALHRDLAGFRIQHPDLILLQYVDDLLLAATSELDCQQGTRALLQTLGDLGYRASAKKAQICQKQVKYLGYLLKEGQRWLTEARKETVMGQPIPKTPRQLREFLGTAGFCRLWIPGFAEMAAPLYPLTKPGTLFNWGPDQQKAFQEIKQALLTAPALGLPDLTKPFELFVDEKQGYAKGVLTQKLGPWRRPVAYLSKKLDPVAAGWPPCLRMVAAIAVLTKDAGKLTMGQPLVILAPHAVEALVKQPPDRWLSNARMTHYQALLLDTDRVQFGPVVALNPATLLPLPEEGLQHDCLDILAEAHGTRSDLMDQPLPDADHTWYTDGSSFLQEGQRKAGAAVTTETEVIWARALPAGTSAQRAELIALTQALKMAEGKKLNVYTDSRYAFATAHIHGEIYRRRGWLTSEGKEIKNKDEILALLKALFLPKRLSIIHCPGHQKGNSAEARGNRMADQAAREVATRETPETSTLLAGKRTADGSEFEKRTADGSEFESPKKKAKVE

SEQ ID NO: 2281 - protein, 2093 aa, synthetic construct
MPAAKRVKLDGGDKKYSIGLDIGTNSVGWAVITDEYKVPSKKFKVLGNTDRHSIKKNLIGALLFDSGETAEATRLKRTARRRYTRRKNRICYLQEIFSNEMAKVDDSFFHRLEESFLVEEDKKHERHPIFGNIVDEVAYHEKYPTIYHLRKKLVDSTDKADLRLIYLALAHMIKFRGHFLIEGDLNPDNSDVDKLFIQLVQTYNQLFEENPINASGVDAKAILSARLSKSRRLENLIAQLPGEKKNGLFGNLIALSLGLTPNFKSNFDLAEDAKLQLSKDTYDDDLDNLLAQIGDQYADLFLAAKNLSDAILLSDILRVNTEITKAPLSASMIKRYDEHHQDLTLLKALVRQQLPEKYKEIFFDQSKNGYAGYIDGGASQEEFYKFIKPILEKMDGTEELLVKLNREDLLRKQRTFDNGSIPHQIHLGELHAILRRQEDFYPFLKDNREKIEKILTFRIPYYVGPLARGNSRFAWMTRKSEETITPWNFEEVVDKGASAQSFIERMTNFDKNLPNEKVLPKHSLLYEYFTVYNELTKVKYVTEGMRKPAFLSGEQKKAIVDLLFKTNRKVTVKQLKEDYFKKIECFDSVEISGVEDRFNASLGTYHDLLKIIKDKDFLDNEENEDILEDIVLTLTLFEDREMIEERLKTYAHLFDDKVMKQLKRRRYTGWGRLSRKLINGIRDKQSGKTILDFLKSDGFANRNFMQLIHDDSLTFKEDIQKAQVSGQGDSLHEHIANLAGSPAIKKGILQTVKVVDELVKVMGRHKPENIVIEMARENQTTQKGQKNSRERMKRIEEGIKELGSQILKEHPVENTQLQNEKLYLYYLQNGRDMYVDQELDINRLSDYDVDHIVPQSFLKDDSIDNKVLTRSDKARGKSDNVPSEEVVKKMKNYWRQLLNAKLITQRKFDNLTKAERGGLSELDKAGFIKRQLVETRQITKHVAQILDSRMNTKYDENDKLIREVKVITLKSKLVSDFRKDFQFYKVREINNYHHAHDAYLNAVVGTALIKKYPKLESEFVYGDYKVYDVRKMIAKSEQEIGKATAKYFFYSNIMNFFKTEITLANGEIRKRPLIETNGETGEIVWDKGRDFATVRKVLSMPQVNIVKKTEVQTGGFSKESILPKRNSDKLIARKKDWDPKKYGGFDSPTVAYSVLVVAKVEKGKSKKLKSVKELLGITIMERSSFEKNPIDFLEAKGYKEVKKDLIIKLPKYSLFELENGRKRMLASAGELQKGNELALPSKYVNFLYLASHYEKLKGSPEDNEQKQLFVEQHKHYLDEIIEQISEFSKRVILADANLDKVLSAYNKHRDKPIREQAENIIHLFTLTNLGAPAAFKYFDTTIDRKRYTSTKEVLDATLIHQSITGLYETRIDLSQLGGDGGEAAAKGGGGGTLNIEDEYRLHETSKEPDVSLGSTWLSDFPQAWAETGGMGLAVRQAPLIIPLKATSTPVSIKQYPMSQEARLGIKPHIQRLLDQGILVPCQSPWNTPLLPVKKPGTNDYRPVQDLREVNKRVEDIHPTVPNPYNLLSGLPPSHQWYTVLDLKDAFFCLRLHPTSQPLFAFEWRDPEMGISGQLTWTRLPQGFKNSPTLFNEALHRDLAGFRIQHPDLILLQYVDDLLLAATSELDCQQGTRALLQTLGDLGYRASAKKAQICQKQVKYLGYLLKEGQRWLTEARKETVMGQPIPKTPRQLREFLGTAGFCRLWIPGFAEMAAPLYPLTKPGTLFNWGPDQQKAFQEIKQALLTAPALGLPDLTKPFELFVDEKQGYAKGVLTQKLGPWRRPVAYLSKKLDPVAAGWPPCLRMVAAIAVLTKDAGKLTMGQPLVILAPHAVEALVKQPPDRWLSNARMTHYQALLLDTDRVQFGPVVALNPATLLPLPEEGLQHDCLDILAEAHGTRSDLMDQPLPDADHTWYTDGSSFLQEGQRKAGAAVTTETEVIWARALPAGTSAQRAELIALTQALKMAEGKKLNVYTDSRYAFATAHIHGEIYRRRGWLTSEGKEIKNKDEILALLKALFLPKRLSIIHCPGHQKGNSAEARGNRMADQAAREVATRETPETSTLLAGKRTADGSEFEKRTADGSEFESPKKKAKVE

SEQ ID NO: 2282 - protein, 2096 aa, synthetic construct
MPAAKRVKLDGGDKKYSIGLDIGTNSVGWAVITDEYKVPSKKFKVLGNTDRHSIKKNLIGALLFDSGETAEATRLKRTARRRYTRRKNRICYLQEIFSNEMAKVDDSFFHRLEESFLVEEDKKHERHPIFGNIVDEVAYHEKYPTIYHLRKKLVDSTDKADLRLIYLALAHMIKFRGHFLIEGDLNPDNSDVDKLFIQLVQTYNQLFEENPINASGVDAKAILSARLSKSRRLENLIAQLPGEKKNGLFGNLIALSLGLTPNFKSNFDLAEDAKLQLSKDTYDDDLDNLLAQIGDQYADLFLAAKNLSDAILLSDILRVNTEITKAPLSASMIKRYDEHHQDLTLLKALVRQQLPEKYKEIFFDQSKNGYAGYIDGGASQEEFYKFIKPILEKMDGTEELLVKLNREDLLRKQRTFDNGSIPHQIHLGELHAILRRQEDFYPFLKDNREKIEKILTFRIPYYVGPLARGNSRFAWMTRKSEETITPWNFEEVVDKGASAQSFIERMTNFDKNLPNEKVLPKHSLLYEYFTVYNELTKVKYVTEGMRKPAFLSGEQKKAIVDLLFKTNRKVTVKQLKEDYFKKIECFDSVEISGVEDRFNASLGTYHDLLKIIKDKDFLDNEENEDILEDIVLTLTLFEDREMIEERLKTYAHLFDDKVMKQLKRRRYTGWGRLSRKLINGIRDKQSGKTILDFLKSDGFANRNFMQLIHDDSLTFKEDIQKAQVSGQGDSLHEHIANLAGSPAIKKGILQTVKVVDELVKVMGRHKPENIVIEMARENQTTQKGQKNSRERMKRIEEGIKELGSQILKEHPVENTQLQNEKLYLYYLQNGRDMYVDQELDINRLSDYDVDHIVPQSFLKDDSIDNKVLTRSDKARGKSDNVPSEEVVKKMKNYWRQLLNAKLITQRKFDNLTKAERGGLSELDKAGFIKRQLVETRQITKHVAQILDSRMNTKYDENDKLIREVKVITLKSKLVSDFRKDFQFYKVREINNYHHAHDAYLNAVVGTALIKKYPKLESEFVYGDYKVYDVRKMIAKSEQEIGKATAKYFFYSNIMNFFKTEITLANGEIRKRPLIETNGETGEIVWDKGRDFATVRKVLSMPQVNIVKKTEVQTGGFSKESILPKRNSDKLIARKKDWDPKKYGGFDSPTVAYSVLVVAKVEKGKSKKLKSVKELLGITIMERSSFEKNPIDFLEAKGYKEVKKDLIIKLPKYSLFELENGRKRMLASAGELQKGNELALPSKYVNFLYLASHYEKLKGSPEDNEQKQLFVEQHKHYLDEIIEQISEFSKRVILADANLDKVLSAYNKHRDKPIREQAENIIHLFTLTNLGAPAAFKYFDTTIDRKRYTSTKEVLDATLIHQSITGLYETRIDLSQLGGDGGGSSPAPEAAAKGGTLNIEDEYRLHETSKEPDVSLGSTWLSDFPQAWAETGGMGLAVRQAPLIIPLKATSTPVSIKQYPMSQEARLGIKPHIQRLLDQGILVPCQSPWNTPLLPVKKPGTNDYRPVQDLREVNKRVEDIHPTVPNPYNLLSGLPPSHQWYTVLDLKDAFFCLRLHPTSQPLFAFEWRDPEMGISGQLTWTRLPQGFKNSPTLFNEALHRDLAGFRIQHPDLILLQYVDDLLLAATSELDCQQGTRALLQTLGDLGYRASAKKAQICQKQVKYLGYLLKEGQRWLTEARKETVMGQPIPKTPRQLREFLGTAGFCRLWIPGFAEMAAPLYPLTKPGTLFNWGPDQQKAFQEIKQALLTAPALGLPDLTKPFELFVDEKQGYAKGVLTQKLGPWRRPVAYLSKKLDPVAAGWPPCLRMVAAIAVLTKDAGKLTMGQPLVILAPHAVEALVKQPPDRWLSNARMTHYQALLLDTDRVQFGPVVALNPATLLPLPEEGLQHDCLDILAEAHGTRSDLMDQPLPDADHTWYTDGSSFLQEGQRKAGAAVTTETEVIWARALPAGTSAQRAELIALTQALKMAEGKKLNVYTDSRYAFATAHIHGEIYRRRGWLTSEGKEIKNKDEILALLKALFLPKRLSIIHCPGHQKGNSAEARGNRMADQAAREVATRETPETSTLLAGKRTADGSEFEKRTADGSEFESPKKKAKVE

SEQ ID NO: 2283 - protein, 2094 aa, synthetic construct
MPAAKRVKLDGGDKKYSIGLDIGTNSVGWAVITDEYKVPSKKFKVLGNTDRHSIKKNLIGALLFDSGETAEATRLKRTARRRYTRRKNRICYLQEIFSNEMAKVDDSFFHRLEESFLVEEDKKHERHPIFGNIVDEVAYHEKYPTIYHLRKKLVDSTDKADLRLIYLALAHMIKFRGHFLIEGDLNPDNSDVDKLFIQLVQTYNQLFEENPINASGVDAKAILSARLSKSRRLENLIAQLPGEKKNGLFGNLIALSLGLTPNFKSNFDLAEDAKLQLSKDTYDDDLDNLLAQIGDQYADLFLAAKNLSDAILLSDILRVNTEITKAPLSASMIKRYDEHHQDLTLLKALVRQQLPEKYKEIFFDQSKNGYAGYIDGGASQEEFYKFIKPILEKMDGTEELLVKLNREDLLRKQRTFDNGSIPHQIHLGELHAILRRQEDFYPFLKDNREKIEKILTFRIPYYVGPLARGNSRFAWMTRKSEETITPWNFEEVVDKGASAQSFIERMTNFDKNLPNEKVLPKHSLLYEYFTVYNELTKVKYVTEGMRKPAFLSGEQKKAIVDLLFKTNRKVTVKQLKEDYFKKIECFDSVEISGVEDRFNASLGTYHDLLKIIKDKDFLDNEENEDILEDIVLTLTLFEDREMIEERLKTYAHLFDDKVMKQLKRRRYTGWGRLSRKLINGIRDKQSGKTILDFLKSDGFANRNFMQLIHDDSLTFKEDIQKAQVSGQGDSLHEHIANLAGSPAIKKGILQTVKVVDELVKVMGRHKPENIVIEMARENQTTQKGQKNSRERMKRIEEGIKELGSQILKEHPVENTQLQNEKLYLYYLQNGRDMYVDQELDINRLSDYDVDHIVPQSFLKDDSIDNKVLTRSDKARGKSDNVPSEEVVKKMKNYWRQLLNAKLITQRKFDNLTKAERGGLSELDKAGFIKRQLVETRQITKHVAQILDSRMNTKYDENDKLIREVKVITLKSKLVSDFRKDFQFYKVREINNYHHAHDAYLNAVVGTALIKKYPKLESEFVYGDYKVYDVRKMIAKSEQEIGKATAKYFFYSNIMNFFKTEITLANGEIRKRPLIETNGETGEIVWDKGRDFATVRKVLSMPQVNIVKKTEVQTGGFSKESILPKRNSDKLIARKKDWDPKKYGGFDSPTVAYSVLVVAKVEKGKSKKLKSVKELLGITIMERSSFEKNPIDFLEAKGYKEVKKDLIIKLPKYSLFELENGRKRMLASAGELQKGNELALPSKYVNFLYLASHYEKLKGSPEDNEQKQLFVEQHKHYLDEIIEQISEFSKRVILADANLDKVLSAYNKHRDKPIREQAENIIHLFTLTNLGAPAAFKYFDTTIDRKRYTSTKEVLDATLIHQSITGLYETRIDLSQLGGDGGGSSPAPGGGGGTLNIEDEYRLHETSKEPDVSLGSTWLSDFPQAWAETGGMGLAVRQAPLIIPLKATSTPVSIKQYPMSQEARLGIKPHIQRLLDQGILVPCQSPWNTPLLPVKKPGTNDYRPVQDLREVNKRVEDIHPTVPNPYNLLSGLPPSHQWYTVLDLKDAFFCLRLHPTSQPLFAFEWRDPEMGISGQLTWTRLPQGFKNSPTLFNEALHRDLAGFRIQHPDLILLQYVDDLLLAATSELDCQQGTRALLQTLGDLGYRASAKKAQICQKQVKYLGYLLKEGQRWLTEARKETVMGQPIPKTPRQLREFLGTAGFCRLWIPGFAEMAAPLYPLTKPGTLFNWGPDQQKAFQEIKQALLTAPALGLPDLTKPFELFVDEKQGYAKGVLTQKLGPWRRPVAYLSKKLDPVAAGWPPCLRMVAAIAVLTKDAGKLTMGQPLVILAPHAVEALVKQPPDRWLSNARMTHYQALLLDTDRVQFGPVVALNPATLLPLPEEGLQHDCLDILAEAHGTRSDLMDQPLPDADHTWYTDGSSFLQEGQRKAGAAVTTETEVIWARALPAGTSAQRAELIALTQALKMAEGKKLNVYTDSRYAFATAHIHGEIYRRRGWLTSEGKEIKNKDEILALLKALFLPKRLSIIHCPGHQKGNSAEARGNRMADQAAREVATRETPETSTLLAGKRTADGSEFEKRTADGSEFESPKKKAKVE

SEQ ID NO: 2284 - protein, 2090 aa, synthetic construct
MPAAKRVKLDGGDKKYSIGLDIGTNSVGWAVITDEYKVPSKKFKVLGNTDRHSIKKNLIGALLFDSGETAEATRLKRTARRRYTRRKNRICYLQEIFSNEMAKVDDSFFHRLEESFLVEEDKKHERHPIFGNIVDEVAYHEKYPTIYHLRKKLVDSTDKADLRLIYLALAHMIKFRGHFLIEGDLNPDNSDVDKLFIQLVQTYNQLFEENPINASGVDAKAILSARLSKSRRLENLIAQLPGEKKNGLFGNLIALSLGLTPNFKSNFDLAEDAKLQLSKDTYDDDLDNLLAQIGDQYADLFLAAKNLSDAILLSDILRVNTEITKAPLSASMIKRYDEHHQDLTLLKALVRQQLPEKYKEIFFDQSKNGYAGYIDGGASQEEFYKFIKPILEKMDGTEELLVKLNREDLLRKQRTFDNGSIPHQIHLGELHAILRRQEDFYPFLKDNREKIEKILTFRIPYYVGPLARGNSRFAWMTRKSEETITPWNFEEVVDKGASAQSFIERMTNFDKNLPNEKVLPKHSLLYEYFTVYNELTKVKYVTEGMRKPAFLSGEQKKAIVDLLFKTNRKVTVKQLKEDYFKKIECFDSVEISGVEDRFNASLGTYHDLLKIIKDKDFLDNEENEDILEDIVLTLTLFEDREMIEERLKTYAHLFDDKVMKQLKRRRYTGWGRLSRKLINGIRDKQSGKTILDFLKSDGFANRNFMQLIHDDSLTFKEDIQKAQVSGQGDSLHEHIANLAGSPAIKKGILQTVKVVDELVKVMGRHKPENIVIEMARENQTTQKGQKNSRERMKRIEEGIKELGSQILKEHPVENTQLQNEKLYLYYLQNGRDMYVDQELDINRLSDYDVDHIVPQSFLKDDSIDNKVLTRSDKARGKSDNVPSEEVVKKMKNYWRQLLNAKLITQRKFDNLTKAERGGLSELDKAGFIKRQLVETRQITKHVAQILDSRMNTKYDENDKLIREVKVITLKSKLVSDFRKDFQFYKVREINNYHHAHDAYLNAVVGTALIKKYPKLESEFVYGDYKVYDVRKMIAKSEQEIGKATAKYFFYSNIMNFFKTEITLANGEIRKRPLIETNGETGEIVWDKGRDFATVRKVLSMPQVNIVKKTEVQTGGFSKESILPKRNSDKLIARKKDWDPKKYGGFDSPTVAYSVLVVAKVEKGKSKKLKSVKELLGITIMERSSFEKNPIDFLEAKGYKEVKKDLIIKLPKYSLFELENGRKRMLASAGELQKGNELALPSKYVNFLYLASHYEKLKGSPEDNEQKQLFVEQHKHYLDEIIEQISEFSKRVILADANLDKVLSAYNKHRDKPIREQAENIIHLFTLTNLGAPAAFKYFDTTIDRKRYTSTKEVLDATLIHQSITGLYETRIDLSQLGGDGGEAAAKGGTLNIEDEYRLHETSKEPDVSLGSTWLSDFPQAWAETGGMGLAVRQAPLIIPLKATSTPVSIKQYPMSQEARLGIKPHIQRLLDQGILVPCQSPWNTPLLPVKKPGTNDYRPVQDLREVNKRVEDIHPTVPNPYNLLSGLPPSHQWYTVLDLKDAFFCLRLHPTSQPLFAFEWRDPEMGISGQLTWTRLPQGFKNSPTLFNEALHRDLAGFRIQHPDLILLQYVDDLLLAATSELDCQQGTRALLQTLGDLGYRASAKKAQICQKQVKYLGYLLKEGQRWLTEARKETVMGQPIPKTPRQLREFLGTAGFCRLWIPGFAEMAAPLYPLTKPGTLFNWGPDQQKAFQEIKQALLTAPALGLPDLTKPFELFVDEKQGYAKGVLTQKLGPWRRPVAYLSKKLDPVAAGWPPCLRMVAAIAVLTKDAGKLTMGQPLVILAPHAVEALVKQPPDRWLSNARMTHYQALLLDTDRVQFGPVVALNPATLLPLPEEGLQHDCLDILAEAHGTRSDLMDQPLPDADHTWYTDGSSFLQEGQRKAGAAVTTETEVIWARALPAGTSAQRAELIALTQALKMAEGKKLNVYTDSRYAFATAHIHGEIYRRRGWLTSEGKEIKNKDEILALLKALFLPKRLSIIHCPGHQKGNSAEARGNRMADQAAREVATRETPETSTLLAGKRTADGSEFEKRTADGSEFESPKKKAKVE

SEQ ID NO: 2285 - protein, 2091 aa, synthetic construct
MPAAKRVKLDGGDKKYSIGLDIGTNSVGWAVITDEYKVPSKKFKVLGNTDRHSIKKNLIGALLFDSGETAEATRLKRTARRRYTRRKNRICYLQEIFSNEMAKVDDSFFHRLEESFLVEEDKKHERHPIFGNIVDEVAYHEKYPTIYHLRKKLVDSTDKADLRLIYLALAHMIKFRGHFLIEGDLNPDNSDVDKLFIQLVQTYNQLFEENPINASGVDAKAILSARLSKSRRLENLIAQLPGEKKNGLFGNLIALSLGLTPNFKSNFDLAEDAKLQLSKDTYDDDLDNLLAQIGDQYADLFLAAKNLSDAILLSDILRVNTEITKAPLSASMIKRYDEHHQDLTLLKALVRQQLPEKYKEIFFDQSKNGYAGYIDGGASQEEFYKFIKPILEKMDGTEELLVKLNREDLLRKQRTFDNGSIPHQIHLGELHAILRRQEDFYPFLKDNREKIEKILTFRIPYYVGPLARGNSRFAWMTRKSEETITPWNFEEVVDKGASAQSFIERMTNFDKNLPNEKVLPKHSLLYEYFTVYNELTKVKYVTEGMRKPAFLSGEQKKAIVDLLFKTNRKVTVKQLKEDYFKKIECFDSVEISGVEDRFNASLGTYHDLLKIIKDKDFLDNEENEDILEDIVLTLTLFEDREMIEERLKTYAHLFDDKVMKQLKRRRYTGWGRLSRKLINGIRDKQSGKTILDFLKSDGFANRNFMQLIHDDSLTFKEDIQKAQVSGQGDSLHEHIANLAGSPAIKKGILQTVKVVDELVKVMGRHKPENIVIEMARENQTTQKGQKNSRERMKRIEEGIKELGSQILKEHPVENTQLQNEKLYLYYLQNGRDMYVDQELDINRLSDYDVDHIVPQSFLKDDSIDNKVLTRSDKARGKSDNVPSEEVVKKMKNYWRQLLNAKLITQRKFDNLTKAERGGLSELDKAGFIKRQLVETRQITKHVAQILDSRMNTKYDENDKLIREVKVITLKSKLVSDFRKDFQFYKVREINNYHHAHDAYLNAVVGTALIKKYPKLESEFVYGDYKVYDVRKMIAKSEQEIGKATAKYFFYSNIMNFFKTEITLANGEIRKRPLIETNGETGEIVWDKGRDFATVRKVLSMPQVNIVKKTEVQTGGFSKESILPKRNSDKLIARKKDWDPKKYGGFDSPTVAYSVLVVAKVEKGKSKKLKSVKELLGITIMERSSFEKNPIDFLEAKGYKEVKKDLIIKLPKYSLFELENGRKRMLASAGELQKGNELALPSKYVNFLYLASHYEKLKGSPEDNEQKQLFVEQHKHYLDEIIEQISEFSKRVILADANLDKVLSAYNKHRDKPIREQAENIIHLFTLTNLGAPAAFKYFDTTIDRKRYTSTKEVLDATLIHQSITGLYETRIDLSQLGGDGGGSSPAPGGTLNIEDEYRLHETSKEPDVSLGSTWLSDFPQAWAETGGMGLAVRQAPLIIPLKATSTPVSIKQYPMSQEARLGIKPHIQRLLDQGILVPCQSPWNTPLLPVKKPGTNDYRPVQDLREVNKRVEDIHPTVPNPYNLLSGLPPSHQWYTVLDLKDAFFCLRLHPTSQPLFAFEWRDPEMGISGQLTWTRLPQGFKNSPTLFNEALHRDLAGFRIQHPDLILLQYVDDLLLAATSELDCQQGTRALLQTLGDLGYRASAKKAQICQKQVKYLGYLLKEGQRWLTEARKETVMGQPIPKTPRQLREFLGTAGFCRLWIPGFAEMAAPLYPLTKPGTLFNWGPDQQKAFQEIKQALLTAPALGLPDLTKPFELFVDEKQGYAKGVLTQKLGPWRRPVAYLSKKLDPVAAGWPPCLRMVAAIAVLTKDAGKLTMGQPLVILAPHAVEALVKQPPDRWLSNARMTHYQALLLDTDRVQFGPVVALNPATLLPLPEEGLQHDCLDILAEAHGTRSDLMDQPLPDADHTWYTDGSSFLQEGQRKAGAAVTTETEVIWARALPAGTSAQRAELIALTQALKMAEGKKLNVYTDSRYAFATAHIHGEIYRRRGWLTSEGKEIKNKDEILALLKALFLPKRLSIIHCPGHQKGNSAEARGNRMADQAAREVATRETPETSTLLAGKRTADGSEFEKRTADGSEFESPKKKAKVE

SEQ ID NO: 2286 - protein, 2096 aa, synthetic construct
MPAAKRVKLDGGDKKYSIGLDIGTNSVGWAVITDEYKVPSKKFKVLGNTDRHSIKKNLIGALLFDSGETAEATRLKRTARRRYTRRKNRICYLQEIFSNEMAKVDDSFFHRLEESFLVEEDKKHERHPIFGNIVDEVAYHEKYPTIYHLRKKLVDSTDKADLRLIYLALAHMIKFRGHFLIEGDLNPDNSDVDKLFIQLVQTYNQLFEENPINASGVDAKAILSARLSKSRRLENLIAQLPGEKKNGLFGNLIALSLGLTPNFKSNFDLAEDAKLQLSKDTYDDDLDNLLAQIGDQYADLFLAAKNLSDAILLSDILRVNTEITKAPLSASMIKRYDEHHQDLTLLKALVRQQLPEKYKEIFFDQSKNGYAGYIDGGASQEEFYKFIKPILEKMDGTEELLVKLNREDLLRKQRTFDNGSIPHQIHLGELHAILRRQEDFYPFLKDNREKIEKILTFRIPYYVGPLARGNSRFAWMTRKSEETITPWNFEEVVDKGASAQSFIERMTNFDKNLPNEKVLPKHSLLYEYFTVYNELTKVKYVTEGMRKPAFLSGEQKKAIVDLLFKTNRKVTVKQLKEDYFKKIECFDSVEISGVEDRFNASLGTYHDLLKIIKDKDFLDNEENEDILEDIVLTLTLFEDREMIEERLKTYAHLFDDKVMKQLKRRRYTGWGRLSRKLINGIRDKQSGKTILDFLKSDGFANRNFMQLIHDDSLTFKEDIQKAQVSGQGDSLHEHIANLAGSPAIKKGILQTVKVVDELVKVMGRHKPENIVIEMARENQTTQKGQKNSRERMKRIEEGIKELGSQILKEHPVENTQLQNEKLYLYYLQNGRDMYVDQELDINRLSDYDVDHIVPQSFLKDDSIDNKVLTRSDKARGKSDNVPSEEVVKKMKNYWRQLLNAKLITQRKFDNLTKAERGGLSELDKAGFIKRQLVETRQITKHVAQILDSRMNTKYDENDKLIREVKVITLKSKLVSDFRKDFQFYKVREINNYHHAHDAYLNAVVGTALIKKYPKLESEFVYGDYKVYDVRKMIAKSEQEIGKATAKYFFYSNIMNFFKTEITLANGEIRKRPLIETNGETGEIVWDKGRDFATVRKVLSMPQVNIVKKTEVQTGGFSKESILPKRNSDKLIARKKDWDPKKYGGFDSPTVAYSVLVVAKVEKGKSKKLKSVKELLGITIMERSSFEKNPIDFLEAKGYKEVKKDLIIKLPKYSLFELENGRKRMLASAGELQKGNELALPSKYVNFLYLASHYEKLKGSPEDNEQKQLFVEQHKHYLDEIIEQISEFSKRVILADANLDKVLSAYNKHRDKPIREQAENIIHLFTLTNLGAPAAFKYFDTTIDRKRYTSTKEVLDATLIHQSITGLYETRIDLSQLGGDGGGGSPAPEAAAKGGTLNIEDEYRLHETSKEPDVSLGSTWLSDFPQAWAETGGMGLAVRQAPLIIPLKATSTPVSIKQYPMSQEARLGIKPHIQRLLDQGILVPCQSPWNTPLLPVKKPGTNDYRPVQDLREVNKRVEDIHPTVPNPYNLLSGLPPSHQWYTVLDLKDAFFCLRLHPTSQPLFAFEWRDPEMGISGQLTWTRLPQGFKNSPTLFNEALHRDLAGFRIQHPDLILLQYVDDLLLAATSELDCQQGTRALLQTLGDLGYRASAKKAQICQKQVKYLGYLLKEGQRWLTEARKETVMGQPIPKTPRQLREFLGTAGFCRLWIPGFAEMAAPLYPLTKPGTLFNWGPDQQKAFQEIKQALLTAPALGLPDLTKPFELFVDEKQGYAKGVLTQKLGPWRRPVAYLSKKLDPVAAGWPPCLRMVAAIAVLTKDAGKLTMGQPLVILAPHAVEALVKQPPDRWLSNARMTHYQALLLDTDRVQFGPVVALNPATLLPLPEEGLQHDCLDILAEAHGTRSDLMDQPLPDADHTWYTDGSSFLQEGQRKAGAAVTTETEVIWARALPAGTSAQRAELIALTQALKMAEGKKLNVYTDSRYAFATAHIHGEIYRRRGWLTSEGKEIKNKDEILALLKALFLPKRLSIIHCPGHQKGNSAEARGNRMADQAAREVATRETPETSTLLAGKRTADGSEFEKRTADGSEFESPKKKAKVE

SEQ ID NO: 2287 - protein, 2096 aa, synthetic construct
MPAAKRVKLDGGDKKYSIGLDIGTNSVGWAVITDEYKVPSKKFKVLGNTDRHSIKKNLIGALLFDSGETAEATRLKRTARRRYTRRKNRICYLQEIFSNEMAKVDDSFFHRLEESFLVEEDKKHERHPIFGNIVDEVAYHEKYPTIYHLRKKLVDSTDKADLRLIYLALAHMIKFRGHFLIEGDLNPDNSDVDKLFIQLVQTYNQLFEENPINASGVDAKAILSARLSKSRRLENLIAQLPGEKKNGLFGNLIALSLGLTPNFKSNFDLAEDAKLQLSKDTYDDDLDNLLAQIGDQYADLFLAAKNLSDAILLSDILRVNTEITKAPLSASMIKRYDEHHQDLTLLKALVRQQLPEKYKEIFFDQSKNGYAGYIDGGASQEEFYKFIKPILEKMDGTEELLVKLNREDLLRKQRTFDNGSIPHQIHLGELHAILRRQEDFYPFLKDNREKIEKILTFRIPYYVGPLARGNSRFAWMTRKSEETITPWNFEEVVDKGASAQSFIERMTNFDKNLPNEKVLPKHSLLYEYFTVYNELTKVKYVTEGMRKPAFLSGEQKKAIVDLLFKTNRKVTVKQLKEDYFKKIECFDSVEISGVEDRFNASLGTYHDLLKIIKDKDFLDNEENEDILEDIVLTLTLFEDREMIEERLKTYAHLFDDKVMKQLKRRRYTGWGRLSRKLINGIRDKQSGKTILDFLKSDGFANRNFMQLIHDDSLTFKEDIQKAQVSGQGDSLHEHIANLAGSPAIKKGILQTVKVVDELVKVMGRHKPENIVIEMARENQTTQKGQKNSRERMKRIEEGIKELGSQILKEHPVENTQLQNEKLYLYYLQNGRDMYVDQELDINRLSDYDVDHIVPQSFLKDDSIDNKVLTRSDKARGKSDNVPSEEVVKKMKNYWRQLLNAKLITQRKFDNLTKAERGGLSELDKAGFIKRQLVETRQITKHVAQILDSRMNTKYDENDKLIREVKVITLKSKLVSDFRKDFQFYKVREINNYHHAHDAYLNAVVGTALIKKYPKLESEFVYGDYKVYDVRKMIAKSEQEIGKATAKYFFYSNIMNFFKTEITLANGEIRKRPLIETNGETGEIVWDKGRDFATVRKVLSMPQVNIVKKTEVQTGGFSKESILPKRNSDKLIARKKDWDPKKYGGFDSPTVAYSVLVVAKVEKGKSKKLKSVKELLGITIMERSSFEKNPIDFLEAKGYKEVKKDLIIKLPKYSLFELENGRKRMLASAGELQKGNELALPSKYVNFLYLASHYEKLKGSPEDNEQKQLFVEQHKHYLDEIIEQISEFSKRVILADANLDKVLSAYNKHRDKPIREQAENIIHLFTLTNLGAPAAFKYFDTTIDRKRYTSTKEVLDATLIHQSITGLYETRIDLSQLGGDGGGGSEAAAKGGGGGTLNIEDEYRLHETSKEPDVSLGSTWLSDFPQAWAETGGMGLAVRQAPLIIPLKATSTPVSIKQYPMSQEARLGIKPHIQRLLDQGILVPCQSPWNTPLLPVKKPGTNDYRPVQDLREVNKRVEDIHPTVPNPYNLLSGLPPSHQWYTVLDLKDAFFCLRLHPTSQPLFAFEWRDPEMGISGQLTWTRLPQGFKNSPTLFNEALHRDLAGFRIQHPDLILLQYVDDLLLAATSELDCQQGTRALLQTLGDLGYRASAKKAQICQKQVKYLGYLLKEGQRWLTEARKETVMGQPIPKTPRQLREFLGTAGFCRLWIPGFAEMAAPLYPLTKPGTLFNWGPDQQKAFQEIKQALLTAPALGLPDLTKPFELFVDEKQGYAKGVLTQKLGPWRRPVAYLSKKLDPVAAGWPPCLRMVAAIAVLTKDAGKLTMGQPLVILAPHAVEALVKQPPDRWLSNARMTHYQALLLDTDRVQFGPVVALNPATLLPLPEEGLQHDCLDILAEAHGTRSDLMDQPLPDADHTWYTDGSSFLQEGQRKAGAAVTTETEVIWARALPAGTSAQRAELIALTQALKMAEGKKLNVYTDSRYAFATAHIHGEIYRRRGWLTSEGKEIKNKDEILALLKALFLPKRLSIIHCPGHQKGNSAEARGNRMADQAAREVATRETPETSTLLAGKRTADGSEFEKRTADGSEFESPKKKAKVE

SEQ ID NO: 2288 - protein, 2094 aa, synthetic construct
MPAAKRVKLDGGDKKYSIGLDIGTNSVGWAVITDEYKVPSKKFKVLGNTDRHSIKKNLIGALLFDSGETAEATRLKRTARRRYTRRKNRICYLQEIFSNEMAKVDDSFFHRLEESFLVEEDKKHERHPIFGNIVDEVAYHEKYPTIYHLRKKLVDSTDKADLRLIYLALAHMIKFRGHFLIEGDLNPDNSDVDKLFIQLVQTYNQLFEENPINASGVDAKAILSARLSKSRRLENLIAQLPGEKKNGLFGNLIALSLGLTPNFKSNFDLAEDAKLQLSKDTYDDDLDNLLAQIGDQYADLFLAAKNLSDAILLSDILRVNTEITKAPLSASMIKRYDEHHQDLTLLKALVRQQLPEKYKEIFFDQSKNGYAGYIDGGASQEEFYKFIKPILEKMDGTEELLVKLNREDLLRKQRTFDNGSIPHQIHLGELHAILRRQEDFYPFLKDNREKIEKILTFRIPYYVGPLARGNSRFAWMTRKSEETITPWNFEEVVDKGASAQSFIERMTNFDKNLPNEKVLPKHSLLYEYFTVYNELTKVKYVTEGMRKPAFLSGEQKKAIVDLLFKTNRKVTVKQLKEDYFKKIECFDSVEISGVEDRFNASLGTYHDLLKIIKDKDFLDNEENEDILEDIVLTLTLFEDREMIEERLKTYAHLFDDKVMKQLKRRRYTGWGRLSRKLINGIRDKQSGKTILDFLKSDGFANRNFMQLIHDDSLTFKEDIQKAQVSGQGDSLHEHIANLAGSPAIKKGILQTVKVVDELVKVMGRHKPENIVIEMARENQTTQKGQKNSRERMKRIEEGIKELGSQILKEHPVENTQLQNEKLYLYYLQNGRDMYVDQELDINRLSDYDVDHIVPQSFLKDDSIDNKVLTRSDKARGKSDNVPSEEVVKKMKNYWRQLLNAKLITQRKFDNLTKAERGGLSELDKAGFIKRQLVETRQITKHVAQILDSRMNTKYDENDKLIREVKVITLKSKLVSDFRKDFQFYKVREINNYHHAHDAYLNAVVGTALIKKYPKLESEFVYGDYKVYDVRKMIAKSEQEIGKATAKYFFYSNIMNFFKTEITLANGEIRKRPLIETNGETGEIVWDKGRDFATVRKVLSMPQVNIVKKTEVQTGGFSKESILPKRNSDKLIARKKDWDPKKYGGFDSPTVAYSVLVVAKVEKGKSKKLKSVKELLGITIMERSSFEKNPIDFLEAKGYKEVKKDLIIKLPKYSLFELENGRKRMLASAGELQKGNELALPSKYVNFLYLASHYEKLKGSPEDNEQKQLFVEQHKHYLDEIIEQISEFSKRVILADANLDKVLSAYNKHRDKPIREQAENIIHLFTLTNLGAPAAFKYFDTTIDRKRYTSTKEVLDATLIHQSITGLYETRIDLSQLGGDGGGSSPAPGGSGGTLNIEDEYRLHETSKEPDVSLGSTWLSDFPQAWAETGGMGLAVRQAPLIIPLKATSTPVSIKQYPMSQEARLGIKPHIQRLLDQGILVPCQSPWNTPLLPVKKPGTNDYRPVQDLREVNKRVEDIHPTVPNPYNLLSGLPPSHQWYTVLDLKDAFFCLRLHPTSQPLFAFEWRDPEMGISGQLTWTRLPQGFKNSPTLFNEALHRDLAGFRIQHPDLILLQYVDDLLLAATSELDCQQGTRALLQTLGDLGYRASAKKAQICQKQVKYLGYLLKEGQRWLTEARKETVMGQPIPKTPRQLREFLGTAGFCRLWIPGFAEMAAPLYPLTKPGTLFNWGPDQQKAFQEIKQALLTAPALGLPDLTKPFELFVDEKQGYAKGVLTQKLGPWRRPVAYLSKKLDPVAAGWPPCLRMVAAIAVLTKDAGKLTMGQPLVILAPHAVEALVKQPPDRWLSNARMTHYQALLLDTDRVQFGPVVALNPATLLPLPEEGLQHDCLDILAEAHGTRSDLMDQPLPDADHTWYTDGSSFLQEGQRKAGAAVTTETEVIWARALPAGTSAQRAELIALTQALKMAEGKKLNVYTDSRYAFATAHIHGEIYRRRGWLTSEGKEIKNKDEILALLKALFLPKRLSIIHCPGHQKGNSAEARGNRMADQAAREVATRETPETSTLLAGKRTADGSEFEKRTADGSEFESPKKKAKVE

SEQ ID NO: 2289 - protein, 2096 aa, synthetic construct
MPAAKRVKLDGGDKKYSIGLDIGTNSVGWAVITDEYKVPSKKFKVLGNTDRHSIKKNLIGALLFDSGETAEATRLKRTARRRYTRRKNRICYLQEIFSNEMAKVDDSFFHRLEESFLVEEDKKHERHPIFGNIVDEVAYHEKYPTIYHLRKKLVDSTDKADLRLIYLALAHMIKFRGHFLIEGDLNPDNSDVDKLFIQLVQTYNQLFEENPINASGVDAKAILSARLSKSRRLENLIAQLPGEKKNGLFGNLIALSLGLTPNFKSNFDLAEDAKLQLSKDTYDDDLDNLLAQIGDQYADLFLAAKNLSDAILLSDILRVNTEITKAPLSASMIKRYDEHHQDLTLLKALVRQQLPEKYKEIFFDQSKNGYAGYIDGGASQEEFYKFIKPILEKMDGTEELLVKLNREDLLRKQRTFDNGSIPHQIHLGELHAILRRQEDFYPFLKDNREKIEKILTFRIPYYVGPLARGNSRFAWMTRKSEETITPWNFEEVVDKGASAQSFIERMTNFDKNLPNEKVLPKHSLLYEYFTVYNELTKVKYVTEGMRKPAFLSGEQKKAIVDLLFKTNRKVTVKQLKEDYFKKIECFDSVEISGVEDRFNASLGTYHDLLKIIKDKDFLDNEENEDILEDIVLTLTLFEDREMIEERLKTYAHLFDDKVMKQLKRRRYTGWGRLSRKLINGIRDKQSGKTILDFLKSDGFANRNFMQLIHDDSLTFKEDIQKAQVSGQGDSLHEHIANLAGSPAIKKGILQTVKVVDELVKVMGRHKPENIVIEMARENQTTQKGQKNSRERMKRIEEGIKELGSQILKEHPVENTQLQNEKLYLYYLQNGRDMYVDQELDINRLSDYDVDHIVPQSFLKDDSIDNKVLTRSDKARGKSDNVPSEEVVKKMKNYWRQLLNAKLITQRKFDNLTKAERGGLSELDKAGFIKRQLVETRQITKHVAQILDSRMNTKYDENDKLIREVKVITLKSKLVSDFRKDFQFYKVREINNYHHAHDAYLNAVVGTALIKKYPKLESEFVYGDYKVYDVRKMIAKSEQEIGKATAKYFFYSNIMNFFKTEITLANGEIRKRPLIETNGETGEIVWDKGRDFATVRKVLSMPQVNIVKKTEVQTGGFSKESILPKRNSDKLIARKKDWDPKKYGGFDSPTVAYSVLVVAKVEKGKSKKLKSVKELLGITIMERSSFEKNPIDFLEAKGYKEVKKDLIIKLPKYSLFELENGRKRMLASAGELQKGNELALPSKYVNFLYLASHYEKLKGSPEDNEQKQLFVEQHKHYLDEIIEQISEFSKRVILADANLDKVLSAYNKHRDKPIREQAENIIHLFTLTNLGAPAAFKYFDTTIDRKRYTSTKEVLDATLIHQSITGLYETRIDLSQLGGDGGGSSEAAAKGGGGGTLNIEDEYRLHETSKEPDVSLGSTWLSDFPQAWAETGGMGLAVRQAPLIIPLKATSTPVSIKQYPMSQEARLGIKPHIQRLLDQGILVPCQSPWNTPLLPVKKPGTNDYRPVQDLREVNKRVEDIHPTVPNPYNLLSGLPPSHQWYTVLDLKDAFFCLRLHPTSQPLFAFEWRDPEMGISGQLTWTRLPQGFKNSPTLFNEALHRDLAGFRIQHPDLILLQYVDDLLLAATSELDCQQGTRALLQTLGDLGYRASAKKAQICQKQVKYLGYLLKEGQRWLTEARKETVMGQPIPKTPRQLREFLGTAGFCRLWIPGFAEMAAPLYPLTKPGTLFNWGPDQQKAFQEIKQALLTAPALGLPDLTKPFELFVDEKQGYAKGVLTQKLGPWRRPVAYLSKKLDPVAAGWPPCLRMVAAIAVLTKDAGKLTMGQPLVILAPHAVEALVKQPPDRWLSNARMTHYQALLLDTDRVQFGPVVALNPATLLPLPEEGLQHDCLDILAEAHGTRSDLMDQPLPDADHTWYTDGSSFLQEGQRKAGAAVTTETEVIWARALPAGTSAQRAELIALTQALKMAEGKKLNVYTDSRYAFATAHIHGEIYRRRGWLTSEGKEIKNKDEILALLKALFLPKRLSIIHCPGHQKGNSAEARGNRMADQAAREVATRETPETSTLLAGKRTADGSEFEKRTADGSEFESPKKKAKVE

SEQ ID NO: 2290 - protein, 2094 aa, synthetic construct
MPAAKRVKLDGGDKKYSIGLDIGTNSVGWAVITDEYKVPSKKFKVLGNTDRHSIKKNLIGALLFDSGETAEATRLKRTARRRYTRRKNRICYLQEIFSNEMAKVDDSFFHRLEESFLVEEDKKHERHPIFGNIVDEVAYHEKYPTIYHLRKKLVDSTDKADLRLIYLALAHMIKFRGHFLIEGDLNPDNSDVDKLFIQLVQTYNQLFEENPINASGVDAKAILSARLSKSRRLENLIAQLPGEKKNGLFGNLIALSLGLTPNFKSNFDLAEDAKLQLSKDTYDDDLDNLLAQIGDQYADLFLAAKNLSDAILLSDILRVNTEITKAPLSASMIKRYDEHHQDLTLLKALVRQQLPEKYKEIFFDQSKNGYAGYIDGGASQEEFYKFIKPILEKMDGTEELLVKLNREDLLRKQRTFDNGSIPHQIHLGELHAILRRQEDFYPFLKDNREKIEKILTFRIPYYVGPLARGNSRFAWMTRKSEETITPWNFEEVVDKGASAQSFIERMTNFDKNLPNEKVLPKHSLLYEYFTVYNELTKVKYVTEGMRKPAFLSGEQKKAIVDLLFKTNRKVTVKQLKEDYFKKIECFDSVEISGVEDRFNASLGTYHDLLKIIKDKDFLDNEENEDILEDIVLTLTLFEDREMIEERLKTYAHLFDDKVMKQLKRRRYTGWGRLSRKLINGIRDKQSGKTILDFLKSDGFANRNFMQLIHDDSLTFKEDIQKAQVSGQGDSLHEHIANLAGSPAIKKGILQTVKVVDELVKVMGRHKPENIVIEMARENQTTQKGQKNSRERMKRIEEGIKELGSQILKEHPVENTQLQNEKLYLYYLQNGRDMYVDQELDINRLSDYDVDHIVPQSFLKDDSIDNKVLTRSDKARGKSDNVPSEEVVKKMKNYWRQLLNAKLITQRKFDNLTKAERGGLSELDKAGFIKRQLVETRQITKHVAQILDSRMNTKYDENDKLIREVKVITLKSKLVSDFRKDFQFYKVREINNYHHAHDAYLNAVVGTALIKKYPKLESEFVYGDYKVYDVRKMIAKSEQEIGKATAKYFFYSNIMNFFKTEITLANGEIRKRPLIETNGETGEIVWDKGRDFATVRKVLSMPQVNIVKKTEVQTGGFSKESILPKRNSDKLIARKKDWDPKKYGGFDSPTVAYSVLVVAKVEKGKSKKLKSVKELLGITIMERSSFEKNPIDFLEAKGYKEVKKDLIIKLPKYSLFELENGRKRMLASAGELQKGNELALPSKYVNFLYLASHYEKLKGSPEDNEQKQLFVEQHKHYLDEIIEQISEFSKRVILADANLDKVLSAYNKHRDKPIREQAENIIHLFTLTNLGAPAAFKYFDTTIDRKRYTSTKEVLDATLIHQSITGLYETRIDLSQLGGDGGGGGPAPGGSGGTLNIEDEYRLHETSKEPDVSLGSTWLSDFPQAWAETGGMGLAVRQAPLIIPLKATSTPVSIKQYPMSQEARLGIKPHIQRLLDQGILVPCQSPWNTPLLPVKKPGTNDYRPVQDLREVNKRVEDIHPTVPNPYNLLSGLPPSHQWYTVLDLKDAFFCLRLHPTSQPLFAFEWRDPEMGISGQLTWTRLPQGFKNSPTLFNEALHRDLAGFRIQHPDLILLQYVDDLLLAATSELDCQQGTRALLQTLGDLGYRASAKKAQICQKQVKYLGYLLKEGQRWLTEARKETVMGQPIPKTPRQLREFLGTAGFCRLWIPGFAEMAAPLYPLTKPGTLFNWGPDQQKAFQEIKQALLTAPALGLPDLTKPFELFVDEKQGYAKGVLTQKLGPWRRPVAYLSKKLDPVAAGWPPCLRMVAAIAVLTKDAGKLTMGQPLVILAPHAVEALVKQPPDRWLSNARMTHYQALLLDTDRVQFGPVVALNPATLLPLPEEGLQHDCLDILAEAHGTRSDLMDQPLPDADHTWYTDGSSFLQEGQRKAGAAVTTETEVIWARALPAGTSAQRAELIALTQALKMAEGKKLNVYTDSRYAFATAHIHGEIYRRRGWLTSEGKEIKNKDEILALLKALFLPKRLSIIHCPGHQKGNSAEARGNRMADQAAREVATRETPETSTLLAGKRTADGSEFEKRTADGSEFESPKKKAKVE

SEQ ID NO: 2291 - protein, 2097 aa, synthetic construct
MPAAKRVKLDGGDKKYSIGLDIGTNSVGWAVITDEYKVPSKKFKVLGNTDRHSIKKNLIGALLFDSGETAEATRLKRTARRRYTRRKNRICYLQEIFSNEMAKVDDSFFHRLEESFLVEEDKKHERHPIFGNIVDEVAYHEKYPTIYHLRKKLVDSTDKADLRLIYLALAHMIKFRGHFLIEGDLNPDNSDVDKLFIQLVQTYNQLFEENPINASGVDAKAILSARLSKSRRLENLIAQLPGEKKNGLFGNLIALSLGLTPNFKSNFDLAEDAKLQLSKDTYDDDLDNLLAQIGDQYADLFLAAKNLSDAILLSDILRVNTEITKAPLSASMIKRYDEHHQDLTLLKALVRQQLPEKYKEIFFDQSKNGYAGYIDGGASQEEFYKFIKPILEKMDGTEELLVKLNREDLLRKQRTFDNGSIPHQIHLGELHAILRRQEDFYPFLKDNREKIEKILTFRIPYYVGPLARGNSRFAWMTRKSEETITPWNFEEVVDKGASAQSFIERMTNFDKNLPNEKVLPKHSLLYEYFTVYNELTKVKYVTEGMRKPAFLSGEQKKAIVDLLFKTNRKVTVKQLKEDYFKKIECFDSVEISGVEDRFNASLGTYHDLLKIIKDKDFLDNEENEDILEDIVLTLTLFEDREMIEERLKTYAHLFDDKVMKQLKRRRYTGWGRLSRKLINGIRDKQSGKTILDFLKSDGFANRNFMQLIHDDSLTFKEDIQKAQVSGQGDSLHEHIANLAGSPAIKKGILQTVKVVDELVKVMGRHKPENIVIEMARENQTTQKGQKNSRERMKRIEEGIKELGSQILKEHPVENTQLQNEKLYLYYLQNGRDMYVDQELDINRLSDYDVDHIVPQSFLKDDSIDNKVLTRSDKARGKSDNVPSEEVVKKMKNYWRQLLNAKLITQRKFDNLTKAERGGLSELDKAGFIKRQLVETRQITKHVAQILDSRMNTKYDENDKLIREVKVITLKSKLVSDFRKDFQFYKVREINNYHHAHDAYLNAVVGTALIKKYPKLESEFVYGDYKVYDVRKMIAKSEQEIGKATAKYFFYSNIMNFFKTEITLANGEIRKRPLIETNGETGEIVWDKGRDFATVRKVLSMPQVNIVKKTEVQTGGFSKESILPKRNSDKLIARKKDWDPKKYGGFDSPTVAYSVLVVAKVEKGKSKKLKSVKELLGITIMERSSFEKNPIDFLEAKGYKEVKKDLIIKLPKYSLFELENGRKRMLASAGELQKGNELALPSKYVNFLYLASHYEKLKGSPEDNEQKQLFVEQHKHYLDEIIEQISEFSKRVILADANLDKVLSAYNKHRDKPIREQAENIIHLFTLTNLGAPAAFKYFDTTIDRKRYTSTKEVLDATLIHQSITGLYETRIDLSQLGGDGGGSSGSSGSSGSSGGTLNIEDEYRLHETSKEPDVSLGSTWLSDFPQAWAETGGMGLAVRQAPLIIPLKATSTPVSIKQYPMSQEARLGIKPHIQRLLDQGILVPCQSPWNTPLLPVKKPGTNDYRPVQDLREVNKRVEDIHPTVPNPYNLLSGLPPSHQWYTVLDLKDAFFCLRLHPTSQPLFAFEWRDPEMGISGQLTWTRLPQGFKNSPTLFNEALHRDLAGFRIQHPDLILLQYVDDLLLAATSELDCQQGTRALLQTLGDLGYRASAKKAQICQKQVKYLGYLLKEGQRWLTEARKETVMGQPIPKTPRQLREFLGTAGFCRLWIPGFAEMAAPLYPLTKPGTLFNWGPDQQKAFQEIKQALLTAPALGLPDLTKPFELFVDEKQGYAKGVLTQKLGPWRRPVAYLSKKLDPVAAGWPPCLRMVAAIAVLTKDAGKLTMGQPLVILAPHAVEALVKQPPDRWLSNARMTHYQALLLDTDRVQFGPVVALNPATLLPLPEEGLQHDCLDILAEAHGTRSDLMDQPLPDADHTWYTDGSSFLQEGQRKAGAAVTTETEVIWARALPAGTSAQRAELIALTQALKMAEGKKLNVYTDSRYAFATAHIHGEIYRRRGWLTSEGKEIKNKDEILALLKALFLPKRLSIIHCPGHQKGNSAEARGNRMADQAAREVATRETPETSTLLAGKRTADGSEFEKRTADGSEFESPKKKAKVE

SEQ ID NO: 2292 - protein, 2096 aa, synthetic construct
MPAAKRVKLDGGDKKYSIGLDIGTNSVGWAVITDEYKVPSKKFKVLGNTDRHSIKKNLIGALLFDSGETAEATRLKRTARRRYTRRKNRICYLQEIFSNEMAKVDDSFFHRLEESFLVEEDKKHERHPIFGNIVDEVAYHEKYPTIYHLRKKLVDSTDKADLRLIYLALAHMIKFRGHFLIEGDLNPDNSDVDKLFIQLVQTYNQLFEENPINASGVDAKAILSARLSKSRRLENLIAQLPGEKKNGLFGNLIALSLGLTPNFKSNFDLAEDAKLQLSKDTYDDDLDNLLAQIGDQYADLFLAAKNLSDAILLSDILRVNTEITKAPLSASMIKRYDEHHQDLTLLKALVRQQLPEKYKEIFFDQSKNGYAGYIDGGASQEEFYKFIKPILEKMDGTEELLVKLNREDLLRKQRTFDNGSIPHQIHLGELHAILRRQEDFYPFLKDNREKIEKILTFRIPYYVGPLARGNSRFAWMTRKSEETITPWNFEEVVDKGASAQSFIERMTNFDKNLPNEKVLPKHSLLYEYFTVYNELTKVKYVTEGMRKPAFLSGEQKKAIVDLLFKTNRKVTVKQLKEDYFKKIECFDSVEISGVEDRFNASLGTYHDLLKIIKDKDFLDNEENEDILEDIVLTLTLFEDREMIEERLKTYAHLFDDKVMKQLKRRRYTGWGRLSRKLINGIRDKQSGKTILDFLKSDGFANRNFMQLIHDDSLTFKEDIQKAQVSGQGDSLHEHIANLAGSPAIKKGILQTVKVVDELVKVMGRHKPENIVIEMARENQTTQKGQKNSRERMKRIEEGIKELGSQILKEHPVENTQLQNEKLYLYYLQNGRDMYVDQELDINRLSDYDVDHIVPQSFLKDDSIDNKVLTRSDKARGKSDNVPSEEVVKKMKNYWRQLLNAKLITQRKFDNLTKAERGGLSELDKAGFIKRQLVETRQITKHVAQILDSRMNTKYDENDKLIREVKVITLKSKLVSDFRKDFQFYKVREINNYHHAHDAYLNAVVGTALIKKYPKLESEFVYGDYKVYDVRKMIAKSEQEIGKATAKYFFYSNIMNFFKTEITLANGEIRKRPLIETNGETGEIVWDKGRDFATVRKVLSMPQVNIVKKTEVQTGGFSKESILPKRNSDKLIARKKDWDPKKYGGFDSPTVAYSVLVVAKVEKGKSKKLKSVKELLGITIMERSSFEKNPIDFLEAKGYKEVKKDLIIKLPKYSLFELENGRKRMLASAGELQKGNELALPSKYVNFLYLASHYEKLKGSPEDNEQKQLFVEQHKHYLDEIIEQISEFSKRVILADANLDKVLSAYNKHRDKPIREQAENIIHLFTLTNLGAPAAFKYFDTTIDRKRYTSTKEVLDATLIHQSITGLYETRIDLSQLGGDGGGSSGGGEAAAKGGTLNIEDEYRLHETSKEPDVSLGSTWLSDFPQAWAETGGMGLAVRQAPLIIPLKATSTPVSIKQYPMSQEARLGIKPHIQRLLDQGILVPCQSPWNTPLLPVKKPGTNDYRPVQDLREVNKRVEDIHPTVPNPYNLLSGLPPSHQWYTVLDLKDAFFCLRLHPTSQPLFAFEWRDPEMGISGQLTWTRLPQGFKNSPTLFNEALHRDLAGFRIQHPDLILLQYVDDLLLAATSELDCQQGTRALLQTLGDLGYRASAKKAQICQKQVKYLGYLLKEGQRWLTEARKETVMGQPIPKTPRQLREFLGTAGFCRLWIPGFAEMAAPLYPLTKPGTLFNWGPDQQKAFQEIKQALLTAPALGLPDLTKPFELFVDEKQGYAKGVLTQKLGPWRRPVAYLSKKLDPVAAGWPPCLRMVAAIAVLTKDAGKLTMGQPLVILAPHAVEALVKQPPDRWLSNARMTHYQALLLDTDRVQFGPVVALNPATLLPLPEEGLQHDCLDILAEAHGTRSDLMDQPLPDADHTWYTDGSSFLQEGQRKAGAAVTTETEVIWARALPAGTSAQRAELIALTQALKMAEGKKLNVYTDSRYAFATAHIHGEIYRRRGWLTSEGKEIKNKDEILALLKALFLPKRLSIIHCPGHQKGNSAEARGNRMADQAAREVATRETPETSTLLAGKRTADGSEFEKRTADGSEFESPKKKAKVE

SEQ ID NO: 2293 - protein, 2094 aa, synthetic construct
MPAAKRVKLDGGDKKYSIGLDIGTNSVGWAVITDEYKVPSKKFKVLGNTDRHSIKKNLIGALLFDSGETAEATRLKRTARRRYTRRKNRICYLQEIFSNEMAKVDDSFFHRLEESFLVEEDKKHERHPIFGNIVDEVAYHEKYPTIYHLRKKLVDSTDKADLRLIYLALAHMIKFRGHFLIEGDLNPDNSDVDKLFIQLVQTYNQLFEENPINASGVDAKAILSARLSKSRRLENLIAQLPGEKKNGLFGNLIALSLGLTPNFKSNFDLAEDAKLQLSKDTYDDDLDNLLAQIGDQYADLFLAAKNLSDAILLSDILRVNTEITKAPLSASMIKRYDEHHQDLTLLKALVRQQLPEKYKEIFFDQSKNGYAGYIDGGASQEEFYKFIKPILEKMDGTEELLVKLNREDLLRKQRTFDNGSIPHQIHLGELHAILRRQEDFYPFLKDNREKIEKILTFRIPYYVGPLARGNSRFAWMTRKSEETITPWNFEEVVDKGASAQSFIERMTNFDKNLPNEKVLPKHSLLYEYFTVYNELTKVKYVTEGMRKPAFLSGEQKKAIVDLLFKTNRKVTVKQLKEDYFKKIECFDSVEISGVEDRFNASLGTYHDLLKIIKDKDFLDNEENEDILEDIVLTLTLFEDREMIEERLKTYAHLFDDKVMKQLKRRRYTGWGRLSRKLINGIRDKQSGKTILDFLKSDGFANRNFMQLIHDDSLTFKEDIQKAQVSGQGDSLHEHIANLAGSPAIKKGILQTVKVVDELVKVMGRHKPENIVIEMARENQTTQKGQKNSRERMKRIEEGIKELGSQILKEHPVENTQLQNEKLYLYYLQNGRDMYVDQELDINRLSDYDVDHIVPQSFLKDDSIDNKVLTRSDKARGKSDNVPSEEVVKKMKNYWRQLLNAKLITQRKFDNLTKAERGGLSELDKAGFIKRQLVETRQITKHVAQILDSRMNTKYDENDKLIREVKVITLKSKLVSDFRKDFQFYKVREINNYHHAHDAYLNAVVGTALIKKYPKLESEFVYGDYKVYDVRKMIAKSEQEIGKATAKYFFYSNIMNFFKTEITLANGEIRKRPLIETNGETGEIVWDKGRDFATVRKVLSMPQVNIVKKTEVQTGGFSKESILPKRNSDKLIARKKDWDPKKYGGFDSPTVAYSVLVVAKVEKGKSKKLKSVKELLGITIMERSSFEKNPIDFLEAKGYKEVKKDLIIKLPKYSLFELENGRKRMLASAGELQKGNELALPSKYVNFLYLASHYEKLKGSPEDNEQKQLFVEQHKHYLDEIIEQISEFSKRVILADANLDKVLSAYNKHRDKPIREQAENIIHLFTLTNLGAPAAFKYFDTTIDRKRYTSTKEVLDATLIHQSITGLYETRIDLSQLGGDGGGGSGSSGGGGGTLNIEDEYRLHETSKEPDVSLGSTWLSDFPQAWAETGGMGLAVRQAPLIIPLKATSTPVSIKQYPMSQEARLGIKPHIQRLLDQGILVPCQSPWNTPLLPVKKPGTNDYRPVQDLREVNKRVEDIHPTVPNPYNLLSGLPPSHQWYTVLDLKDAFFCLRLHPTSQPLFAFEWRDPEMGISGQLTWTRLPQGFKNSPTLFNEALHRDLAGFRIQHPDLILLQYVDDLLLAATSELDCQQGTRALLQTLGDLGYRASAKKAQICQKQVKYLGYLLKEGQRWLTEARKETVMGQPIPKTPRQLREFLGTAGFCRLWIPGFAEMAAPLYPLTKPGTLFNWGPDQQKAFQEIKQALLTAPALGLPDLTKPFELFVDEKQGYAKGVLTQKLGPWRRPVAYLSKKLDPVAAGWPPCLRMVAAIAVLTKDAGKLTMGQPLVILAPHAVEALVKQPPDRWLSNARMTHYQALLLDTDRVQFGPVVALNPATLLPLPEEGLQHDCLDILAEAHGTRSDLMDQPLPDADHTWYTDGSSFLQEGQRKAGAAVTTETEVIWARALPAGTSAQRAELIALTQALKMAEGKKLNVYTDSRYAFATAHIHGEIYRRRGWLTSEGKEIKNKDEILALLKALFLPKRLSIIHCPGHQKGNSAEARGNRMADQAAREVATRETPETSTLLAGKRTADGSEFEKRTADGSEFESPKKKAKVE

SEQ ID NO: 2294 - protein, 2092 aa, synthetic construct
MPAAKRVKLDGGDKKYSIGLDIGTNSVGWAVITDEYKVPSKKFKVLGNTDRHSIKKNLIGALLFDSGETAEATRLKRTARRRYTRRKNRICYLQEIFSNEMAKVDDSFFHRLEESFLVEEDKKHERHPIFGNIVDEVAYHEKYPTIYHLRKKLVDSTDKADLRLIYLALAHMIKFRGHFLIEGDLNPDNSDVDKLFIQLVQTYNQLFEENPINASGVDAKAILSARLSKSRRLENLIAQLPGEKKNGLFGNLIALSLGLTPNFKSNFDLAEDAKLQLSKDTYDDDLDNLLAQIGDQYADLFLAAKNLSDAILLSDILRVNTEITKAPLSASMIKRYDEHHQDLTLLKALVRQQLPEKYKEIFFDQSKNGYAGYIDGGASQEEFYKFIKPILEKMDGTEELLVKLNREDLLRKQRTFDNGSIPHQIHLGELHAILRRQEDFYPFLKDNREKIEKILTFRIPYYVGPLARGNSRFAWMTRKSEETITPWNFEEVVDKGASAQSFIERMTNFDKNLPNEKVLPKHSLLYEYFTVYNELTKVKYVTEGMRKPAFLSGEQKKAIVDLLFKTNRKVTVKQLKEDYFKKIECFDSVEISGVEDRFNASLGTYHDLLKIIKDKDFLDNEENEDILEDIVLTLTLFEDREMIEERLKTYAHLFDDKVMKQLKRRRYTGWGRLSRKLINGIRDKQSGKTILDFLKSDGFANRNFMQLIHDDSLTFKEDIQKAQVSGQGDSLHEHIANLAGSPAIKKGILQTVKVVDELVKVMGRHKPENIVIEMARENQTTQKGQKNSRERMKRIEEGIKELGSQILKEHPVENTQLQNEKLYLYYLQNGRDMYVDQELDINRLSDYDVDHIVPQSFLKDDSIDNKVLTRSDKARGKSDNVPSEEVVKKMKNYWRQLLNAKLITQRKFDNLTKAERGGLSELDKAGFIKRQLVETRQITKHVAQILDSRMNTKYDENDKLIREVKVITLKSKLVSDFRKDFQFYKVREINNYHHAHDAYLNAVVGTALIKKYPKLESEFVYGDYKVYDVRKMIAKSEQEIGKATAKYFFYSNIMNFFKTEITLANGEIRKRPLIETNGETGEIVWDKGRDFATVRKVLSMPQVNIVKKTEVQTGGFSKESILPKRNSDKLIARKKDWDPKKYGGFDSPTVAYSVLVVAKVEKGKSKKLKSVKELLGITIMERSSFEKNPIDFLEAKGYKEVKKDLIIKLPKYSLFELENGRKRMLASAGELQKGNELALPSKYVNFLYLASHYEKLKGSPEDNEQKQLFVEQHKHYLDEIIEQISEFSKRVILADANLDKVLSAYNKHRDKPIREQAENIIHLFTLTNLGAPAAFKYFDTTIDRKRYTSTKEVLDATLIHQSITGLYETRIDLSQLGGDGGPAPAPAPGGTLNIEDEYRLHETSKEPDVSLGSTWLSDFPQAWAETGGMGLAVRQAPLIIPLKATSTPVSIKQYPMSQEARLGIKPHIQRLLDQGILVPCQSPWNTPLLPVKKPGTNDYRPVQDLREVNKRVEDIHPTVPNPYNLLSGLPPSHQWYTVLDLKDAFFCLRLHPTSQPLFAFEWRDPEMGISGQLTWTRLPQGFKNSPTLFNEALHRDLAGFRIQHPDLILLQYVDDLLLAATSELDCQQGTRALLQTLGDLGYRASAKKAQICQKQVKYLGYLLKEGQRWLTEARKETVMGQPIPKTPRQLREFLGTAGFCRLWIPGFAEMAAPLYPLTKPGTLFNWGPDQQKAFQEIKQALLTAPALGLPDLTKPFELFVDEKQGYAKGVLTQKLGPWRRPVAYLSKKLDPVAAGWPPCLRMVAAIAVLTKDAGKLTMGQPLVILAPHAVEALVKQPPDRWLSNARMTHYQALLLDTDRVQFGPVVALNPATLLPLPEEGLQHDCLDILAEAHGTRSDLMDQPLPDADHTWYTDGSSFLQEGQRKAGAAVTTETEVIWARALPAGTSAQRAELIALTQALKMAEGKKLNVYTDSRYAFATAHIHGEIYRRRGWLTSEGKEIKNKDEILALLKALFLPKRLSIIHCPGHQKGNSAEARGNRMADQAAREVATRETPETSTLLAGKRTADGSEFEKRTADGSEFESPKKKAKVE

SEQ ID NO: 2295 - protein, 2094 aa, synthetic construct
MPAAKRVKLDGGDKKYSIGLDIGTNSVGWAVITDEYKVPSKKFKVLGNTDRHSIKKNLIGALLFDSGETAEATRLKRTARRRYTRRKNRICYLQEIFSNEMAKVDDSFFHRLEESFLVEEDKKHERHPIFGNIVDEVAYHEKYPTIYHLRKKLVDSTDKADLRLIYLALAHMIKFRGHFLIEGDLNPDNSDVDKLFIQLVQTYNQLFEENPINASGVDAKAILSARLSKSRRLENLIAQLPGEKKNGLFGNLIALSLGLTPNFKSNFDLAEDAKLQLSKDTYDDDLDNLLAQIGDQYADLFLAAKNLSDAILLSDILRVNTEITKAPLSASMIKRYDEHHQDLTLLKALVRQQLPEKYKEIFFDQSKNGYAGYIDGGASQEEFYKFIKPILEKMDGTEELLVKLNREDLLRKQRTFDNGSIPHQIHLGELHAILRRQEDFYPFLKDNREKIEKILTFRIPYYVGPLARGNSRFAWMTRKSEETITPWNFEEVVDKGASAQSFIERMTNFDKNLPNEKVLPKHSLLYEYFTVYNELTKVKYVTEGMRKPAFLSGEQKKAIVDLLFKTNRKVTVKQLKEDYFKKIECFDSVEISGVEDRFNASLGTYHDLLKIIKDKDFLDNEENEDILEDIVLTLTLFEDREMIEERLKTYAHLFDDKVMKQLKRRRYTGWGRLSRKLINGIRDKQSGKTILDFLKSDGFANRNFMQLIHDDSLTFKEDIQKAQVSGQGDSLHEHIANLAGSPAIKKGILQTVKVVDELVKVMGRHKPENIVIEMARENQTTQKGQKNSRERMKRIEEGIKELGSQILKEHPVENTQLQNEKLYLYYLQNGRDMYVDQELDINRLSDYDVDHIVPQSFLKDDSIDNKVLTRSDKARGKSDNVPSEEVVKKMKNYWRQLLNAKLITQRKFDNLTKAERGGLSELDKAGFIKRQLVETRQITKHVAQILDSRMNTKYDENDKLIREVKVITLKSKLVSDFRKDFQFYKVREINNYHHAHDAYLNAVVGTALIKKYPKLESEFVYGDYKVYDVRKMIAKSEQEIGKATAKYFFYSNIMNFFKTEITLANGEIRKRPLIETNGETGEIVWDKGRDFATVRKVLSMPQVNIVKKTEVQTGGFSKESILPKRNSDKLIARKKDWDPKKYGGFDSPTVAYSVLVVAKVEKGKSKKLKSVKELLGITIMERSSFEKNPIDFLEAKGYKEVKKDLIIKLPKYSLFELENGRKRMLASAGELQKGNELALPSKYVNFLYLASHYEKLKGSPEDNEQKQLFVEQHKHYLDEIIEQISEFSKRVILADANLDKVLSAYNKHRDKPIREQAENIIHLFTLTNLGAPAAFKYFDTTIDRKRYTSTKEVLDATLIHQSITGLYETRIDLSQLGGDGGPAPAPAPAPGGTLNIEDEYRLHETSKEPDVSLGSTWLSDFPQAWAETGGMGLAVRQAPLIIPLKATSTPVSIKQYPMSQEARLGIKPHIQRLLDQGILVPCQSPWNTPLLPVKKPGTNDYRPVQDLREVNKRVEDIHPTVPNPYNLLSGLPPSHQWYTVLDLKDAFFCLRLHPTSQPLFAFEWRDPEMGISGQLTWTRLPQGFKNSPTLFNEALHRDLAGFRIQHPDLILLQYVDDLLLAATSELDCQQGTRALLQTLGDLGYRASAKKAQICQKQVKYLGYLLKEGQRWLTEARKETVMGQPIPKTPRQLREFLGTAGFCRLWIPGFAEMAAPLYPLTKPGTLFNWGPDQQKAFQEIKQALLTAPALGLPDLTKPFELFVDEKQGYAKGVLTQKLGPWRRPVAYLSKKLDPVAAGWPPCLRMVAAIAVLTKDAGKLTMGQPLVILAPHAVEALVKQPPDRWLSNARMTHYQALLLDTDRVQFGPVVALNPATLLPLPEEGLQHDCLDILAEAHGTRSDLMDQPLPDADHTWYTDGSSFLQEGQRKAGAAVTTETEVIWARALPAGTSAQRAELIALTQALKMAEGKKLNVYTDSRYAFATAHIHGEIYRRRGWLTSEGKEIKNKDEILALLKALFLPKRLSIIHCPGHQKGNSAEARGNRMADQAAREVATRETPETSTLLAGKRTADGSEFEKRTADGSEFESPKKKAKVE

SEQ ID NO: 2296 - protein, 2096 aa, synthetic construct
MPAAKRVKLDGGDKKYSIGLDIGTNSVGWAVITDEYKVPSKKFKVLGNTDRHSIKKNLIGALLFDSGETAEATRLKRTARRRYTRRKNRICYLQEIFSNEMAKVDDSFFHRLEESFLVEEDKKHERHPIFGNIVDEVAYHEKYPTIYHLRKKLVDSTDKADLRLIYLALAHMIKFRGHFLIEGDLNPDNSDVDKLFIQLVQTYNQLFEENPINASGVDAKAILSARLSKSRRLENLIAQLPGEKKNGLFGNLIALSLGLTPNFKSNFDLAEDAKLQLSKDTYDDDLDNLLAQIGDQYADLFLAAKNLSDAILLSDILRVNTEITKAPLSASMIKRYDEHHQDLTLLKALVRQQLPEKYKEIFFDQSKNGYAGYIDGGASQEEFYKFIKPILEKMDGTEELLVKLNREDLLRKQRTFDNGSIPHQIHLGELHAILRRQEDFYPFLKDNREKIEKILTFRIPYYVGPLARGNSRFAWMTRKSEETITPWNFEEVVDKGASAQSFIERMTNFDKNLPNEKVLPKHSLLYEYFTVYNELTKVKYVTEGMRKPAFLSGEQKKAIVDLLFKTNRKVTVKQLKEDYFKKIECFDSVEISGVEDRFNASLGTYHDLLKIIKDKDFLDNEENEDILEDIVLTLTLFEDREMIEERLKTYAHLFDDKVMKQLKRRRYTGWGRLSRKLINGIRDKQSGKTILDFLKSDGFANRNFMQLIHDDSLTFKEDIQKAQVSGQGDSLHEHIANLAGSPAIKKGILQTVKVVDELVKVMGRHKPENIVIEMARENQTTQKGQKNSRERMKRIEEGIKELGSQILKEHPVENTQLQNEKLYLYYLQNGRDMYVDQELDINRLSDYDVDHIVPQSFLKDDSIDNKVLTRSDKARGKSDNVPSEEVVKKMKNYWRQLLNAKLITQRKFDNLTKAERGGLSELDKAGFIKRQLVETRQITKHVAQILDSRMNTKYDENDKLIREVKVITLKSKLVSDFRKDFQFYKVREINNYHHAHDAYLNAVVGTALIKKYPKLESEFVYGDYKVYDVRKMIAKSEQEIGKATAKYFFYSNIMNFFKTEITLANGEIRKRPLIETNGETGEIVWDKGRDFATVRKVLSMPQVNIVKKTEVQTGGFSKESILPKRNSDKLIARKKDWDPKKYGGFDSPTVAYSVLVVAKVEKGKSKKLKSVKELLGITIMERSSFEKNPIDFLEAKGYKEVKKDLIIKLPKYSLFELENGRKRMLASAGELQKGNELALPSKYVNFLYLASHYEKLKGSPEDNEQKQLFVEQHKHYLDEIIEQISEFSKRVILADANLDKVLSAYNKHRDKPIREQAENIIHLFTLTNLGAPAAFKYFDTTIDRKRYTSTKEVLDATLIHQSITGLYETRIDLSQLGGDGGGGSEAAAKGSSGGTLNIEDEYRLHETSKEPDVSLGSTWLSDFPQAWAETGGMGLAVRQAPLIIPLKATSTPVSIKQYPMSQEARLGIKPHIQRLLDQGILVPCQSPWNTPLLPVKKPGTNDYRPVQDLREVNKRVEDIHPTVPNPYNLLSGLPPSHQWYTVLDLKDAFFCLRLHPTSQPLFAFEWRDPEMGISGQLTWTRLPQGFKNSPTLFNEALHRDLAGFRIQHPDLILLQYVDDLLLAATSELDCQQGTRALLQTLGDLGYRASAKKAQICQKQVKYLGYLLKEGQRWLTEARKETVMGQPIPKTPRQLREFLGTAGFCRLWIPGFAEMAAPLYPLTKPGTLFNWGPDQQKAFQEIKQALLTAPALGLPDLTKPFELFVDEKQGYAKGVLTQKLGPWRRPVAYLSKKLDPVAAGWPPCLRMVAAIAVLTKDAGKLTMGQPLVILAPHAVEALVKQPPDRWLSNARMTHYQALLLDTDRVQFGPVVALNPATLLPLPEEGLQHDCLDILAEAHGTRSDLMDQPLPDADHTWYTDGSSFLQEGQRKAGAAVTTETEVIWARALPAGTSAQRAELIALTQALKMAEGKKLNVYTDSRYAFATAHIHGEIYRRRGWLTSEGKEIKNKDEILALLKALFLPKRLSIIHCPGHQKGNSAEARGNRMADQAAREVATRETPETSTLLAGKRTADGSEFEKRTADGSEFESPKKKAKVE

SEQ ID NO: 2297 - protein, 2093 aa, synthetic construct
MPAAKRVKLDGGDKKYSIGLDIGTNSVGWAVITDEYKVPSKKFKVLGNTDRHSIKKNLIGALLFDSGETAEATRLKRTARRRYTRRKNRICYLQEIFSNEMAKVDDSFFHRLEESFLVEEDKKHERHPIFGNIVDEVAYHEKYPTIYHLRKKLVDSTDKADLRLIYLALAHMIKFRGHFLIEGDLNPDNSDVDKLFIQLVQTYNQLFEENPINASGVDAKAILSARLSKSRRLENLIAQLPGEKKNGLFGNLIALSLGLTPNFKSNFDLAEDAKLQLSKDTYDDDLDNLLAQIGDQYADLFLAAKNLSDAILLSDILRVNTEITKAPLSASMIKRYDEHHQDLTLLKALVRQQLPEKYKEIFFDQSKNGYAGYIDGGASQEEFYKFIKPILEKMDGTEELLVKLNREDLLRKQRTFDNGSIPHQIHLGELHAILRRQEDFYPFLKDNREKIEKILTFRIPYYVGPLARGNSRFAWMTRKSEETITPWNFEEVVDKGASAQSFIERMTNFDKNLPNEKVLPKHSLLYEYFTVYNELTKVKYVTEGMRKPAFLSGEQKKAIVDLLFKTNRKVTVKQLKEDYFKKIECFDSVEISGVEDRFNASLGTYHDLLKIIKDKDFLDNEENEDILEDIVLTLTLFEDREMIEERLKTYAHLFDDKVMKQLKRRRYTGWGRLSRKLINGIRDKQSGKTILDFLKSDGFANRNFMQLIHDDSLTFKEDIQKAQVSGQGDSLHEHIANLAGSPAIKKGILQTVKVVDELVKVMGRHKPENIVIEMARENQTTQKGQKNSRERMKRIEEGIKELGSQILKEHPVENTQLQNEKLYLYYLQNGRDMYVDQELDINRLSDYDVDHIVPQSFLKDDSIDNKVLTRSDKARGKSDNVPSEEVVKKMKNYWRQLLNAKLITQRKFDNLTKAERGGLSELDKAGFIKRQLVETRQITKHVAQILDSRMNTKYDENDKLIREVKVITLKSKLVSDFRKDFQFYKVREINNYHHAHDAYLNAVVGTALIKKYPKLESEFVYGDYKVYDVRKMIAKSEQEIGKATAKYFFYSNIMNFFKTEITLANGEIRKRPLIETNGETGEIVWDKGRDFATVRKVLSMPQVNIVKKTEVQTGGFSKESILPKRNSDKLIARKKDWDPKKYGGFDSPTVAYSVLVVAKVEKGKSKKLKSVKELLGITIMERSSFEKNPIDFLEAKGYKEVKKDLIIKLPKYSLFELENGRKRMLASAGELQKGNELALPSKYVNFLYLASHYEKLKGSPEDNEQKQLFVEQHKHYLDEIIEQISEFSKRVILADANLDKVLSAYNKHRDKPIREQAENIIHLFTLTNLGAPAAFKYFDTTIDRKRYTSTKEVLDATLIHQSITGLYETRIDLSQLGGDGGEAAAKGSSGGTLNIEDEYRLHETSKEPDVSLGSTWLSDFPQAWAETGGMGLAVRQAPLIIPLKATSTPVSIKQYPMSQEARLGIKPHIQRLLDQGILVPCQSPWNTPLLPVKKPGTNDYRPVQDLREVNKRVEDIHPTVPNPYNLLSGLPPSHQWYTVLDLKDAFFCLRLHPTSQPLFAFEWRDPEMGISGQLTWTRLPQGFKNSPTLFNEALHRDLAGFRIQHPDLILLQYVDDLLLAATSELDCQQGTRALLQTLGDLGYRASAKKAQICQKQVKYLGYLLKEGQRWLTEARKETVMGQPIPKTPRQLREFLGTAGFCRLWIPGFAEMAAPLYPLTKPGTLFNWGPDQQKAFQEIKQALLTAPALGLPDLTKPFELFVDEKQGYAKGVLTQKLGPWRRPVAYLSKKLDPVAAGWPPCLRMVAAIAVLTKDAGKLTMGQPLVILAPHAVEALVKQPPDRWLSNARMTHYQALLLDTDRVQFGPVVALNPATLLPLPEEGLQHDCLDILAEAHGTRSDLMDQPLPDADHTWYTDGSSFLQEGQRKAGAAVTTETEVIWARALPAGTSAQRAELIALTQALKMAEGKKLNVYTDSRYAFATAHIHGEIYRRRGWLTSEGKEIKNKDEILALLKALFLPKRLSIIHCPGHQKGNSAEARGNRMADQAAREVATRETPETSTLLAGKRTADGSEFEKRTADGSEFESPKKKAKVE

SEQ ID NO: 2298 - protein, 2091 aa, synthetic construct
MPAAKRVKLDGGDKKYSIGLDIGTNSVGWAVITDEYKVPSKKFKVLGNTDRHSIKKNLIGALLFDSGETAEATRLKRTARRRYTRRKNRICYLQEIFSNEMAKVDDSFFHRLEESFLVEEDKKHERHPIFGNIVDEVAYHEKYPTIYHLRKKLVDSTDKADLRLIYLALAHMIKFRGHFLIEGDLNPDNSDVDKLFIQLVQTYNQLFEENPINASGVDAKAILSARLSKSRRLENLIAQLPGEKKNGLFGNLIALSLGLTPNFKSNFDLAEDAKLQLSKDTYDDDLDNLLAQIGDQYADLFLAAKNLSDAILLSDILRVNTEITKAPLSASMIKRYDEHHQDLTLLKALVRQQLPEKYKEIFFDQSKNGYAGYIDGGASQEEFYKFIKPILEKMDGTEELLVKLNREDLLRKQRTFDNGSIPHQIHLGELHAILRRQEDFYPFLKDNREKIEKILTFRIPYYVGPLARGNSRFAWMTRKSEETITPWNFEEVVDKGASAQSFIERMTNFDKNLPNEKVLPKHSLLYEYFTVYNELTKVKYVTEGMRKPAFLSGEQKKAIVDLLFKTNRKVTVKQLKEDYFKKIECFDSVEISGVEDRFNASLGTYHDLLKIIKDKDFLDNEENEDILEDIVLTLTLFEDREMIEERLKTYAHLFDDKVMKQLKRRRYTGWGRLSRKLINGIRDKQSGKTILDFLKSDGFANRNFMQLIHDDSLTFKEDIQKAQVSGQGDSLHEHIANLAGSPAIKKGILQTVKVVDELVKVMGRHKPENIVIEMARENQTTQKGQKNSRERMKRIEEGIKELGSQILKEHPVENTQLQNEKLYLYYLQNGRDMYVDQELDINRLSDYDVDHIVPQSFLKDDSIDNKVLTRSDKARGKSDNVPSEEVVKKMKNYWRQLLNAKLITQRKFDNLTKAERGGLSELDKAGFIKRQLVETRQITKHVAQILDSRMNTKYDENDKLIREVKVITLKSKLVSDFRKDFQFYKVREINNYHHAHDAYLNAVVGTALIKKYPKLESEFVYGDYKVYDVRKMIAKSEQEIGKATAKYFFYSNIMNFFKTEITLANGEIRKRPLIETNGETGEIVWDKGRDFATVRKVLSMPQVNIVKKTEVQTGGFSKESILPKRNSDKLIARKKDWDPKKYGGFDSPTVAYSVLVVAKVEKGKSKKLKSVKELLGITIMERSSFEKNPIDFLEAKGYKEVKKDLIIKLPKYSLFELENGRKRMLASAGELQKGNELALPSKYVNFLYLASHYEKLKGSPEDNEQKQLFVEQHKHYLDEIIEQISEFSKRVILADANLDKVLSAYNKHRDKPIREQAENIIHLFTLTNLGAPAAFKYFDTTIDRKRYTSTKEVLDATLIHQSITGLYETRIDLSQLGGDGGPAPGGGGGTLNIEDEYRLHETSKEPDVSLGSTWLSDFPQAWAETGGMGLAVRQAPLIIPLKATSTPVSIKQYPMSQEARLGIKPHIQRLLDQGILVPCQSPWNTPLLPVKKPGTNDYRPVQDLREVNKRVEDIHPTVPNPYNLLSGLPPSHQWYTVLDLKDAFFCLRLHPTSQPLFAFEWRDPEMGISGQLTWTRLPQGFKNSPTLFNEALHRDLAGFRIQHPDLILLQYVDDLLLAATSELDCQQGTRALLQTLGDLGYRASAKKAQICQKQVKYLGYLLKEGQRWLTEARKETVMGQPIPKTPRQLREFLGTAGFCRLWIPGFAEMAAPLYPLTKPGTLFNWGPDQQKAFQEIKQALLTAPALGLPDLTKPFELFVDEKQGYAKGVLTQKLGPWRRPVAYLSKKLDPVAAGWPPCLRMVAAIAVLTKDAGKLTMGQPLVILAPHAVEALVKQPPDRWLSNARMTHYQALLLDTDRVQFGPVVALNPATLLPLPEEGLQHDCLDILAEAHGTRSDLMDQPLPDADHTWYTDGSSFLQEGQRKAGAAVTTETEVIWARALPAGTSAQRAELIALTQALKMAEGKKLNVYTDSRYAFATAHIHGEIYRRRGWLTSEGKEIKNKDEILALLKALFLPKRLSIIHCPGHQKGNSAEARGNRMADQAAREVATRETPETSTLLAGKRTADGSEFEKRTADGSEFESPKKKAKVE

SEQ ID NO: 2299 - protein, 2088 aa, synthetic construct
MPAAKRVKLDGGDKKYSIGLDIGTNSVGWAVITDEYKVPSKKFKVLGNTDRHSIKKNLIGALLFDSGETAEATRLKRTARRRYTRRKNRICYLQEIFSNEMAKVDDSFFHRLEESFLVEEDKKHERHPIFGNIVDEVAYHEKYPTIYHLRKKLVDSTDKADLRLIYLALAHMIKFRGHFLIEGDLNPDNSDVDKLFIQLVQTYNQLFEENPINASGVDAKAILSARLSKSRRLENLIAQLPGEKKNGLFGNLIALSLGLTPNFKSNFDLAEDAKLQLSKDTYDDDLDNLLAQIGDQYADLFLAAKNLSDAILLSDILRVNTEITKAPLSASMIKRYDEHHQDLTLLKALVRQQLPEKYKEIFFDQSKNGYAGYIDGGASQEEFYKFIKPILEKMDGTEELLVKLNREDLLRKQRTFDNGSIPHQIHLGELHAILRRQEDFYPFLKDNREKIEKILTFRIPYYVGPLARGNSRFAWMTRKSEETITPWNFEEVVDKGASAQSFIERMTNFDKNLPNEKVLPKHSLLYEYFTVYNELTKVKYVTEGMRKPAFLSGEQKKAIVDLLFKTNRKVTVKQLKEDYFKKIECFDSVEISGVEDRFNASLGTYHDLLKIIKDKDFLDNEENEDILEDIVLTLTLFEDREMIEERLKTYAHLFDDKVMKQLKRRRYTGWGRLSRKLINGIRDKQSGKTILDFLKSDGFANRNFMQLIHDDSLTFKEDIQKAQVSGQGDSLHEHIANLAGSPAIKKGILQTVKVVDELVKVMGRHKPENIVIEMARENQTTQKGQKNSRERMKRIEEGIKELGSQILKEHPVENTQLQNEKLYLYYLQNGRDMYVDQELDINRLSDYDVDHIVPQSFLKDDSIDNKVLTRSDKARGKSDNVPSEEVVKKMKNYWRQLLNAKLITQRKFDNLTKAERGGLSELDKAGFIKRQLVETRQITKHVAQILDSRMNTKYDENDKLIREVKVITLKSKLVSDFRKDFQFYKVREINNYHHAHDAYLNAVVGTALIKKYPKLESEFVYGDYKVYDVRKMIAKSEQEIGKATAKYFFYSNIMNFFKTEITLANGEIRKRPLIETNGETGEIVWDKGRDFATVRKVLSMPQVNIVKKTEVQTGGFSKESILPKRNSDKLIARKKDWDPKKYGGFDSPTVAYSVLVVAKVEKGKSKKLKSVKELLGITIMERSSFEKNPIDFLEAKGYKEVKKDLIIKLPKYSLFELENGRKRMLASAGELQKGNELALPSKYVNFLYLASHYEKLKGSPEDNEQKQLFVEQHKHYLDEIIEQISEFSKRVILADANLDKVLSAYNKHRDKPIREQAENIIHLFTLTNLGAPAAFKYFDTTIDRKRYTSTKEVLDATLIHQSITGLYETRIDLSQLGGDGGPAPGGTLNIEDEYRLHETSKEPDVSLGSTWLSDFPQAWAETGGMGLAVRQAPLIIPLKATSTPVSIKQYPMSQEARLGIKPHIQRLLDQGILVPCQSPWNTPLLPVKKPGTNDYRPVQDLREVNKRVEDIHPTVPNPYNLLSGLPPSHQWYTVLDLKDAFFCLRLHPTSQPLFAFEWRDPEMGISGQLTWTRLPQGFKNSPTLFNEALHRDLAGFRIQHPDLILLQYVDDLLLAATSELDCQQGTRALLQTLGDLGYRASAKKAQICQKQVKYLGYLLKEGQRWLTEARKETVMGQPIPKTPRQLREFLGKAGFCRLFIPGFAEMAAPLYPLTKPGTLFNWGPDQQKAFQEIKQALLTAPALGLPDLTKPFELFVDEKQGYAKGVLTQKLGPWRRPVAYLSKKLDPVAAGWPPCLRMVAAIAVLTKDAGKLTMGQPLVILAPHAVEALVKQPPDRWLSNARMTHYQALLLDTDRVQFGPVVALNPATLLPLPEEGLQHDCLDILAEAHGTRSDLMDQPLPDADHTWYTDGSSFLQEGQRKAGAAVTTETEVIWARALPAGTSAQRAELIALTQALKMAEGKKLNVYTDSRYAFATAHIHGEIYRRRGWLTSEGKEIKNKDEILALLKALFLPKRLSIIHCPGHQKGNSAEARGNRMADQAAREVATRETPETSTLLAGKRTADGSEFEKRTADGSEFESPKKKAKVE

SEQ ID NO: 2300 - protein, 2103 aa, synthetic construct
MPAAKRVKLDGGDKKYSIGLDIGTNSVGWAVITDEYKVPSKKFKVLGNTDRHSIKKNLIGALLFDSGETAEATRLKRTARRRYTRRKNRICYLQEIFSNEMAKVDDSFFHRLEESFLVEEDKKHERHPIFGNIVDEVAYHEKYPTIYHLRKKLVDSTDKADLRLIYLALAHMIKFRGHFLIEGDLNPDNSDVDKLFIQLVQTYNQLFEENPINASGVDAKAILSARLSKSRRLENLIAQLPGEKKNGLFGNLIALSLGLTPNFKSNFDLAEDAKLQLSKDTYDDDLDNLLAQIGDQYADLFLAAKNLSDAILLSDILRVNTEITKAPLSASMIKRYDEHHQDLTLLKALVRQQLPEKYKEIFFDQSKNGYAGYIDGGASQEEFYKFIKPILEKMDGTEELLVKLNREDLLRKQRTFDNGSIPHQIHLGELHAILRRQEDFYPFLKDNREKIEKILTFRIPYYVGPLARGNSRFAWMTRKSEETITPWNFEEVVDKGASAQSFIERMTNFDKNLPNEKVLPKHSLLYEYFTVYNELTKVKYVTEGMRKPAFLSGEQKKAIVDLLFKTNRKVTVKQLKEDYFKKIECFDSVEISGVEDRFNASLGTYHDLLKIIKDKDFLDNEENEDILEDIVLTLTLFEDREMIEERLKTYAHLFDDKVMKQLKRRRYTGWGRLSRKLINGIRDKQSGKTILDFLKSDGFANRNFMQLIHDDSLTFKEDIQKAQVSGQGDSLHEHIANLAGSPAIKKGILQTVKVVDELVKVMGRHKPENIVIEMARENQTTQKGQKNSRERMKRIEEGIKELGSQILKEHPVENTQLQNEKLYLYYLQNGRDMYVDQELDINRLSDYDVDHIVPQSFLKDDSIDNKVLTRSDKARGKSDNVPSEEVVKKMKNYWRQLLNAKLITQRKFDNLTKAERGGLSELDKAGFIKRQLVETRQITKHVAQILDSRMNTKYDENDKLIREVKVITLKSKLVSDFRKDFQFYKVREINNYHHAHDAYLNAVVGTALIKKYPKLESEFVYGDYKVYDVRKMIAKSEQEIGKATAKYFFYSNIMNFFKTEITLANGEIRKRPLIETNGETGEIVWDKGRDFATVRKVLSMPQVNIVKKTEVQTGGFSKESILPKRNSDKLIARKKDWDPKKYGGFDSPTVAYSVLVVAKVEKGKSKKLKSVKELLGITIMERSSFEKNPIDFLEAKGYKEVKKDLIIKLPKYSLFELENGRKRMLASAGELQKGNELALPSKYVNFLYLASHYEKLKGSPEDNEQKQLFVEQHKHYLDEIIEQISEFSKRVILADANLDKVLSAYNKHRDKPIREQAENIIHLFTLTNLGAPAAFKYFDTTIDRKRYTSTKEVLDATLIHQSITGLYETRIDLSQLGGDGGGGSGGSGGSGGSGGSGGSGGTLNIEDEYRLHETSKEPDVSLGSTWLSDFPQAWAETGGMGLAVRQAPLIIPLKATSTPVSIKQYPMSQEARLGIKPHIQRLLDQGILVPCQSPWNTPLLPVKKPGTNDYRPVQDLREVNKRVEDIHPTVPNPYNLLSGLPPSHQWYTVLDLKDAFFCLRLHPTSQPLFAFEWRDPEMGISGQLTWTRLPQGFKNSPTLFNEALHRDLAGFRIQHPDLILLQYVDDLLLAATSELDCQQGTRALLQTLGDLGYRASAKKAQICQKQVKYLGYLLKEGQRWLTEARKETVMGQPIPKTPRQLREFLGKAGFCRLFIPGFAEMAAPLYPLTKPGTLFNWGPDQQKAFQEIKQALLTAPALGLPDLTKPFELFVDEKQGYAKGVLTQKLGPWRRPVAYLSKKLDPVAAGWPPCLRMVAAIAVLTKDAGKLTMGQPLVILAPHAVEALVKQPPDRWLSNARMTHYQALLLDTDRVQFGPVVALNPATLLPLPEEGLQHDCLDILAEAHGTRSDLMDQPLPDADHTWYTDGSSFLQEGQRKAGAAVTTETEVIWARALPAGTSAQRAELIALTQALKMAEGKKLNVYTDSRYAFATAHIHGEIYRRRGWLTSEGKEIKNKDEILALLKALFLPKRLSIIHCPGHQKGNSAEARGNRMADQAAREVATRETPETSTLLAGKRTADGSEFEKRTADGSEFESPKKKAKVE

SEQ ID NO: 2301 - protein, 2096 aa, synthetic construct
MPAAKRVKLDGGDKKYSIGLDIGTNSVGWAVITDEYKVPSKKFKVLGNTDRHSIKKNLIGALLFDSGETAEATRLKRTARRRYTRRKNRICYLQEIFSNEMAKVDDSFFHRLEESFLVEEDKKHERHPIFGNIVDEVAYHEKYPTIYHLRKKLVDSTDKADLRLIYLALAHMIKFRGHFLIEGDLNPDNSDVDKLFIQLVQTYNQLFEENPINASGVDAKAILSARLSKSRRLENLIAQLPGEKKNGLFGNLIALSLGLTPNFKSNFDLAEDAKLQLSKDTYDDDLDNLLAQIGDQYADLFLAAKNLSDAILLSDILRVNTEITKAPLSASMIKRYDEHHQDLTLLKALVRQQLPEKYKEIFFDQSKNGYAGYIDGGASQEEFYKFIKPILEKMDGTEELLVKLNREDLLRKQRTFDNGSIPHQIHLGELHAILRRQEDFYPFLKDNREKIEKILTFRIPYYVGPLARGNSRFAWMTRKSEETITPWNFEEVVDKGASAQSFIERMTNFDKNLPNEKVLPKHSLLYEYFTVYNELTKVKYVTEGMRKPAFLSGEQKKAIVDLLFKTNRKVTVKQLKEDYFKKIECFDSVEISGVEDRFNASLGTYHDLLKIIKDKDFLDNEENEDILEDIVLTLTLFEDREMIEERLKTYAHLFDDKVMKQLKRRRYTGWGRLSRKLINGIRDKQSGKTILDFLKSDGFANRNFMQLIHDDSLTFKEDIQKAQVSGQGDSLHEHIANLAGSPAIKKGILQTVKVVDELVKVMGRHKPENIVIEMARENQTTQKGQKNSRERMKRIEEGIKELGSQILKEHPVENTQLQNEKLYLYYLQNGRDMYVDQELDINRLSDYDVDHIVPQSFLKDDSIDNKVLTRSDKARGKSDNVPSEEVVKKMKNYWRQLLNAKLITQRKFDNLTKAERGGLSELDKAGFIKRQLVETRQITKHVAQILDSRMNTKYDENDKLIREVKVITLKSKLVSDFRKDFQFYKVREINNYHHAHDAYLNAVVGTALIKKYPKLESEFVYGDYKVYDVRKMIAKSEQEIGKATAKYFFYSNIMNFFKTEITLANGEIRKRPLIETNGETGEIVWDKGRDFATVRKVLSMPQVNIVKKTEVQTGGFSKESILPKRNSDKLIARKKDWDPKKYGGFDSPTVAYSVLVVAKVEKGKSKKLKSVKELLGITIMERSSFEKNPIDFLEAKGYKEVKKDLIIKLPKYSLFELENGRKRMLASAGELQKGNELALPSKYVNFLYLASHYEKLKGSPEDNEQKQLFVEQHKHYLDEIIEQISEFSKRVILADANLDKVLSAYNKHRDKPIREQAENIIHLFTLTNLGAPAAFKYFDTTIDRKRYTSTKEVLDATLIHQSITGLYETRIDLSQLGGDGGPAPAPAPAPAPGGTLNIEDEYRLHETSKEPDVSLGSTWLSDFPQAWAETGGMGLAVRQAPLIIPLKATSTPVSIKQYPMSQEARLGIKPHIQRLLDQGILVPCQSPWNTPLLPVKKPGTNDYRPVQDLREVNKRVEDIHPTVPNPYNLLSGLPPSHQWYTVLDLKDAFFCLRLHPTSQPLFAFEWRDPEMGISGQLTWTRLPQGFKNSPTLFNEALHRDLAGFRIQHPDLILLQYVDDLLLAATSELDCQQGTRALLQTLGDLGYRASAKKAQICQKQVKYLGYLLKEGQRWLTEARKETVMGQPIPKTPRQLREFLGKAGFCRLFIPGFAEMAAPLYPLTKPGTLFNWGPDQQKAFQEIKQALLTAPALGLPDLTKPFELFVDEKQGYAKGVLTQKLGPWRRPVAYLSKKLDPVAAGWPPCLRMVAAIAVLTKDAGKLTMGQPLVILAPHAVEALVKQPPDRWLSNARMTHYQALLLDTDRVQFGPVVALNPATLLPLPEEGLQHDCLDILAEAHGTRSDLMDQPLPDADHTWYTDGSSFLQEGQRKAGAAVTTETEVIWARALPAGTSAQRAELIALTQALKMAEGKKLNVYTDSRYAFATAHIHGEIYRRRGWLTSEGKEIKNKDEILALLKALFLPKRLSIIHCPGHQKGNSAEARGNRMADQAAREVATRETPETSTLLAGKRTADGSEFEKRTADGSEFESPKKKAKVE

SEQ ID NO: 2302 - protein, 2091 aa, synthetic construct
MPAAKRVKLDGGDKKYSIGLDIGTNSVGWAVITDEYKVPSKKFKVLGNTDRHSIKKNLIGALLFDSGETAEATRLKRTARRRYTRRKNRICYLQEIFSNEMAKVDDSFFHRLEESFLVEEDKKHERHPIFGNIVDEVAYHEKYPTIYHLRKKLVDSTDKADLRLIYLALAHMIKFRGHFLIEGDLNPDNSDVDKLFIQLVQTYNQLFEENPINASGVDAKAILSARLSKSRRLENLIAQLPGEKKNGLFGNLIALSLGLTPNFKSNFDLAEDAKLQLSKDTYDDDLDNLLAQIGDQYADLFLAAKNLSDAILLSDILRVNTEITKAPLSASMIKRYDEHHQDLTLLKALVRQQLPEKYKEIFFDQSKNGYAGYIDGGASQEEFYKFIKPILEKMDGTEELLVKLNREDLLRKQRTFDNGSIPHQIHLGELHAILRRQEDFYPFLKDNREKIEKILTFRIPYYVGPLARGNSRFAWMTRKSEETITPWNFEEVVDKGASAQSFIERMTNFDKNLPNEKVLPKHSLLYEYFTVYNELTKVKYVTEGMRKPAFLSGEQKKAIVDLLFKTNRKVTVKQLKEDYFKKIECFDSVEISGVEDRFNASLGTYHDLLKIIKDKDFLDNEENEDILEDIVLTLTLFEDREMIEERLKTYAHLFDDKVMKQLKRRRYTGWGRLSRKLINGIRDKQSGKTILDFLKSDGFANRNFMQLIHDDSLTFKEDIQKAQVSGQGDSLHEHIANLAGSPAIKKGILQTVKVVDELVKVMGRHKPENIVIEMARENQTTQKGQKNSRERMKRIEEGIKELGSQILKEHPVENTQLQNEKLYLYYLQNGRDMYVDQELDINRLSDYDVDHIVPQSFLKDDSIDNKVLTRSDKARGKSDNVPSEEVVKKMKNYWRQLLNAKLITQRKFDNLTKAERGGLSELDKAGFIKRQLVETRQITKHVAQILDSRMNTKYDENDKLIREVKVITLKSKLVSDFRKDFQFYKVREINNYHHAHDAYLNAVVGTALIKKYPKLESEFVYGDYKVYDVRKMIAKSEQEIGKATAKYFFYSNIMNFFKTEITLANGEIRKRPLIETNGETGEIVWDKGRDFATVRKVLSMPQVNIVKKTEVQTGGFSKESILPKRNSDKLIARKKDWDPKKYGGFDSPTVAYSVLVVAKVEKGKSKKLKSVKELLGITIMERSSFEKNPIDFLEAKGYKEVKKDLIIKLPKYSLFELENGRKRMLASAGELQKGNELALPSKYVNFLYLASHYEKLKGSPEDNEQKQLFVEQHKHYLDEIIEQISEFSKRVILADANLDKVLSAYNKHRDKPIREQAENIIHLFTLTNLGAPAAFKYFDTTIDRKRYTSTKEVLDATLIHQSITGLYETRIDLSQLGGDGGGGGPAPGGTLNIEDEYRLHETSKEPDVSLGSTWLSDFPQAWAETGGMGLAVRQAPLIIPLKATSTPVSIKQYPMSQEARLGIKPHIQRLLDQGILVPCQSPWNTPLLPVKKPGTNDYRPVQDLREVNKRVEDIHPTVPNPYNLLSGLPPSHQWYTVLDLKDAFFCLRLHPTSQPLFAFEWRDPEMGISGQLTWTRLPQGFKNSPTLFNEALHRDLAGFRIQHPDLILLQYVDDLLLAATSELDCQQGTRALLQTLGDLGYRASAKKAQICQKQVKYLGYLLKEGQRWLTEARKETVMGQPIPKTPRQLREFLGKAGFCRLFIPGFAEMAAPLYPLTKPGTLFNWGPDQQKAFQEIKQALLTAPALGLPDLTKPFELFVDEKQGYAKGVLTQKLGPWRRPVAYLSKKLDPVAAGWPPCLRMVAAIAVLTKDAGKLTMGQPLVILAPHAVEALVKQPPDRWLSNARMTHYQALLLDTDRVQFGPVVALNPATLLPLPEEGLQHDCLDILAEAHGTRSDLMDQPLPDADHTWYTDGSSFLQEGQRKAGAAVTTETEVIWARALPAGTSAQRAELIALTQALKMAEGKKLNVYTDSRYAFATAHIHGEIYRRRGWLTSEGKEIKNKDEILALLKALFLPKRLSIIHCPGHQKGNSAEARGNRMADQAAREVATRETPETSTLLAGKRTADGSEFEKRTADGSEFESPKKKAKVE

SEQ ID NO: 2303 - protein, 2115 aa, synthetic construct
MPAAKRVKLDGGDKKYSIGLDIGTNSVGWAVITDEYKVPSKKFKVLGNTDRHSIKKNLIGALLFDSGETAEATRLKRTARRRYTRRKNRICYLQEIFSNEMAKVDDSFFHRLEESFLVEEDKKHERHPIFGNIVDEVAYHEKYPTIYHLRKKLVDSTDKADLRLIYLALAHMIKFRGHFLIEGDLNPDNSDVDKLFIQLVQTYNQLFEENPINASGVDAKAILSARLSKSRRLENLIAQLPGEKKNGLFGNLIALSLGLTPNFKSNFDLAEDAKLQLSKDTYDDDLDNLLAQIGDQYADLFLAAKNLSDAILLSDILRVNTEITKAPLSASMIKRYDEHHQDLTLLKALVRQQLPEKYKEIFFDQSKNGYAGYIDGGASQEEFYKFIKPILEKMDGTEELLVKLNREDLLRKQRTFDNGSIPHQIHLGELHAILRRQEDFYPFLKDNREKIEKILTFRIPYYVGPLARGNSRFAWMTRKSEETITPWNFEEVVDKGASAQSFIERMTNFDKNLPNEKVLPKHSLLYEYFTVYNELTKVKYVTEGMRKPAFLSGEQKKAIVDLLFKTNRKVTVKQLKEDYFKKIECFDSVEISGVEDRFNASLGTYHDLLKIIKDKDFLDNEENEDILEDIVLTLTLFEDREMIEERLKTYAHLFDDKVMKQLKRRRYTGWGRLSRKLINGIRDKQSGKTILDFLKSDGFANRNFMQLIHDDSLTFKEDIQKAQVSGQGDSLHEHIANLAGSPAIKKGILQTVKVVDELVKVMGRHKPENIVIEMARENQTTQKGQKNSRERMKRIEEGIKELGSQILKEHPVENTQLQNEKLYLYYLQNGRDMYVDQELDINRLSDYDVDHIVPQSFLKDDSIDNKVLTRSDKARGKSDNVPSEEVVKKMKNYWRQLLNAKLITQRKFDNLTKAERGGLSELDKAGFIKRQLVETRQITKHVAQILDSRMNTKYDENDKLIREVKVITLKSKLVSDFRKDFQFYKVREINNYHHAHDAYLNAVVGTALIKKYPKLESEFVYGDYKVYDVRKMIAKSEQEIGKATAKYFFYSNIMNFFKTEITLANGEIRKRPLIETNGETGEIVWDKGRDFATVRKVLSMPQVNIVKKTEVQTGGFSKESILPKRNSDKLIARKKDWDPKKYGGFDSPTVAYSVLVVAKVEKGKSKKLKSVKELLGITIMERSSFEKNPIDFLEAKGYKEVKKDLIIKLPKYSLFELENGRKRMLASAGELQKGNELALPSKYVNFLYLASHYEKLKGSPEDNEQKQLFVEQHKHYLDEIIEQISEFSKRVILADANLDKVLSAYNKHRDKPIREQAENIIHLFTLTNLGAPAAFKYFDTTIDRKRYTSTKEVLDATLIHQSITGLYETRIDLSQLGGDGGGGGGSGGGGSGGGGSGGGGSGGGGSGGGGSGGTLNIEDEYRLHETSKEPDVSLGSTWLSDFPQAWAETGGMGLAVRQAPLIIPLKATSTPVSIKQYPMSQEARLGIKPHIQRLLDQGILVPCQSPWNTPLLPVKKPGTNDYRPVQDLREVNKRVEDIHPTVPNPYNLLSGLPPSHQWYTVLDLKDAFFCLRLHPTSQPLFAFEWRDPEMGISGQLTWTRLPQGFKNSPTLFNEALHRDLAGFRIQHPDLILLQYVDDLLLAATSELDCQQGTRALLQTLGDLGYRASAKKAQICQKQVKYLGYLLKEGQRWLTEARKETVMGQPIPKTPRQLREFLGKAGFCRLFIPGFAEMAAPLYPLTKPGTLFNWGPDQQKAFQEIKQALLTAPALGLPDLTKPFELFVDEKQGYAKGVLTQKLGPWRRPVAYLSKKLDPVAAGWPPCLRMVAAIAVLTKDAGKLTMGQPLVILAPHAVEALVKQPPDRWLSNARMTHYQALLLDTDRVQFGPVVALNPATLLPLPEEGLQHDCLDILAEAHGTRSDLMDQPLPDADHTWYTDGSSFLQEGQRKAGAAVTTETEVIWARALPAGTSAQRAELIALTQALKMAEGKKLNVYTDSRYAFATAHIHGEIYRRRGWLTSEGKEIKNKDEILALLKALFLPKRLSIIHCPGHQKGNSAEARGNRMADQAAREVATRETPETSTLLAGKRTADGSEFEKRTADGSEFESPKKKAKVE

SEQ ID NO: 2304 - protein, 2103 aa, synthetic construct
MPAAKRVKLDGGDKKYSIGLDIGTNSVGWAVITDEYKVPSKKFKVLGNTDRHSIKKNLIGALLFDSGETAEATRLKRTARRRYTRRKNRICYLQEIFSNEMAKVDDSFFHRLEESFLVEEDKKHERHPIFGNIVDEVAYHEKYPTIYHLRKKLVDSTDKADLRLIYLALAHMIKFRGHFLIEGDLNPDNSDVDKLFIQLVQTYNQLFEENPINASGVDAKAILSARLSKSRRLENLIAQLPGEKKNGLFGNLIALSLGLTPNFKSNFDLAEDAKLQLSKDTYDDDLDNLLAQIGDQYADLFLAAKNLSDAILLSDILRVNTEITKAPLSASMIKRYDEHHQDLTLLKALVRQQLPEKYKEIFFDQSKNGYAGYIDGGASQEEFYKFIKPILEKMDGTEELLVKLNREDLLRKQRTFDNGSIPHQIHLGELHAILRRQEDFYPFLKDNREKIEKILTFRIPYYVGPLARGNSRFAWMTRKSEETITPWNFEEVVDKGASAQSFIERMTNFDKNLPNEKVLPKHSLLYEYFTVYNELTKVKYVTEGMRKPAFLSGEQKKAIVDLLFKTNRKVTVKQLKEDYFKKIECFDSVEISGVEDRFNASLGTYHDLLKIIKDKDFLDNEENEDILEDIVLTLTLFEDREMIEERLKTYAHLFDDKVMKQLKRRRYTGWGRLSRKLINGIRDKQSGKTILDFLKSDGFANRNFMQLIHDDSLTFKEDIQKAQVSGQGDSLHEHIANLAGSPAIKKGILQTVKVVDELVKVMGRHKPENIVIEMARENQTTQKGQKNSRERMKRIEEGIKELGSQILKEHPVENTQLQNEKLYLYYLQNGRDMYVDQELDINRLSDYDVDHIVPQSFLKDDSIDNKVLTRSDKARGKSDNVPSEEVVKKMKNYWRQLLNAKLITQRKFDNLTKAERGGLSELDKAGFIKRQLVETRQITKHVAQILDSRMNTKYDENDKLIREVKVITLKSKLVSDFRKDFQFYKVREINNYHHAHDAYLNAVVGTALIKKYPKLESEFVYGDYKVYDVRKMIAKSEQEIGKATAKYFFYSNIMNFFKTEITLANGEIRKRPLIETNGETGEIVWDKGRDFATVRKVLSMPQVNIVKKTEVQTGGFSKESILPKRNSDKLIARKKDWDPKKYGGFDSPTVAYSVLVVAKVEKGKSKKLKSVKELLGITIMERSSFEKNPIDFLEAKGYKEVKKDLIIKLPKYSLFELENGRKRMLASAGELQKGNELALPSKYVNFLYLASHYEKLKGSPEDNEQKQLFVEQHKHYLDEIIEQISEFSKRVILADANLDKVLSAYNKHRDKPIREQAENIIHLFTLTNLGAPAAFKYFDTTIDRKRYTSTKEVLDATLIHQSITGLYETRIDLSQLGGDGGGSSGSSGSSGSSGSSGSSGGTLNIEDEYRLHETSKEPDVSLGSTWLSDFPQAWAETGGMGLAVRQAPLIIPLKATSTPVSIKQYPMSQEARLGIKPHIQRLLDQGILVPCQSPWNTPLLPVKKPGTNDYRPVQDLREVNKRVEDIHPTVPNPYNLLSGLPPSHQWYTVLDLKDAFFCLRLHPTSQPLFAFEWRDPEMGISGQLTWTRLPQGFKNSPTLFNEALHRDLAGFRIQHPDLILLQYVDDLLLAATSELDCQQGTRALLQTLGDLGYRASAKKAQICQKQVKYLGYLLKEGQRWLTEARKETVMGQPIPKTPRQLREFLGKAGFCRLFIPGFAEMAAPLYPLTKPGTLFNWGPDQQKAFQEIKQALLTAPALGLPDLTKPFELFVDEKQGYAKGVLTQKLGPWRRPVAYLSKKLDPVAAGWPPCLRMVAAIAVLTKDAGKLTMGQPLVILAPHAVEALVKQPPDRWLSNARMTHYQALLLDTDRVQFGPVVALNPATLLPLPEEGLQHDCLDILAEAHGTRSDLMDQPLPDADHTWYTDGSSFLQEGQRKAGAAVTTETEVIWARALPAGTSAQRAELIALTQALKMAEGKKLNVYTDSRYAFATAHIHGEIYRRRGWLTSEGKEIKNKDEILALLKALFLPKRLSIIHCPGHQKGNSAEARGNRMADQAAREVATRETPETSTLLAGKRTADGSEFEKRTADGSEFESPKKKAKVE

SEQ ID NO: 2305 - protein, 2100 aa, synthetic construct
MPAAKRVKLDGGDKKYSIGLDIGTNSVGWAVITDEYKVPSKKFKVLGNTDRHSIKKNLIGALLFDSGETAEATRLKRTARRRYTRRKNRICYLQEIFSNEMAKVDDSFFHRLEESFLVEEDKKHERHPIFGNIVDEVAYHEKYPTIYHLRKKLVDSTDKADLRLIYLALAHMIKFRGHFLIEGDLNPDNSDVDKLFIQLVQTYNQLFEENPINASGVDAKAILSARLSKSRRLENLIAQLPGEKKNGLFGNLIALSLGLTPNFKSNFDLAEDAKLQLSKDTYDDDLDNLLAQIGDQYADLFLAAKNLSDAILLSDILRVNTEITKAPLSASMIKRYDEHHQDLTLLKALVRQQLPEKYKEIFFDQSKNGYAGYIDGGASQEEFYKFIKPILEKMDGTEELLVKLNREDLLRKQRTFDNGSIPHQIHLGELHAILRRQEDFYPFLKDNREKIEKILTFRIPYYVGPLARGNSRFAWMTRKSEETITPWNFEEVVDKGASAQSFIERMTNFDKNLPNEKVLPKHSLLYEYFTVYNELTKVKYVTEGMRKPAFLSGEQKKAIVDLLFKTNRKVTVKQLKEDYFKKIECFDSVEISGVEDRFNASLGTYHDLLKIIKDKDFLDNEENEDILEDIVLTLTLFEDREMIEERLKTYAHLFDDKVMKQLKRRRYTGWGRLSRKLINGIRDKQSGKTILDFLKSDGFANRNFMQLIHDDSLTFKEDIQKAQVSGQGDSLHEHIANLAGSPAIKKGILQTVKVVDELVKVMGRHKPENIVIEMARENQTTQKGQKNSRERMKRIEEGIKELGSQILKEHPVENTQLQNEKLYLYYLQNGRDMYVDQELDINRLSDYDVDHIVPQSFLKDDSIDNKVLTRSDKARGKSDNVPSEEVVKKMKNYWRQLLNAKLITQRKFDNLTKAERGGLSELDKAGFIKRQLVETRQITKHVAQILDSRMNTKYDENDKLIREVKVITLKSKLVSDFRKDFQFYKVREINNYHHAHDAYLNAVVGTALIKKYPKLESEFVYGDYKVYDVRKMIAKSEQEIGKATAKYFFYSNIMNFFKTEITLANGEIRKRPLIETNGETGEIVWDKGRDFATVRKVLSMPQVNIVKKTEVQTGGFSKESILPKRNSDKLIARKKDWDPKKYGGFDSPTVAYSVLVVAKVEKGKSKKLKSVKELLGITIMERSSFEKNPIDFLEAKGYKEVKKDLIIKLPKYSLFELENGRKRMLASAGELQKGNELALPSKYVNFLYLASHYEKLKGSPEDNEQKQLFVEQHKHYLDEIIEQISEFSKRVILADANLDKVLSAYNKHRDKPIREQAENIIHLFTLTNLGAPAAFKYFDTTIDRKRYTSTKEVLDATLIHQSITGLYETRIDLSQLGGDGGEAAAKGGGGSEAAAKGGTLNIEDEYRLHETSKEPDVSLGSTWLSDFPQAWAETGGMGLAVRQAPLIIPLKATSTPVSIKQYPMSQEARLGIKPHIQRLLDQGILVPCQSPWNTPLLPVKKPGTNDYRPVQDLREVNKRVEDIHPTVPNPYNLLSGLPPSHQWYTVLDLKDAFFCLRLHPTSQPLFAFEWRDPEMGISGQLTWTRLPQGFKNSPTLFNEALHRDLAGFRIQHPDLILLQYVDDLLLAATSELDCQQGTRALLQTLGDLGYRASAKKAQICQKQVKYLGYLLKEGQRWLTEARKETVMGQPIPKTPRQLREFLGKAGFCRLFIPGFAEMAAPLYPLTKPGTLFNWGPDQQKAFQEIKQALLTAPALGLPDLTKPFELFVDEKQGYAKGVLTQKLGPWRRPVAYLSKKLDPVAAGWPPCLRMVAAIAVLTKDAGKLTMGQPLVILAPHAVEALVKQPPDRWLSNARMTHYQALLLDTDRVQFGPVVALNPATLLPLPEEGLQHDCLDILAEAHGTRSDLMDQPLPDADHTWYTDGSSFLQEGQRKAGAAVTTETEVIWARALPAGTSAQRAELIALTQALKMAEGKKLNVYTDSRYAFATAHIHGEIYRRRGWLTSEGKEIKNKDEILALLKALFLPKRLSIIHCPGHQKGNSAEARGNRMADQAAREVATRETPETSTLLAGKRTADGSEFEKRTADGSEFESPKKKAKVE

SEQ ID NO: 2306 - protein, 2096 aa, synthetic construct
MPAAKRVKLDGGDKKYSIGLDIGTNSVGWAVITDEYKVPSKKFKVLGNTDRHSIKKNLIGALLFDSGETAEATRLKRTARRRYTRRKNRICYLQEIFSNEMAKVDDSFFHRLEESFLVEEDKKHERHPIFGNIVDEVAYHEKYPTIYHLRKKLVDSTDKADLRLIYLALAHMIKFRGHFLIEGDLNPDNSDVDKLFIQLVQTYNQLFEENPINASGVDAKAILSARLSKSRRLENLIAQLPGEKKNGLFGNLIALSLGLTPNFKSNFDLAEDAKLQLSKDTYDDDLDNLLAQIGDQYADLFLAAKNLSDAILLSDILRVNTEITKAPLSASMIKRYDEHHQDLTLLKALVRQQLPEKYKEIFFDQSKNGYAGYIDGGASQEEFYKFIKPILEKMDGTEELLVKLNREDLLRKQRTFDNGSIPHQIHLGELHAILRRQEDFYPFLKDNREKIEKILTFRIPYYVGPLARGNSRFAWMTRKSEETITPWNFEEVVDKGASAQSFIERMTNFDKNLPNEKVLPKHSLLYEYFTVYNELTKVKYVTEGMRKPAFLSGEQKKAIVDLLFKTNRKVTVKQLKEDYFKKIECFDSVEISGVEDRFNASLGTYHDLLKIIKDKDFLDNEENEDILEDIVLTLTLFEDREMIEERLKTYAHLFDDKVMKQLKRRRYTGWGRLSRKLINGIRDKQSGKTILDFLKSDGFANRNFMQLIHDDSLTFKEDIQKAQVSGQGDSLHEHIANLAGSPAIKKGILQTVKVVDELVKVMGRHKPENIVIEMARENQTTQKGQKNSRERMKRIEEGIKELGSQILKEHPVENTQLQNEKLYLYYLQNGRDMYVDQELDINRLSDYDVDHIVPQSFLKDDSIDNKVLTRSDKARGKSDNVPSEEVVKKMKNYWRQLLNAKLITQRKFDNLTKAERGGLSELDKAGFIKRQLVETRQITKHVAQILDSRMNTKYDENDKLIREVKVITLKSKLVSDFRKDFQFYKVREINNYHHAHDAYLNAVVGTALIKKYPKLESEFVYGDYKVYDVRKMIAKSEQEIGKATAKYFFYSNIMNFFKTEITLANGEIRKRPLIETNGETGEIVWDKGRDFATVRKVLSMPQVNIVKKTEVQTGGFSKESILPKRNSDKLIARKKDWDPKKYGGFDSPTVAYSVLVVAKVEKGKSKKLKSVKELLGITIMERSSFEKNPIDFLEAKGYKEVKKDLIIKLPKYSLFELENGRKRMLASAGELQKGNELALPSKYVNFLYLASHYEKLKGSPEDNEQKQLFVEQHKHYLDEIIEQISEFSKRVILADANLDKVLSAYNKHRDKPIREQAENIIHLFTLTNLGAPAAFKYFDTTIDRKRYTSTKEVLDATLIHQSITGLYETRIDLSQLGGDGGGGGEAAAKGGSGGTLNIEDEYRLHETSKEPDVSLGSTWLSDFPQAWAETGGMGLAVRQAPLIIPLKATSTPVSIKQYPMSQEARLGIKPHIQRLLDQGILVPCQSPWNTPLLPVKKPGTNDYRPVQDLREVNKRVEDIHPTVPNPYNLLSGLPPSHQWYTVLDLKDAFFCLRLHPTSQPLFAFEWRDPEMGISGQLTWTRLPQGFKNSPTLFNEALHRDLAGFRIQHPDLILLQYVDDLLLAATSELDCQQGTRALLQTLGDLGYRASAKKAQICQKQVKYLGYLLKEGQRWLTEARKETVMGQPIPKTPRQLREFLGKAGFCRLFIPGFAEMAAPLYPLTKPGTLFNWGPDQQKAFQEIKQALLTAPALGLPDLTKPFELFVDEKQGYAKGVLTQKLGPWRRPVAYLSKKLDPVAAGWPPCLRMVAAIAVLTKDAGKLTMGQPLVILAPHAVEALVKQPPDRWLSNARMTHYQALLLDTDRVQFGPVVALNPATLLPLPEEGLQHDCLDILAEAHGTRSDLMDQPLPDADHTWYTDGSSFLQEGQRKAGAAVTTETEVIWARALPAGTSAQRAELIALTQALKMAEGKKLNVYTDSRYAFATAHIHGEIYRRRGWLTSEGKEIKNKDEILALLKALFLPKRLSIIHCPGHQKGNSAEARGNRMADQAAREVATRETPETSTLLAGKRTADGSEFEKRTADGSEFESPKKKAKVE

SEQ ID NO: 2307 - protein, 2092 aa, synthetic construct
MPAAKRVKLDGGDKKYSIGLDIGTNSVGWAVITDEYKVPSKKFKVLGNTDRHSIKKNLIGALLFDSGETAEATRLKRTARRRYTRRKNRICYLQEIFSNEMAKVDDSFFHRLEESFLVEEDKKHERHPIFGNIVDEVAYHEKYPTIYHLRKKLVDSTDKADLRLIYLALAHMIKFRGHFLIEGDLNPDNSDVDKLFIQLVQTYNQLFEENPINASGVDAKAILSARLSKSRRLENLIAQLPGEKKNGLFGNLIALSLGLTPNFKSNFDLAEDAKLQLSKDTYDDDLDNLLAQIGDQYADLFLAAKNLSDAILLSDILRVNTEITKAPLSASMIKRYDEHHQDLTLLKALVRQQLPEKYKEIFFDQSKNGYAGYIDGGASQEEFYKFIKPILEKMDGTEELLVKLNREDLLRKQRTFDNGSIPHQIHLGELHAILRRQEDFYPFLKDNREKIEKILTFRIPYYVGPLARGNSRFAWMTRKSEETITPWNFEEVVDKGASAQSFIERMTNFDKNLPNEKVLPKHSLLYEYFTVYNELTKVKYVTEGMRKPAFLSGEQKKAIVDLLFKTNRKVTVKQLKEDYFKKIECFDSVEISGVEDRFNASLGTYHDLLKIIKDKDFLDNEENEDILEDIVLTLTLFEDREMIEERLKTYAHLFDDKVMKQLKRRRYTGWGRLSRKLINGIRDKQSGKTILDFLKSDGFANRNFMQLIHDDSLTFKEDIQKAQVSGQGDSLHEHIANLAGSPAIKKGILQTVKVVDELVKVMGRHKPENIVIEMARENQTTQKGQKNSRERMKRIEEGIKELGSQILKEHPVENTQLQNEKLYLYYLQNGRDMYVDQELDINRLSDYDVDHIVPQSFLKDDSIDNKVLTRSDKARGKSDNVPSEEVVKKMKNYWRQLLNAKLITQRKFDNLTKAERGGLSELDKAGFIKRQLVETRQITKHVAQILDSRMNTKYDENDKLIREVKVITLKSKLVSDFRKDFQFYKVREINNYHHAHDAYLNAVVGTALIKKYPKLESEFVYGDYKVYDVRKMIAKSEQEIGKATAKYFFYSNIMNFFKTEITLANGEIRKRPLIETNGETGEIVWDKGRDFATVRKVLSMPQVNIVKKTEVQTGGFSKESILPKRNSDKLIARKKDWDPKKYGGFDSPTVAYSVLVVAKVEKGKSKKLKSVKELLGITIMERSSFEKNPIDFLEAKGYKEVKKDLIIKLPKYSLFELENGRKRMLASAGELQKGNELALPSKYVNFLYLASHYEKLKGSPEDNEQKQLFVEQHKHYLDEIIEQISEFSKRVILADANLDKVLSAYNKHRDKPIREQAENIIHLFTLTNLGAPAAFKYFDTTIDRKRYTSTKEVLDATLIHQSITGLYETRIDLSQLGGDGGGGGGGGGGGTLNIEDEYRLHETSKEPDVSLGSTWLSDFPQAWAETGGMGLAVRQAPLIIPLKATSTPVSIKQYPMSQEARLGIKPHIQRLLDQGILVPCQSPWNTPLLPVKKPGTNDYRPVQDLREVNKRVEDIHPTVPNPYNLLSGLPPSHQWYTVLDLKDAFFCLRLHPTSQPLFAFEWRDPEMGISGQLTWTRLPQGFKNSPTLFNEALHRDLAGFRIQHPDLILLQYVDDLLLAATSELDCQQGTRALLQTLGDLGYRASAKKAQICQKQVKYLGYLLKEGQRWLTEARKETVMGQPIPKTPRQLREFLGKAGFCRLFIPGFAEMAAPLYPLTKPGTLFNWGPDQQKAFQEIKQALLTAPALGLPDLTKPFELFVDEKQGYAKGVLTQKLGPWRRPVAYLSKKLDPVAAGWPPCLRMVAAIAVLTKDAGKLTMGQPLVILAPHAVEALVKQPPDRWLSNARMTHYQALLLDTDRVQFGPVVALNPATLLPLPEEGLQHDCLDILAEAHGTRSDLMDQPLPDADHTWYTDGSSFLQEGQRKAGAAVTTETEVIWARALPAGTSAQRAELIALTQALKMAEGKKLNVYTDSRYAFATAHIHGEIYRRRGWLTSEGKEIKNKDEILALLKALFLPKRLSIIHCPGHQKGNSAEARGNRMADQAAREVATRETPETSTLLAGKRTADGSEFEKRTADGSEFESPKKKAKVE

SEQ ID NO: 2308 - protein, 2094 aa, synthetic construct
MPAAKRVKLDGGDKKYSIGLDIGTNSVGWAVITDEYKVPSKKFKVLGNTDRHSIKKNLIGALLFDSGETAEATRLKRTARRRYTRRKNRICYLQEIFSNEMAKVDDSFFHRLEESFLVEEDKKHERHPIFGNIVDEVAYHEKYPTIYHLRKKLVDSTDKADLRLIYLALAHMIKFRGHFLIEGDLNPDNSDVDKLFIQLVQTYNQLFEENPINASGVDAKAILSARLSKSRRLENLIAQLPGEKKNGLFGNLIALSLGLTPNFKSNFDLAEDAKLQLSKDTYDDDLDNLLAQIGDQYADLFLAAKNLSDAILLSDILRVNTEITKAPLSASMIKRYDEHHQDLTLLKALVRQQLPEKYKEIFFDQSKNGYAGYIDGGASQEEFYKFIKPILEKMDGTEELLVKLNREDLLRKQRTFDNGSIPHQIHLGELHAILRRQEDFYPFLKDNREKIEKILTFRIPYYVGPLARGNSRFAWMTRKSEETITPWNFEEVVDKGASAQSFIERMTNFDKNLPNEKVLPKHSLLYEYFTVYNELTKVKYVTEGMRKPAFLSGEQKKAIVDLLFKTNRKVTVKQLKEDYFKKIECFDSVEISGVEDRFNASLGTYHDLLKIIKDKDFLDNEENEDILEDIVLTLTLFEDREMIEERLKTYAHLFDDKVMKQLKRRRYTGWGRLSRKLINGIRDKQSGKTILDFLKSDGFANRNFMQLIHDDSLTFKEDIQKAQVSGQGDSLHEHIANLAGSPAIKKGILQTVKVVDELVKVMGRHKPENIVIEMARENQTTQKGQKNSRERMKRIEEGIKELGSQILKEHPVENTQLQNEKLYLYYLQNGRDMYVDQELDINRLSDYDVDHIVPQSFLKDDSIDNKVLTRSDKARGKSDNVPSEEVVKKMKNYWRQLLNAKLITQRKFDNLTKAERGGLSELDKAGFIKRQLVETRQITKHVAQILDSRMNTKYDENDKLIREVKVITLKSKLVSDFRKDFQFYKVREINNYHHAHDAYLNAVVGTALIKKYPKLESEFVYGDYKVYDVRKMIAKSEQEIGKATAKYFFYSNIMNFFKTEITLANGEIRKRPLIETNGETGEIVWDKGRDFATVRKVLSMPQVNIVKKTEVQTGGFSKESILPKRNSDKLIARKKDWDPKKYGGFDSPTVAYSVLVVAKVEKGKSKKLKSVKELLGITIMERSSFEKNPIDFLEAKGYKEVKKDLIIKLPKYSLFELENGRKRMLASAGELQKGNELALPSKYVNFLYLASHYEKLKGSPEDNEQKQLFVEQHKHYLDEIIEQISEFSKRVILADANLDKVLSAYNKHRDKPIREQAENIIHLFTLTNLGAPAAFKYFDTTIDRKRYTSTKEVLDATLIHQSITGLYETRIDLSQLGGDGGPAPGGGGSSGGTLNIEDEYRLHETSKEPDVSLGSTWLSDFPQAWAETGGMGLAVRQAPLIIPLKATSTPVSIKQYPMSQEARLGIKPHIQRLLDQGILVPCQSPWNTPLLPVKKPGTNDYRPVQDLREVNKRVEDIHPTVPNPYNLLSGLPPSHQWYTVLDLKDAFFCLRLHPTSQPLFAFEWRDPEMGISGQLTWTRLPQGFKNSPTLFNEALHRDLAGFRIQHPDLILLQYVDDLLLAATSELDCQQGTRALLQTLGDLGYRASAKKAQICQKQVKYLGYLLKEGQRWLTEARKETVMGQPIPKTPRQLREFLGKAGFCRLFIPGFAEMAAPLYPLTKPGTLFNWGPDQQKAFQEIKQALLTAPALGLPDLTKPFELFVDEKQGYAKGVLTQKLGPWRRPVAYLSKKLDPVAAGWPPCLRMVAAIAVLTKDAGKLTMGQPLVILAPHAVEALVKQPPDRWLSNARMTHYQALLLDTDRVQFGPVVALNPATLLPLPEEGLQHDCLDILAEAHGTRSDLMDQPLPDADHTWYTDGSSFLQEGQRKAGAAVTTETEVIWARALPAGTSAQRAELIALTQALKMAEGKKLNVYTDSRYAFATAHIHGEIYRRRGWLTSEGKEIKNKDEILALLKALFLPKRLSIIHCPGHQKGNSAEARGNRMADQAAREVATRETPETSTLLAGKRTADGSEFEKRTADGSEFESPKKKAKVE

SEQ ID NO: 2309 - protein, 2098 aa, synthetic construct
MPAAKRVKLDGGDKKYSIGLDIGTNSVGWAVITDEYKVPSKKFKVLGNTDRHSIKKNLIGALLFDSGETAEATRLKRTARRRYTRRKNRICYLQEIFSNEMAKVDDSFFHRLEESFLVEEDKKHERHPIFGNIVDEVAYHEKYPTIYHLRKKLVDSTDKADLRLIYLALAHMIKFRGHFLIEGDLNPDNSDVDKLFIQLVQTYNQLFEENPINASGVDAKAILSARLSKSRRLENLIAQLPGEKKNGLFGNLIALSLGLTPNFKSNFDLAEDAKLQLSKDTYDDDLDNLLAQIGDQYADLFLAAKNLSDAILLSDILRVNTEITKAPLSASMIKRYDEHHQDLTLLKALVRQQLPEKYKEIFFDQSKNGYAGYIDGGASQEEFYKFIKPILEKMDGTEELLVKLNREDLLRKQRTFDNGSIPHQIHLGELHAILRRQEDFYPFLKDNREKIEKILTFRIPYYVGPLARGNSRFAWMTRKSEETITPWNFEEVVDKGASAQSFIERMTNFDKNLPNEKVLPKHSLLYEYFTVYNELTKVKYVTEGMRKPAFLSGEQKKAIVDLLFKTNRKVTVKQLKEDYFKKIECFDSVEISGVEDRFNASLGTYHDLLKIIKDKDFLDNEENEDILEDIVLTLTLFEDREMIEERLKTYAHLFDDKVMKQLKRRRYTGWGRLSRKLINGIRDKQSGKTILDFLKSDGFANRNFMQLIHDDSLTFKEDIQKAQVSGQGDSLHEHIANLAGSPAIKKGILQTVKVVDELVKVMGRHKPENIVIEMARENQTTQKGQKNSRERMKRIEEGIKELGSQILKEHPVENTQLQNEKLYLYYLQNGRDMYVDQELDINRLSDYDVDHIVPQSFLKDDSIDNKVLTRSDKARGKSDNVPSEEVVKKMKNYWRQLLNAKLITQRKFDNLTKAERGGLSELDKAGFIKRQLVETRQITKHVAQILDSRMNTKYDENDKLIREVKVITLKSKLVSDFRKDFQFYKVREINNYHHAHDAYLNAVVGTALIKKYPKLESEFVYGDYKVYDVRKMIAKSEQEIGKATAKYFFYSNIMNFFKTEITLANGEIRKRPLIETNGETGEIVWDKGRDFATVRKVLSMPQVNIVKKTEVQTGGFSKESILPKRNSDKLIARKKDWDPKKYGGFDSPTVAYSVLVVAKVEKGKSKKLKSVKELLGITIMERSSFEKNPIDFLEAKGYKEVKKDLIIKLPKYSLFELENGRKRMLASAGELQKGNELALPSKYVNFLYLASHYEKLKGSPEDNEQKQLFVEQHKHYLDEIIEQISEFSKRVILADANLDKVLSAYNKHRDKPIREQAENIIHLFTLTNLGAPAAFKYFDTTIDRKRYTSTKEVLDATLIHQSITGLYETRIDLSQLGGDGGPAPAPAPAPAPAPGGTLNIEDEYRLHETSKEPDVSLGSTWLSDFPQAWAETGGMGLAVRQAPLIIPLKATSTPVSIKQYPMSQEARLGIKPHIQRLLDQGILVPCQSPWNTPLLPVKKPGTNDYRPVQDLREVNKRVEDIHPTVPNPYNLLSGLPPSHQWYTVLDLKDAFFCLRLHPTSQPLFAFEWRDPEMGISGQLTWTRLPQGFKNSPTLFNEALHRDLAGFRIQHPDLILLQYVDDLLLAATSELDCQQGTRALLQTLGDLGYRASAKKAQICQKQVKYLGYLLKEGQRWLTEARKETVMGQPIPKTPRQLREFLGKAGFCRLFIPGFAEMAAPLYPLTKPGTLFNWGPDQQKAFQEIKQALLTAPALGLPDLTKPFELFVDEKQGYAKGVLTQKLGPWRRPVAYLSKKLDPVAAGWPPCLRMVAAIAVLTKDAGKLTMGQPLVILAPHAVEALVKQPPDRWLSNARMTHYQALLLDTDRVQFGPVVALNPATLLPLPEEGLQHDCLDILAEAHGTRSDLMDQPLPDADHTWYTDGSSFLQEGQRKAGAAVTTETEVIWARALPAGTSAQRAELIALTQALKMAEGKKLNVYTDSRYAFATAHIHGEIYRRRGWLTSEGKEIKNKDEILALLKALFLPKRLSIIHCPGHQKGNSAEARGNRMADQAAREVATRETPETSTLLAGKRTADGSEFEKRTADGSEFESPKKKAKVE

SEQ ID NO: 2310 - protein, 2100 aa, synthetic construct
MPAAKRVKLDGGDKKYSIGLDIGTNSVGWAVITDEYKVPSKKFKVLGNTDRHSIKKNLIGALLFDSGETAEATRLKRTARRRYTRRKNRICYLQEIFSNEMAKVDDSFFHRLEESFLVEEDKKHERHPIFGNIVDEVAYHEKYPTIYHLRKKLVDSTDKADLRLIYLALAHMIKFRGHFLIEGDLNPDNSDVDKLFIQLVQTYNQLFEENPINASGVDAKAILSARLSKSRRLENLIAQLPGEKKNGLFGNLIALSLGLTPNFKSNFDLAEDAKLQLSKDTYDDDLDNLLAQIGDQYADLFLAAKNLSDAILLSDILRVNTEITKAPLSASMIKRYDEHHQDLTLLKALVRQQLPEKYKEIFFDQSKNGYAGYIDGGASQEEFYKFIKPILEKMDGTEELLVKLNREDLLRKQRTFDNGSIPHQIHLGELHAILRRQEDFYPFLKDNREKIEKILTFRIPYYVGPLARGNSRFAWMTRKSEETITPWNFEEVVDKGASAQSFIERMTNFDKNLPNEKVLPKHSLLYEYFTVYNELTKVKYVTEGMRKPAFLSGEQKKAIVDLLFKTNRKVTVKQLKEDYFKKIECFDSVEISGVEDRFNASLGTYHDLLKIIKDKDFLDNEENEDILEDIVLTLTLFEDREMIEERLKTYAHLFDDKVMKQLKRRRYTGWGRLSRKLINGIRDKQSGKTILDFLKSDGFANRNFMQLIHDDSLTFKEDIQKAQVSGQGDSLHEHIANLAGSPAIKKGILQTVKVVDELVKVMGRHKPENIVIEMARENQTTQKGQKNSRERMKRIEEGIKELGSQILKEHPVENTQLQNEKLYLYYLQNGRDMYVDQELDINRLSDYDVDHIVPQSFLKDDSIDNKVLTRSDKARGKSDNVPSEEVVKKMKNYWRQLLNAKLITQRKFDNLTKAERGGLSELDKAGFIKRQLVETRQITKHVAQILDSRMNTKYDENDKLIREVKVITLKSKLVSDFRKDFQFYKVREINNYHHAHDAYLNAVVGTALIKKYPKLESEFVYGDYKVYDVRKMIAKSEQEIGKATAKYFFYSNIMNFFKTEITLANGEIRKRPLIETNGETGEIVWDKGRDFATVRKVLSMPQVNIVKKTEVQTGGFSKESILPKRNSDKLIARKKDWDPKKYGGFDSPTVAYSVLVVAKVEKGKSKKLKSVKELLGITIMERSSFEKNPIDFLEAKGYKEVKKDLIIKLPKYSLFELENGRKRMLASAGELQKGNELALPSKYVNFLYLASHYEKLKGSPEDNEQKQLFVEQHKHYLDEIIEQISEFSKRVILADANLDKVLSAYNKHRDKPIREQAENIIHLFTLTNLGAPAAFKYFDTTIDRKRYTSTKEVLDATLIHQSITGLYETRIDLSQLGGDGGGGSGGSGGSGGSGGSGGTLNIEDEYRLHETSKEPDVSLGSTWLSDFPQAWAETGGMGLAVRQAPLIIPLKATSTPVSIKQYPMSQEARLGIKPHIQRLLDQGILVPCQSPWNTPLLPVKKPGTNDYRPVQDLREVNKRVEDIHPTVPNPYNLLSGLPPSHQWYTVLDLKDAFFCLRLHPTSQPLFAFEWRDPEMGISGQLTWTRLPQGFKNSPTLFNEALHRDLAGFRIQHPDLILLQYVDDLLLAATSELDCQQGTRALLQTLGDLGYRASAKKAQICQKQVKYLGYLLKEGQRWLTEARKETVMGQPIPKTPRQLREFLGKAGFCRLFIPGFAEMAAPLYPLTKPGTLFNWGPDQQKAFQEIKQALLTAPALGLPDLTKPFELFVDEKQGYAKGVLTQKLGPWRRPVAYLSKKLDPVAAGWPPCLRMVAAIAVLTKDAGKLTMGQPLVILAPHAVEALVKQPPDRWLSNARMTHYQALLLDTDRVQFGPVVALNPATLLPLPEEGLQHDCLDILAEAHGTRSDLMDQPLPDADHTWYTDGSSFLQEGQRKAGAAVTTETEVIWARALPAGTSAQRAELIALTQALKMAEGKKLNVYTDSRYAFATAHIHGEIYRRRGWLTSEGKEIKNKDEILALLKALFLPKRLSIIHCPGHQKGNSAEARGNRMADQAAREVATRETPETSTLLAGKRTADGSEFEKRTADGSEFESPKKKAKVE

SEQ ID NO: 2311 - protein, 2105 aa, synthetic construct
MPAAKRVKLDGGDKKYSIGLDIGTNSVGWAVITDEYKVPSKKFKVLGNTDRHSIKKNLIGALLFDSGETAEATRLKRTARRRYTRRKNRICYLQEIFSNEMAKVDDSFFHRLEESFLVEEDKKHERHPIFGNIVDEVAYHEKYPTIYHLRKKLVDSTDKADLRLIYLALAHMIKFRGHFLIEGDLNPDNSDVDKLFIQLVQTYNQLFEENPINASGVDAKAILSARLSKSRRLENLIAQLPGEKKNGLFGNLIALSLGLTPNFKSNFDLAEDAKLQLSKDTYDDDLDNLLAQIGDQYADLFLAAKNLSDAILLSDILRVNTEITKAPLSASMIKRYDEHHQDLTLLKALVRQQLPEKYKEIFFDQSKNGYAGYIDGGASQEEFYKFIKPILEKMDGTEELLVKLNREDLLRKQRTFDNGSIPHQIHLGELHAILRRQEDFYPFLKDNREKIEKILTFRIPYYVGPLARGNSRFAWMTRKSEETITPWNFEEVVDKGASAQSFIERMTNFDKNLPNEKVLPKHSLLYEYFTVYNELTKVKYVTEGMRKPAFLSGEQKKAIVDLLFKTNRKVTVKQLKEDYFKKIECFDSVEISGVEDRFNASLGTYHDLLKIIKDKDFLDNEENEDILEDIVLTLTLFEDREMIEERLKTYAHLFDDKVMKQLKRRRYTGWGRLSRKLINGIRDKQSGKTILDFLKSDGFANRNFMQLIHDDSLTFKEDIQKAQVSGQGDSLHEHIANLAGSPAIKKGILQTVKVVDELVKVMGRHKPENIVIEMARENQTTQKGQKNSRERMKRIEEGIKELGSQILKEHPVENTQLQNEKLYLYYLQNGRDMYVDQELDINRLSDYDVDHIVPQSFLKDDSIDNKVLTRSDKARGKSDNVPSEEVVKKMKNYWRQLLNAKLITQRKFDNLTKAERGGLSELDKAGFIKRQLVETRQITKHVAQILDSRMNTKYDENDKLIREVKVITLKSKLVSDFRKDFQFYKVREINNYHHAHDAYLNAVVGTALIKKYPKLESEFVYGDYKVYDVRKMIAKSEQEIGKATAKYFFYSNIMNFFKTEITLANGEIRKRPLIETNGETGEIVWDKGRDFATVRKVLSMPQVNIVKKTEVQTGGFSKESILPKRNSDKLIARKKDWDPKKYGGFDSPTVAYSVLVVAKVEKGKSKKLKSVKELLGITIMERSSFEKNPIDFLEAKGYKEVKKDLIIKLPKYSLFELENGRKRMLASAGELQKGNELALPSKYVNFLYLASHYEKLKGSPEDNEQKQLFVEQHKHYLDEIIEQISEFSKRVILADANLDKVLSAYNKHRDKPIREQAENIIHLFTLTNLGAPAAFKYFDTTIDRKRYTSTKEVLDATLIHQSITGLYETRIDLSQLGGDGGGGGGSGGGGSGGGGSGGGGSGGTLNIEDEYRLHETSKEPDVSLGSTWLSDFPQAWAETGGMGLAVRQAPLIIPLKATSTPVSIKQYPMSQEARLGIKPHIQRLLDQGILVPCQSPWNTPLLPVKKPGTNDYRPVQDLREVNKRVEDIHPTVPNPYNLLSGLPPSHQWYTVLDLKDAFFCLRLHPTSQPLFAFEWRDPEMGISGQLTWTRLPQGFKNSPTLFNEALHRDLAGFRIQHPDLILLQYVDDLLLAATSELDCQQGTRALLQTLGDLGYRASAKKAQICQKQVKYLGYLLKEGQRWLTEARKETVMGQPIPKTPRQLREFLGKAGFCRLFIPGFAEMAAPLYPLTKPGTLFNWGPDQQKAFQEIKQALLTAPALGLPDLTKPFELFVDEKQGYAKGVLTQKLGPWRRPVAYLSKKLDPVAAGWPPCLRMVAAIAVLTKDAGKLTMGQPLVILAPHAVEALVKQPPDRWLSNARMTHYQALLLDTDRVQFGPVVALNPATLLPLPEEGLQHDCLDILAEAHGTRSDLMDQPLPDADHTWYTDGSSFLQEGQRKAGAAVTTETEVIWARALPAGTSAQRAELIALTQALKMAEGKKLNVYTDSRYAFATAHIHGEIYRRRGWLTSEGKEIKNKDEILALLKALFLPKRLSIIHCPGHQKGNSAEARGNRMADQAAREVATRETPETSTLLAGKRTADGSEFEKRTADGSEFESPKKKAKVE

SEQ ID NO: 2312 - protein, 2094 aa, synthetic construct
MPAAKRVKLDGGDKKYSIGLDIGTNSVGWAVITDEYKVPSKKFKVLGNTDRHSIKKNLIGALLFDSGETAEATRLKRTARRRYTRRKNRICYLQEIFSNEMAKVDDSFFHRLEESFLVEEDKKHERHPIFGNIVDEVAYHEKYPTIYHLRKKLVDSTDKADLRLIYLALAHMIKFRGHFLIEGDLNPDNSDVDKLFIQLVQTYNQLFEENPINASGVDAKAILSARLSKSRRLENLIAQLPGEKKNGLFGNLIALSLGLTPNFKSNFDLAEDAKLQLSKDTYDDDLDNLLAQIGDQYADLFLAAKNLSDAILLSDILRVNTEITKAPLSASMIKRYDEHHQDLTLLKALVRQQLPEKYKEIFFDQSKNGYAGYIDGGASQEEFYKFIKPILEKMDGTEELLVKLNREDLLRKQRTFDNGSIPHQIHLGELHAILRRQEDFYPFLKDNREKIEKILTFRIPYYVGPLARGNSRFAWMTRKSEETITPWNFEEVVDKGASAQSFIERMTNFDKNLPNEKVLPKHSLLYEYFTVYNELTKVKYVTEGMRKPAFLSGEQKKAIVDLLFKTNRKVTVKQLKEDYFKKIECFDSVEISGVEDRFNASLGTYHDLLKIIKDKDFLDNEENEDILEDIVLTLTLFEDREMIEERLKTYAHLFDDKVMKQLKRRRYTGWGRLSRKLINGIRDKQSGKTILDFLKSDGFANRNFMQLIHDDSLTFKEDIQKAQVSGQGDSLHEHIANLAGSPAIKKGILQTVKVVDELVKVMGRHKPENIVIEMARENQTTQKGQKNSRERMKRIEEGIKELGSQILKEHPVENTQLQNEKLYLYYLQNGRDMYVDQELDINRLSDYDVDHIVPQSFLKDDSIDNKVLTRSDKARGKSDNVPSEEVVKKMKNYWRQLLNAKLITQRKFDNLTKAERGGLSELDKAGFIKRQLVETRQITKHVAQILDSRMNTKYDENDKLIREVKVITLKSKLVSDFRKDFQFYKVREINNYHHAHDAYLNAVVGTALIKKYPKLESEFVYGDYKVYDVRKMIAKSEQEIGKATAKYFFYSNIMNFFKTEITLANGEIRKRPLIETNGETGEIVWDKGRDFATVRKVLSMPQVNIVKKTEVQTGGFSKESILPKRNSDKLIARKKDWDPKKYGGFDSPTVAYSVLVVAKVEKGKSKKLKSVKELLGITIMERSSFEKNPIDFLEAKGYKEVKKDLIIKLPKYSLFELENGRKRMLASAGELQKGNELALPSKYVNFLYLASHYEKLKGSPEDNEQKQLFVEQHKHYLDEIIEQISEFSKRVILADANLDKVLSAYNKHRDKPIREQAENIIHLFTLTNLGAPAAFKYFDTTIDRKRYTSTKEVLDATLIHQSITGLYETRIDLSQLGGDGGGGGGGSGSSGGTLNIEDEYRLHETSKEPDVSLGSTWLSDFPQAWAETGGMGLAVRQAPLIIPLKATSTPVSIKQYPMSQEARLGIKPHIQRLLDQGILVPCQSPWNTPLLPVKKPGTNDYRPVQDLREVNKRVEDIHPTVPNPYNLLSGLPPSHQWYTVLDLKDAFFCLRLHPTSQPLFAFEWRDPEMGISGQLTWTRLPQGFKNSPTLFNEALHRDLAGFRIQHPDLILLQYVDDLLLAATSELDCQQGTRALLQTLGDLGYRASAKKAQICQKQVKYLGYLLKEGQRWLTEARKETVMGQPIPKTPRQLREFLGKAGFCRLFIPGFAEMAAPLYPLTKPGTLFNWGPDQQKAFQEIKQALLTAPALGLPDLTKPFELFVDEKQGYAKGVLTQKLGPWRRPVAYLSKKLDPVAAGWPPCLRMVAAIAVLTKDAGKLTMGQPLVILAPHAVEALVKQPPDRWLSNARMTHYQALLLDTDRVQFGPVVALNPATLLPLPEEGLQHDCLDILAEAHGTRSDLMDQPLPDADHTWYTDGSSFLQEGQRKAGAAVTTETEVIWARALPAGTSAQRAELIALTQALKMAEGKKLNVYTDSRYAFATAHIHGEIYRRRGWLTSEGKEIKNKDEILALLKALFLPKRLSIIHCPGHQKGNSAEARGNRMADQAAREVATRETPETSTLLAGKRTADGSEFEKRTADGSEFESPKKKAKVE

SEQ ID NO: 2313 - protein, 2097 aa, synthetic construct
MPAAKRVKLDGGDKKYSIGLDIGTNSVGWAVITDEYKVPSKKFKVLGNTDRHSIKKNLIGALLFDSGETAEATRLKRTARRRYTRRKNRICYLQEIFSNEMAKVDDSFFHRLEESFLVEEDKKHERHPIFGNIVDEVAYHEKYPTIYHLRKKLVDSTDKADLRLIYLALAHMIKFRGHFLIEGDLNPDNSDVDKLFIQLVQTYNQLFEENPINASGVDAKAILSARLSKSRRLENLIAQLPGEKKNGLFGNLIALSLGLTPNFKSNFDLAEDAKLQLSKDTYDDDLDNLLAQIGDQYADLFLAAKNLSDAILLSDILRVNTEITKAPLSASMIKRYDEHHQDLTLLKALVRQQLPEKYKEIFFDQSKNGYAGYIDGGASQEEFYKFIKPILEKMDGTEELLVKLNREDLLRKQRTFDNGSIPHQIHLGELHAILRRQEDFYPFLKDNREKIEKILTFRIPYYVGPLARGNSRFAWMTRKSEETITPWNFEEVVDKGASAQSFIERMTNFDKNLPNEKVLPKHSLLYEYFTVYNELTKVKYVTEGMRKPAFLSGEQKKAIVDLLFKTNRKVTVKQLKEDYFKKIECFDSVEISGVEDRFNASLGTYHDLLKIIKDKDFLDNEENEDILEDIVLTLTLFEDREMIEERLKTYAHLFDDKVMKQLKRRRYTGWGRLSRKLINGIRDKQSGKTILDFLKSDGFANRNFMQLIHDDSLTFKEDIQKAQVSGQGDSLHEHIANLAGSPAIKKGILQTVKVVDELVKVMGRHKPENIVIEMARENQTTQKGQKNSRERMKRIEEGIKELGSQILKEHPVENTQLQNEKLYLYYLQNGRDMYVDQELDINRLSDYDVDHIVPQSFLKDDSIDNKVLTRSDKARGKSDNVPSEEVVKKMKNYWRQLLNAKLITQRKFDNLTKAERGGLSELDKAGFIKRQLVETRQITKHVAQILDSRMNTKYDENDKLIREVKVITLKSKLVSDFRKDFQFYKVREINNYHHAHDAYLNAVVGTALIKKYPKLESEFVYGDYKVYDVRKMIAKSEQEIGKATAKYFFYSNIMNFFKTEITLANGEIRKRPLIETNGETGEIVWDKGRDFATVRKVLSMPQVNIVKKTEVQTGGFSKESILPKRNSDKLIARKKDWDPKKYGGFDSPTVAYSVLVVAKVEKGKSKKLKSVKELLGITIMERSSFEKNPIDFLEAKGYKEVKKDLIIKLPKYSLFELENGRKRMLASAGELQKGNELALPSKYVNFLYLASHYEKLKGSPEDNEQKQLFVEQHKHYLDEIIEQISEFSKRVILADANLDKVLSAYNKHRDKPIREQAENIIHLFTLTNLGAPAAFKYFDTTIDRKRYTSTKEVLDATLIHQSITGLYETRIDLSQLGGDGGGSAGSAAGSGEFGGTLNIEDEYRLHETSKEPDVSLGSTWLSDFPQAWAETGGMGLAVRQAPLIIPLKATSTPVSIKQYPMSQEARLGIKPHIQRLLDQGILVPCQSPWNTPLLPVKKPGTNDYRPVQDLREVNKRVEDIHPTVPNPYNLLSGLPPSHQWYTVLDLKDAFFCLRLHPTSQPLFAFEWRDPEMGISGQLTWTRLPQGFKNSPTLFNEALHRDLAGFRIQHPDLILLQYVDDLLLAATSELDCQQGTRALLQTLGDLGYRASAKKAQICQKQVKYLGYLLKEGQRWLTEARKETVMGQPIPKTPRQLREFLGKAGFCRLFIPGFAEMAAPLYPLTKPGTLFNWGPDQQKAFQEIKQALLTAPALGLPDLTKPFELFVDEKQGYAKGVLTQKLGPWRRPVAYLSKKLDPVAAGWPPCLRMVAAIAVLTKDAGKLTMGQPLVILAPHAVEALVKQPPDRWLSNARMTHYQALLLDTDRVQFGPVVALNPATLLPLPEEGLQHDCLDILAEAHGTRSDLMDQPLPDADHTWYTDGSSFLQEGQRKAGAAVTTETEVIWARALPAGTSAQRAELIALTQALKMAEGKKLNVYTDSRYAFATAHIHGEIYRRRGWLTSEGKEIKNKDEILALLKALFLPKRLSIIHCPGHQKGNSAEARGNRMADQAAREVATRETPETSTLLAGKRTADGSEFEKRTADGSEFESPKKKAKVE

SEQ ID NO: 2314 - protein, 2096 aa, synthetic construct
MPAAKRVKLDGGDKKYSIGLDIGTNSVGWAVITDEYKVPSKKFKVLGNTDRHSIKKNLIGALLFDSGETAEATRLKRTARRRYTRRKNRICYLQEIFSNEMAKVDDSFFHRLEESFLVEEDKKHERHPIFGNIVDEVAYHEKYPTIYHLRKKLVDSTDKADLRLIYLALAHMIKFRGHFLIEGDLNPDNSDVDKLFIQLVQTYNQLFEENPINASGVDAKAILSARLSKSRRLENLIAQLPGEKKNGLFGNLIALSLGLTPNFKSNFDLAEDAKLQLSKDTYDDDLDNLLAQIGDQYADLFLAAKNLSDAILLSDILRVNTEITKAPLSASMIKRYDEHHQDLTLLKALVRQQLPEKYKEIFFDQSKNGYAGYIDGGASQEEFYKFIKPILEKMDGTEELLVKLNREDLLRKQRTFDNGSIPHQIHLGELHAILRRQEDFYPFLKDNREKIEKILTFRIPYYVGPLARGNSRFAWMTRKSEETITPWNFEEVVDKGASAQSFIERMTNFDKNLPNEKVLPKHSLLYEYFTVYNELTKVKYVTEGMRKPAFLSGEQKKAIVDLLFKTNRKVTVKQLKEDYFKKIECFDSVEISGVEDRFNASLGTYHDLLKIIKDKDFLDNEENEDILEDIVLTLTLFEDREMIEERLKTYAHLFDDKVMKQLKRRRYTGWGRLSRKLINGIRDKQSGKTILDFLKSDGFANRNFMQLIHDDSLTFKEDIQKAQVSGQGDSLHEHIANLAGSPAIKKGILQTVKVVDELVKVMGRHKPENIVIEMARENQTTQKGQKNSRERMKRIEEGIKELGSQILKEHPVENTQLQNEKLYLYYLQNGRDMYVDQELDINRLSDYDVDHIVPQSFLKDDSIDNKVLTRSDKARGKSDNVPSEEVVKKMKNYWRQLLNAKLITQRKFDNLTKAERGGLSELDKAGFIKRQLVETRQITKHVAQILDSRMNTKYDENDKLIREVKVITLKSKLVSDFRKDFQFYKVREINNYHHAHDAYLNAVVGTALIKKYPKLESEFVYGDYKVYDVRKMIAKSEQEIGKATAKYFFYSNIMNFFKTEITLANGEIRKRPLIETNGETGEIVWDKGRDFATVRKVLSMPQVNIVKKTEVQTGGFSKESILPKRNSDKLIARKKDWDPKKYGGFDSPTVAYSVLVVAKVEKGKSKKLKSVKELLGITIMERSSFEKNPIDFLEAKGYKEVKKDLIIKLPKYSLFELENGRKRMLASAGELQKGNELALPSKYVNFLYLASHYEKLKGSPEDNEQKQLFVEQHKHYLDEIIEQISEFSKRVILADANLDKVLSAYNKHRDKPIREQAENIIHLFTLTNLGAPAAFKYFDTTIDRKRYTSTKEVLDATLIHQSITGLYETRIDLSQLGGDGGPAPEAAAKGGSGGTLNIEDEYRLHETSKEPDVSLGSTWLSDFPQAWAETGGMGLAVRQAPLIIPLKATSTPVSIKQYPMSQEARLGIKPHIQRLLDQGILVPCQSPWNTPLLPVKKPGTNDYRPVQDLREVNKRVEDIHPTVPNPYNLLSGLPPSHQWYTVLDLKDAFFCLRLHPTSQPLFAFEWRDPEMGISGQLTWTRLPQGFKNSPTLFNEALHRDLAGFRIQHPDLILLQYVDDLLLAATSELDCQQGTRALLQTLGDLGYRASAKKAQICQKQVKYLGYLLKEGQRWLTEARKETVMGQPIPKTPRQLREFLGKAGFCRLFIPGFAEMAAPLYPLTKPGTLFNWGPDQQKAFQEIKQALLTAPALGLPDLTKPFELFVDEKQGYAKGVLTQKLGPWRRPVAYLSKKLDPVAAGWPPCLRMVAAIAVLTKDAGKLTMGQPLVILAPHAVEALVKQPPDRWLSNARMTHYQALLLDTDRVQFGPVVALNPATLLPLPEEGLQHDCLDILAEAHGTRSDLMDQPLPDADHTWYTDGSSFLQEGQRKAGAAVTTETEVIWARALPAGTSAQRAELIALTQALKMAEGKKLNVYTDSRYAFATAHIHGEIYRRRGWLTSEGKEIKNKDEILALLKALFLPKRLSIIHCPGHQKGNSAEARGNRMADQAAREVATRETPETSTLLAGKRTADGSEFEKRTADGSEFESPKKKAKVE

SEQ ID NO: 2315 - protein, 2096 aa, synthetic construct
MPAAKRVKLDGGDKKYSIGLDIGTNSVGWAVITDEYKVPSKKFKVLGNTDRHSIKKNLIGALLFDSGETAEATRLKRTARRRYTRRKNRICYLQEIFSNEMAKVDDSFFHRLEESFLVEEDKKHERHPIFGNIVDEVAYHEKYPTIYHLRKKLVDSTDKADLRLIYLALAHMIKFRGHFLIEGDLNPDNSDVDKLFIQLVQTYNQLFEENPINASGVDAKAILSARLSKSRRLENLIAQLPGEKKNGLFGNLIALSLGLTPNFKSNFDLAEDAKLQLSKDTYDDDLDNLLAQIGDQYADLFLAAKNLSDAILLSDILRVNTEITKAPLSASMIKRYDEHHQDLTLLKALVRQQLPEKYKEIFFDQSKNGYAGYIDGGASQEEFYKFIKPILEKMDGTEELLVKLNREDLLRKQRTFDNGSIPHQIHLGELHAILRRQEDFYPFLKDNREKIEKILTFRIPYYVGPLARGNSRFAWMTRKSEETITPWNFEEVVDKGASAQSFIERMTNFDKNLPNEKVLPKHSLLYEYFTVYNELTKVKYVTEGMRKPAFLSGEQKKAIVDLLFKTNRKVTVKQLKEDYFKKIECFDSVEISGVEDRFNASLGTYHDLLKIIKDKDFLDNEENEDILEDIVLTLTLFEDREMIEERLKTYAHLFDDKVMKQLKRRRYTGWGRLSRKLINGIRDKQSGKTILDFLKSDGFANRNFMQLIHDDSLTFKEDIQKAQVSGQGDSLHEHIANLAGSPAIKKGILQTVKVVDELVKVMGRHKPENIVIEMARENQTTQKGQKNSRERMKRIEEGIKELGSQILKEHPVENTQLQNEKLYLYYLQNGRDMYVDQELDINRLSDYDVDHIVPQSFLKDDSIDNKVLTRSDKARGKSDNVPSEEVVKKMKNYWRQLLNAKLITQRKFDNLTKAERGGLSELDKAGFIKRQLVETRQITKHVAQILDSRMNTKYDENDKLIREVKVITLKSKLVSDFRKDFQFYKVREINNYHHAHDAYLNAVVGTALIKKYPKLESEFVYGDYKVYDVRKMIAKSEQEIGKATAKYFFYSNIMNFFKTEITLANGEIRKRPLIETNGETGEIVWDKGRDFATVRKVLSMPQVNIVKKTEVQTGGFSKESILPKRNSDKLIARKKDWDPKKYGGFDSPTVAYSVLVVAKVEKGKSKKLKSVKELLGITIMERSSFEKNPIDFLEAKGYKEVKKDLIIKLPKYSLFELENGRKRMLASAGELQKGNELALPSKYVNFLYLASHYEKLKGSPEDNEQKQLFVEQHKHYLDEIIEQISEFSKRVILADANLDKVLSAYNKHRDKPIREQAENIIHLFTLTNLGAPAAFKYFDTTIDRKRYTSTKEVLDATLIHQSITGLYETRIDLSQLGGDGGEAAAKPAPGGSGGTLNIEDEYRLHETSKEPDVSLGSTWLSDFPQAWAETGGMGLAVRQAPLIIPLKATSTPVSIKQYPMSQEARLGIKPHIQRLLDQGILVPCQSPWNTPLLPVKKPGTNDYRPVQDLREVNKRVEDIHPTVPNPYNLLSGLPPSHQWYTVLDLKDAFFCLRLHPTSQPLFAFEWRDPEMGISGQLTWTRLPQGFKNSPTLFNEALHRDLAGFRIQHPDLILLQYVDDLLLAATSELDCQQGTRALLQTLGDLGYRASAKKAQICQKQVKYLGYLLKEGQRWLTEARKETVMGQPIPKTPRQLREFLGKAGFCRLFIPGFAEMAAPLYPLTKPGTLFNWGPDQQKAFQEIKQALLTAPALGLPDLTKPFELFVDEKQGYAKGVLTQKLGPWRRPVAYLSKKLDPVAAGWPPCLRMVAAIAVLTKDAGKLTMGQPLVILAPHAVEALVKQPPDRWLSNARMTHYQALLLDTDRVQFGPVVALNPATLLPLPEEGLQHDCLDILAEAHGTRSDLMDQPLPDADHTWYTDGSSFLQEGQRKAGAAVTTETEVIWARALPAGTSAQRAELIALTQALKMAEGKKLNVYTDSRYAFATAHIHGEIYRRRGWLTSEGKEIKNKDEILALLKALFLPKRLSIIHCPGHQKGNSAEARGNRMADQAAREVATRETPETSTLLAGKRTADGSEFEKRTADGSEFESPKKKAKVE

SEQ ID NO: 2316 - protein, 2096 aa, synthetic construct
MPAAKRVKLDGGDKKYSIGLDIGTNSVGWAVITDEYKVPSKKFKVLGNTDRHSIKKNLIGALLFDSGETAEATRLKRTARRRYTRRKNRICYLQEIFSNEMAKVDDSFFHRLEESFLVEEDKKHERHPIFGNIVDEVAYHEKYPTIYHLRKKLVDSTDKADLRLIYLALAHMIKFRGHFLIEGDLNPDNSDVDKLFIQLVQTYNQLFEENPINASGVDAKAILSARLSKSRRLENLIAQLPGEKKNGLFGNLIALSLGLTPNFKSNFDLAEDAKLQLSKDTYDDDLDNLLAQIGDQYADLFLAAKNLSDAILLSDILRVNTEITKAPLSASMIKRYDEHHQDLTLLKALVRQQLPEKYKEIFFDQSKNGYAGYIDGGASQEEFYKFIKPILEKMDGTEELLVKLNREDLLRKQRTFDNGSIPHQIHLGELHAILRRQEDFYPFLKDNREKIEKILTFRIPYYVGPLARGNSRFAWMTRKSEETITPWNFEEVVDKGASAQSFIERMTNFDKNLPNEKVLPKHSLLYEYFTVYNELTKVKYVTEGMRKPAFLSGEQKKAIVDLLFKTNRKVTVKQLKEDYFKKIECFDSVEISGVEDRFNASLGTYHDLLKIIKDKDFLDNEENEDILEDIVLTLTLFEDREMIEERLKTYAHLFDDKVMKQLKRRRYTGWGRLSRKLINGIRDKQSGKTILDFLKSDGFANRNFMQLIHDDSLTFKEDIQKAQVSGQGDSLHEHIANLAGSPAIKKGILQTVKVVDELVKVMGRHKPENIVIEMARENQTTQKGQKNSRERMKRIEEGIKELGSQILKEHPVENTQLQNEKLYLYYLQNGRDMYVDQELDINRLSDYDVDHIVPQSFLKDDSIDNKVLTRSDKARGKSDNVPSEEVVKKMKNYWRQLLNAKLITQRKFDNLTKAERGGLSELDKAGFIKRQLVETRQITKHVAQILDSRMNTKYDENDKLIREVKVITLKSKLVSDFRKDFQFYKVREINNYHHAHDAYLNAVVGTALIKKYPKLESEFVYGDYKVYDVRKMIAKSEQEIGKATAKYFFYSNIMNFFKTEITLANGEIRKRPLIETNGETGEIVWDKGRDFATVRKVLSMPQVNIVKKTEVQTGGFSKESILPKRNSDKLIARKKDWDPKKYGGFDSPTVAYSVLVVAKVEKGKSKKLKSVKELLGITIMERSSFEKNPIDFLEAKGYKEVKKDLIIKLPKYSLFELENGRKRMLASAGELQKGNELALPSKYVNFLYLASHYEKLKGSPEDNEQKQLFVEQHKHYLDEIIEQISEFSKRVILADANLDKVLSAYNKHRDKPIREQAENIIHLFTLTNLGAPAAFKYFDTTIDRKRYTSTKEVLDATLIHQSITGLYETRIDLSQLGGDGGGGGEAAAKGSSGGTLNIEDEYRLHETSKEPDVSLGSTWLSDFPQAWAETGGMGLAVRQAPLIIPLKATSTPVSIKQYPMSQEARLGIKPHIQRLLDQGILVPCQSPWNTPLLPVKKPGTNDYRPVQDLREVNKRVEDIHPTVPNPYNLLSGLPPSHQWYTVLDLKDAFFCLRLHPTSQPLFAFEWRDPEMGISGQLTWTRLPQGFKNSPTLFNEALHRDLAGFRIQHPDLILLQYVDDLLLAATSELDCQQGTRALLQTLGDLGYRASAKKAQICQKQVKYLGYLLKEGQRWLTEARKETVMGQPIPKTPRQLREFLGKAGFCRLFIPGFAEMAAPLYPLTKPGTLFNWGPDQQKAFQEIKQALLTAPALGLPDLTKPFELFVDEKQGYAKGVLTQKLGPWRRPVAYLSKKLDPVAAGWPPCLRMVAAIAVLTKDAGKLTMGQPLVILAPHAVEALVKQPPDRWLSNARMTHYQALLLDTDRVQFGPVVALNPATLLPLPEEGLQHDCLDILAEAHGTRSDLMDQPLPDADHTWYTDGSSFLQEGQRKAGAAVTTETEVIWARALPAGTSAQRAELIALTQALKMAEGKKLNVYTDSRYAFATAHIHGEIYRRRGWLTSEGKEIKNKDEILALLKALFLPKRLSIIHCPGHQKGNSAEARGNRMADQAAREVATRETPETSTLLAGKRTADGSEFEKRTADGSEFESPKKKAKVE

SEQ ID NO: 2317 - protein, 2094 aa, synthetic construct
MPAAKRVKLDGGDKKYSIGLDIGTNSVGWAVITDEYKVPSKKFKVLGNTDRHSIKKNLIGALLFDSGETAEATRLKRTARRRYTRRKNRICYLQEIFSNEMAKVDDSFFHRLEESFLVEEDKKHERHPIFGNIVDEVAYHEKYPTIYHLRKKLVDSTDKADLRLIYLALAHMIKFRGHFLIEGDLNPDNSDVDKLFIQLVQTYNQLFEENPINASGVDAKAILSARLSKSRRLENLIAQLPGEKKNGLFGNLIALSLGLTPNFKSNFDLAEDAKLQLSKDTYDDDLDNLLAQIGDQYADLFLAAKNLSDAILLSDILRVNTEITKAPLSASMIKRYDEHHQDLTLLKALVRQQLPEKYKEIFFDQSKNGYAGYIDGGASQEEFYKFIKPILEKMDGTEELLVKLNREDLLRKQRTFDNGSIPHQIHLGELHAILRRQEDFYPFLKDNREKIEKILTFRIPYYVGPLARGNSRFAWMTRKSEETITPWNFEEVVDKGASAQSFIERMTNFDKNLPNEKVLPKHSLLYEYFTVYNELTKVKYVTEGMRKPAFLSGEQKKAIVDLLFKTNRKVTVKQLKEDYFKKIECFDSVEISGVEDRFNASLGTYHDLLKIIKDKDFLDNEENEDILEDIVLTLTLFEDREMIEERLKTYAHLFDDKVMKQLKRRRYTGWGRLSRKLINGIRDKQSGKTILDFLKSDGFANRNFMQLIHDDSLTFKEDIQKAQVSGQGDSLHEHIANLAGSPAIKKGILQTVKVVDELVKVMGRHKPENIVIEMARENQTTQKGQKNSRERMKRIEEGIKELGSQILKEHPVENTQLQNEKLYLYYLQNGRDMYVDQELDINRLSDYDVDHIVPQSFLKDDSIDNKVLTRSDKARGKSDNVPSEEVVKKMKNYWRQLLNAKLITQRKFDNLTKAERGGLSELDKAGFIKRQLVETRQITKHVAQILDSRMNTKYDENDKLIREVKVITLKSKLVSDFRKDFQFYKVREINNYHHAHDAYLNAVVGTALIKKYPKLESEFVYGDYKVYDVRKMIAKSEQEIGKATAKYFFYSNIMNFFKTEITLANGEIRKRPLIETNGETGEIVWDKGRDFATVRKVLSMPQVNIVKKTEVQTGGFSKESILPKRNSDKLIARKKDWDPKKYGGFDSPTVAYSVLVVAKVEKGKSKKLKSVKELLGITIMERSSFEKNPIDFLEAKGYKEVKKDLIIKLPKYSLFELENGRKRMLASAGELQKGNELALPSKYVNFLYLASHYEKLKGSPEDNEQKQLFVEQHKHYLDEIIEQISEFSKRVILADANLDKVLSAYNKHRDKPIREQAENIIHLFTLTNLGAPAAFKYFDTTIDRKRYTSTKEVLDATLIHQSITGLYETRIDLSQLGGDGGGGSGGGPAPGGTLNIEDEYRLHETSKEPDVSLGSTWLSDFPQAWAETGGMGLAVRQAPLIIPLKATSTPVSIKQYPMSQEARLGIKPHIQRLLDQGILVPCQSPWNTPLLPVKKPGTNDYRPVQDLREVNKRVEDIHPTVPNPYNLLSGLPPSHQWYTVLDLKDAFFCLRLHPTSQPLFAFEWRDPEMGISGQLTWTRLPQGFKNSPTLFNEALHRDLAGFRIQHPDLILLQYVDDLLLAATSELDCQQGTRALLQTLGDLGYRASAKKAQICQKQVKYLGYLLKEGQRWLTEARKETVMGQPIPKTPRQLREFLGKAGFCRLFIPGFAEMAAPLYPLTKPGTLFNWGPDQQKAFQEIKQALLTAPALGLPDLTKPFELFVDEKQGYAKGVLTQKLGPWRRPVAYLSKKLDPVAAGWPPCLRMVAAIAVLTKDAGKLTMGQPLVILAPHAVEALVKQPPDRWLSNARMTHYQALLLDTDRVQFGPVVALNPATLLPLPEEGLQHDCLDILAEAHGTRSDLMDQPLPDADHTWYTDGSSFLQEGQRKAGAAVTTETEVIWARALPAGTSAQRAELIALTQALKMAEGKKLNVYTDSRYAFATAHIHGEIYRRRGWLTSEGKEIKNKDEILALLKALFLPKRLSIIHCPGHQKGNSAEARGNRMADQAAREVATRETPETSTLLAGKRTADGSEFEKRTADGSEFESPKKKAKVE

SEQ ID NO: 2318 - protein, 2094 aa, synthetic construct
MPAAKRVKLDGGDKKYSIGLDIGTNSVGWAVITDEYKVPSKKFKVLGNTDRHSIKKNLIGALLFDSGETAEATRLKRTARRRYTRRKNRICYLQEIFSNEMAKVDDSFFHRLEESFLVEEDKKHERHPIFGNIVDEVAYHEKYPTIYHLRKKLVDSTDKADLRLIYLALAHMIKFRGHFLIEGDLNPDNSDVDKLFIQLVQTYNQLFEENPINASGVDAKAILSARLSKSRRLENLIAQLPGEKKNGLFGNLIALSLGLTPNFKSNFDLAEDAKLQLSKDTYDDDLDNLLAQIGDQYADLFLAAKNLSDAILLSDILRVNTEITKAPLSASMIKRYDEHHQDLTLLKALVRQQLPEKYKEIFFDQSKNGYAGYIDGGASQEEFYKFIKPILEKMDGTEELLVKLNREDLLRKQRTFDNGSIPHQIHLGELHAILRRQEDFYPFLKDNREKIEKILTFRIPYYVGPLARGNSRFAWMTRKSEETITPWNFEEVVDKGASAQSFIERMTNFDKNLPNEKVLPKHSLLYEYFTVYNELTKVKYVTEGMRKPAFLSGEQKKAIVDLLFKTNRKVTVKQLKEDYFKKIECFDSVEISGVEDRFNASLGTYHDLLKIIKDKDFLDNEENEDILEDIVLTLTLFEDREMIEERLKTYAHLFDDKVMKQLKRRRYTGWGRLSRKLINGIRDKQSGKTILDFLKSDGFANRNFMQLIHDDSLTFKEDIQKAQVSGQGDSLHEHIANLAGSPAIKKGILQTVKVVDELVKVMGRHKPENIVIEMARENQTTQKGQKNSRERMKRIEEGIKELGSQILKEHPVENTQLQNEKLYLYYLQNGRDMYVDQELDINRLSDYDVDHIVPQSFLKDDSIDNKVLTRSDKARGKSDNVPSEEVVKKMKNYWRQLLNAKLITQRKFDNLTKAERGGLSELDKAGFIKRQLVETRQITKHVAQILDSRMNTKYDENDKLIREVKVITLKSKLVSDFRKDFQFYKVREINNYHHAHDAYLNAVVGTALIKKYPKLESEFVYGDYKVYDVRKMIAKSEQEIGKATAKYFFYSNIMNFFKTEITLANGEIRKRPLIETNGETGEIVWDKGRDFATVRKVLSMPQVNIVKKTEVQTGGFSKESILPKRNSDKLIARKKDWDPKKYGGFDSPTVAYSVLVVAKVEKGKSKKLKSVKELLGITIMERSSFEKNPIDFLEAKGYKEVKKDLIIKLPKYSLFELENGRKRMLASAGELQKGNELALPSKYVNFLYLASHYEKLKGSPEDNEQKQLFVEQHKHYLDEIIEQISEFSKRVILADANLDKVLSAYNKHRDKPIREQAENIIHLFTLTNLGAPAAFKYFDTTIDRKRYTSTKEVLDATLIHQSITGLYETRIDLSQLGGDGGPAPAPAPAPGGTLNIEDEYRLHETSKEPDVSLGSTWLSDFPQAWAETGGMGLAVRQAPLIIPLKATSTPVSIKQYPMSQEARLGIKPHIQRLLDQGILVPCQSPWNTPLLPVKKPGTNDYRPVQDLREVNKRVEDIHPTVPNPYNLLSGLPPSHQWYTVLDLKDAFFCLRLHPTSQPLFAFEWRDPEMGISGQLTWTRLPQGFKNSPTLFNEALHRDLAGFRIQHPDLILLQYVDDLLLAATSELDCQQGTRALLQTLGDLGYRASAKKAQICQKQVKYLGYLLKEGQRWLTEARKETVMGQPIPKTPRQLREFLGKAGFCRLFIPGFAEMAAPLYPLTKPGTLFNWGPDQQKAFQEIKQALLTAPALGLPDLTKPFELFVDEKQGYAKGVLTQKLGPWRRPVAYLSKKLDPVAAGWPPCLRMVAAIAVLTKDAGKLTMGQPLVILAPHAVEALVKQPPDRWLSNARMTHYQALLLDTDRVQFGPVVALNPATLLPLPEEGLQHDCLDILAEAHGTRSDLMDQPLPDADHTWYTDGSSFLQEGQRKAGAAVTTETEVIWARALPAGTSAQRAELIALTQALKMAEGKKLNVYTDSRYAFATAHIHGEIYRRRGWLTSEGKEIKNKDEILALLKALFLPKRLSIIHCPGHQKGNSAEARGNRMADQAAREVATRETPETSTLLAGKRTADGSEFEKRTADGSEFESPKKKAKVE

SEQ ID NO: 2319 - protein, 2097 aa, synthetic construct
MPAAKRVKLDGGDKKYSIGLDIGTNSVGWAVITDEYKVPSKKFKVLGNTDRHSIKKNLIGALLFDSGETAEATRLKRTARRRYTRRKNRICYLQEIFSNEMAKVDDSFFHRLEESFLVEEDKKHERHPIFGNIVDEVAYHEKYPTIYHLRKKLVDSTDKADLRLIYLALAHMIKFRGHFLIEGDLNPDNSDVDKLFIQLVQTYNQLFEENPINASGVDAKAILSARLSKSRRLENLIAQLPGEKKNGLFGNLIALSLGLTPNFKSNFDLAEDAKLQLSKDTYDDDLDNLLAQIGDQYADLFLAAKNLSDAILLSDILRVNTEITKAPLSASMIKRYDEHHQDLTLLKALVRQQLPEKYKEIFFDQSKNGYAGYIDGGASQEEFYKFIKPILEKMDGTEELLVKLNREDLLRKQRTFDNGSIPHQIHLGELHAILRRQEDFYPFLKDNREKIEKILTFRIPYYVGPLARGNSRFAWMTRKSEETITPWNFEEVVDKGASAQSFIERMTNFDKNLPNEKVLPKHSLLYEYFTVYNELTKVKYVTEGMRKPAFLSGEQKKAIVDLLFKTNRKVTVKQLKEDYFKKIECFDSVEISGVEDRFNASLGTYHDLLKIIKDKDFLDNEENEDILEDIVLTLTLFEDREMIEERLKTYAHLFDDKVMKQLKRRRYTGWGRLSRKLINGIRDKQSGKTILDFLKSDGFANRNFMQLIHDDSLTFKEDIQKAQVSGQGDSLHEHIANLAGSPAIKKGILQTVKVVDELVKVMGRHKPENIVIEMARENQTTQKGQKNSRERMKRIEEGIKELGSQILKEHPVENTQLQNEKLYLYYLQNGRDMYVDQELDINRLSDYDVDHIVPQSFLKDDSIDNKVLTRSDKARGKSDNVPSEEVVKKMKNYWRQLLNAKLITQRKFDNLTKAERGGLSELDKAGFIKRQLVETRQITKHVAQILDSRMNTKYDENDKLIREVKVITLKSKLVSDFRKDFQFYKVREINNYHHAHDAYLNAVVGTALIKKYPKLESEFVYGDYKVYDVRKMIAKSEQEIGKATAKYFFYSNIMNFFKTEITLANGEIRKRPLIETNGETGEIVWDKGRDFATVRKVLSMPQVNIVKKTEVQTGGFSKESILPKRNSDKLIARKKDWDPKKYGGFDSPTVAYSVLVVAKVEKGKSKKLKSVKELLGITIMERSSFEKNPIDFLEAKGYKEVKKDLIIKLPKYSLFELENGRKRMLASAGELQKGNELALPSKYVNFLYLASHYEKLKGSPEDNEQKQLFVEQHKHYLDEIIEQISEFSKRVILADANLDKVLSAYNKHRDKPIREQAENIIHLFTLTNLGAPAAFKYFDTTIDRKRYTSTKEVLDATLIHQSITGLYETRIDLSQLGGDGGGGSGGSGGSGGSGGTLNIEDEYRLHETSKEPDVSLGSTWLSDFPQAWAETGGMGLAVRQAPLIIPLKATSTPVSIKQYPMSQEARLGIKPHIQRLLDQGILVPCQSPWNTPLLPVKKPGTNDYRPVQDLREVNKRVEDIHPTVPNPYNLLSGLPPSHQWYTVLDLKDAFFCLRLHPTSQPLFAFEWRDPEMGISGQLTWTRLPQGFKNSPTLFNEALHRDLAGFRIQHPDLILLQYVDDLLLAATSELDCQQGTRALLQTLGDLGYRASAKKAQICQKQVKYLGYLLKEGQRWLTEARKETVMGQPIPKTPRQLREFLGKAGFCRLFIPGFAEMAAPLYPLTKPGTLFNWGPDQQKAFQEIKQALLTAPALGLPDLTKPFELFVDEKQGYAKGVLTQKLGPWRRPVAYLSKKLDPVAAGWPPCLRMVAAIAVLTKDAGKLTMGQPLVILAPHAVEALVKQPPDRWLSNARMTHYQALLLDTDRVQFGPVVALNPATLLPLPEEGLQHDCLDILAEAHGTRSDLMDQPLPDADHTWYTDGSSFLQEGQRKAGAAVTTETEVIWARALPAGTSAQRAELIALTQALKMAEGKKLNVYTDSRYAFATAHIHGEIYRRRGWLTSEGKEIKNKDEILALLKALFLPKRLSIIHCPGHQKGNSAEARGNRMADQAAREVATRETPETSTLLAGKRTADGSEFEKRTADGSEFESPKKKAKVE

SEQ ID NO: 2320 - protein, 2094 aa, synthetic construct
MPAAKRVKLDGGDKKYSIGLDIGTNSVGWAVITDEYKVPSKKFKVLGNTDRHSIKKNLIGALLFDSGETAEATRLKRTARRRYTRRKNRICYLQEIFSNEMAKVDDSFFHRLEESFLVEEDKKHERHPIFGNIVDEVAYHEKYPTIYHLRKKLVDSTDKADLRLIYLALAHMIKFRGHFLIEGDLNPDNSDVDKLFIQLVQTYNQLFEENPINASGVDAKAILSARLSKSRRLENLIAQLPGEKKNGLFGNLIALSLGLTPNFKSNFDLAEDAKLQLSKDTYDDDLDNLLAQIGDQYADLFLAAKNLSDAILLSDILRVNTEITKAPLSASMIKRYDEHHQDLTLLKALVRQQLPEKYKEIFFDQSKNGYAGYIDGGASQEEFYKFIKPILEKMDGTEELLVKLNREDLLRKQRTFDNGSIPHQIHLGELHAILRRQEDFYPFLKDNREKIEKILTFRIPYYVGPLARGNSRFAWMTRKSEETITPWNFEEVVDKGASAQSFIERMTNFDKNLPNEKVLPKHSLLYEYFTVYNELTKVKYVTEGMRKPAFLSGEQKKAIVDLLFKTNRKVTVKQLKEDYFKKIECFDSVEISGVEDRFNASLGTYHDLLKIIKDKDFLDNEENEDILEDIVLTLTLFEDREMIEERLKTYAHLFDDKVMKQLKRRRYTGWGRLSRKLINGIRDKQSGKTILDFLKSDGFANRNFMQLIHDDSLTFKEDIQKAQVSGQGDSLHEHIANLAGSPAIKKGILQTVKVVDELVKVMGRHKPENIVIEMARENQTTQKGQKNSRERMKRIEEGIKELGSQILKEHPVENTQLQNEKLYLYYLQNGRDMYVDQELDINRLSDYDVDHIVPQSFLKDDSIDNKVLTRSDKARGKSDNVPSEEVVKKMKNYWRQLLNAKLITQRKFDNLTKAERGGLSELDKAGFIKRQLVETRQITKHVAQILDSRMNTKYDENDKLIREVKVITLKSKLVSDFRKDFQFYKVREINNYHHAHDAYLNAVVGTALIKKYPKLESEFVYGDYKVYDVRKMIAKSEQEIGKATAKYFFYSNIMNFFKTEITLANGEIRKRPLIETNGETGEIVWDKGRDFATVRKVLSMPQVNIVKKTEVQTGGFSKESILPKRNSDKLIARKKDWDPKKYGGFDSPTVAYSVLVVAKVEKGKSKKLKSVKELLGITIMERSSFEKNPIDFLEAKGYKEVKKDLIIKLPKYSLFELENGRKRMLASAGELQKGNELALPSKYVNFLYLASHYEKLKGSPEDNEQKQLFVEQHKHYLDEIIEQISEFSKRVILADANLDKVLSAYNKHRDKPIREQAENIIHLFTLTNLGAPAAFKYFDTTIDRKRYTSTKEVLDATLIHQSITGLYETRIDLSQLGGDGGGGGPAPGGSGGTLNIEDEYRLHETSKEPDVSLGSTWLSDFPQAWAETGGMGLAVRQAPLIIPLKATSTPVSIKQYPMSQEARLGIKPHIQRLLDQGILVPCQSPWNTPLLPVKKPGTNDYRPVQDLREVNKRVEDIHPTVPNPYNLLSGLPPSHQWYTVLDLKDAFFCLRLHPTSQPLFAFEWRDPEMGISGQLTWTRLPQGFKNSPTLFNEALHRDLAGFRIQHPDLILLQYVDDLLLAATSELDCQQGTRALLQTLGDLGYRASAKKAQICQKQVKYLGYLLKEGQRWLTEARKETVMGQPIPKTPRQLREFLGKAGFCRLFIPGFAEMAAPLYPLTKPGTLFNWGPDQQKAFQEIKQALLTAPALGLPDLTKPFELFVDEKQGYAKGVLTQKLGPWRRPVAYLSKKLDPVAAGWPPCLRMVAAIAVLTKDAGKLTMGQPLVILAPHAVEALVKQPPDRWLSNARMTHYQALLLDTDRVQFGPVVALNPATLLPLPEEGLQHDCLDILAEAHGTRSDLMDQPLPDADHTWYTDGSSFLQEGQRKAGAAVTTETEVIWARALPAGTSAQRAELIALTQALKMAEGKKLNVYTDSRYAFATAHIHGEIYRRRGWLTSEGKEIKNKDEILALLKALFLPKRLSIIHCPGHQKGNSAEARGNRMADQAAREVATRETPETSTLLAGKRTADGSEFEKRTADGSEFESPKKKAKVE

SEQ ID NO: 2321 - protein, 2094 aa, synthetic construct
MPAAKRVKLDGGDKKYSIGLDIGTNSVGWAVITDEYKVPSKKFKVLGNTDRHSIKKNLIGALLFDSGETAEATRLKRTARRRYTRRKNRICYLQEIFSNEMAKVDDSFFHRLEESFLVEEDKKHERHPIFGNIVDEVAYHEKYPTIYHLRKKLVDSTDKADLRLIYLALAHMIKFRGHFLIEGDLNPDNSDVDKLFIQLVQTYNQLFEENPINASGVDAKAILSARLSKSRRLENLIAQLPGEKKNGLFGNLIALSLGLTPNFKSNFDLAEDAKLQLSKDTYDDDLDNLLAQIGDQYADLFLAAKNLSDAILLSDILRVNTEITKAPLSASMIKRYDEHHQDLTLLKALVRQQLPEKYKEIFFDQSKNGYAGYIDGGASQEEFYKFIKPILEKMDGTEELLVKLNREDLLRKQRTFDNGSIPHQIHLGELHAILRRQEDFYPFLKDNREKIEKILTFRIPYYVGPLARGNSRFAWMTRKSEETITPWNFEEVVDKGASAQSFIERMTNFDKNLPNEKVLPKHSLLYEYFTVYNELTKVKYVTEGMRKPAFLSGEQKKAIVDLLFKTNRKVTVKQLKEDYFKKIECFDSVEISGVEDRFNASLGTYHDLLKIIKDKDFLDNEENEDILEDIVLTLTLFEDREMIEERLKTYAHLFDDKVMKQLKRRRYTGWGRLSRKLINGIRDKQSGKTILDFLKSDGFANRNFMQLIHDDSLTFKEDIQKAQVSGQGDSLHEHIANLAGSPAIKKGILQTVKVVDELVKVMGRHKPENIVIEMARENQTTQKGQKNSRERMKRIEEGIKELGSQILKEHPVENTQLQNEKLYLYYLQNGRDMYVDQELDINRLSDYDVDHIVPQSFLKDDSIDNKVLTRSDKARGKSDNVPSEEVVKKMKNYWRQLLNAKLITQRKFDNLTKAERGGLSELDKAGFIKRQLVETRQITKHVAQILDSRMNTKYDENDKLIREVKVITLKSKLVSDFRKDFQFYKVREINNYHHAHDAYLNAVVGTALIKKYPKLESEFVYGDYKVYDVRKMIAKSEQEIGKATAKYFFYSNIMNFFKTEITLANGEIRKRPLIETNGETGEIVWDKGRDFATVRKVLSMPQVNIVKKTEVQTGGFSKESILPKRNSDKLIARKKDWDPKKYGGFDSPTVAYSVLVVAKVEKGKSKKLKSVKELLGITIMERSSFEKNPIDFLEAKGYKEVKKDLIIKLPKYSLFELENGRKRMLASAGELQKGNELALPSKYVNFLYLASHYEKLKGSPEDNEQKQLFVEQHKHYLDEIIEQISEFSKRVILADANLDKVLSAYNKHRDKPIREQAENIIHLFTLTNLGAPAAFKYFDTTIDRKRYTSTKEVLDATLIHQSITGLYETRIDLSQLGGDGGPAPGGSGSSGGTLNIEDEYRLHETSKEPDVSLGSTWLSDFPQAWAETGGMGLAVRQAPLIIPLKATSTPVSIKQYPMSQEARLGIKPHIQRLLDQGILVPCQSPWNTPLLPVKKPGTNDYRPVQDLREVNKRVEDIHPTVPNPYNLLSGLPPSHQWYTVLDLKDAFFCLRLHPTSQPLFAFEWRDPEMGISGQLTWTRLPQGFKNSPTLFNEALHRDLAGFRIQHPDLILLQYVDDLLLAATSELDCQQGTRALLQTLGDLGYRASAKKAQICQKQVKYLGYLLKEGQRWLTEARKETVMGQPIPKTPRQLREFLGKAGFCRLFIPGFAEMAAPLYPLTKPGTLFNWGPDQQKAFQEIKQALLTAPALGLPDLTKPFELFVDEKQGYAKGVLTQKLGPWRRPVAYLSKKLDPVAAGWPPCLRMVAAIAVLTKDAGKLTMGQPLVILAPHAVEALVKQPPDRWLSNARMTHYQALLLDTDRVQFGPVVALNPATLLPLPEEGLQHDCLDILAEAHGTRSDLMDQPLPDADHTWYTDGSSFLQEGQRKAGAAVTTETEVIWARALPAGTSAQRAELIALTQALKMAEGKKLNVYTDSRYAFATAHIHGEIYRRRGWLTSEGKEIKNKDEILALLKALFLPKRLSIIHCPGHQKGNSAEARGNRMADQAAREVATRETPETSTLLAGKRTADGSEFEKRTADGSEFESPKKKAKVE

SEQ ID NO: 2322 - protein, 2115 aa, synthetic construct
MPAAKRVKLDGGDKKYSIGLDIGTNSVGWAVITDEYKVPSKKFKVLGNTDRHSIKKNLIGALLFDSGETAEATRLKRTARRRYTRRKNRICYLQEIFSNEMAKVDDSFFHRLEESFLVEEDKKHERHPIFGNIVDEVAYHEKYPTIYHLRKKLVDSTDKADLRLIYLALAHMIKFRGHFLIEGDLNPDNSDVDKLFIQLVQTYNQLFEENPINASGVDAKAILSARLSKSRRLENLIAQLPGEKKNGLFGNLIALSLGLTPNFKSNFDLAEDAKLQLSKDTYDDDLDNLLAQIGDQYADLFLAAKNLSDAILLSDILRVNTEITKAPLSASMIKRYDEHHQDLTLLKALVRQQLPEKYKEIFFDQSKNGYAGYIDGGASQEEFYKFIKPILEKMDGTEELLVKLNREDLLRKQRTFDNGSIPHQIHLGELHAILRRQEDFYPFLKDNREKIEKILTFRIPYYVGPLARGNSRFAWMTRKSEETITPWNFEEVVDKGASAQSFIERMTNFDKNLPNEKVLPKHSLLYEYFTVYNELTKVKYVTEGMRKPAFLSGEQKKAIVDLLFKTNRKVTVKQLKEDYFKKIECFDSVEISGVEDRFNASLGTYHDLLKIIKDKDFLDNEENEDILEDIVLTLTLFEDREMIEERLKTYAHLFDDKVMKQLKRRRYTGWGRLSRKLINGIRDKQSGKTILDFLKSDGFANRNFMQLIHDDSLTFKEDIQKAQVSGQGDSLHEHIANLAGSPAIKKGILQTVKVVDELVKVMGRHKPENIVIEMARENQTTQKGQKNSRERMKRIEEGIKELGSQILKEHPVENTQLQNEKLYLYYLQNGRDMYVDQELDINRLSDYDVDHIVPQSFLKDDSIDNKVLTRSDKARGKSDNVPSEEVVKKMKNYWRQLLNAKLITQRKFDNLTKAERGGLSELDKAGFIKRQLVETRQITKHVAQILDSRMNTKYDENDKLIREVKVITLKSKLVSDFRKDFQFYKVREINNYHHAHDAYLNAVVGTALIKKYPKLESEFVYGDYKVYDVRKMIAKSEQEIGKATAKYFFYSNIMNFFKTEITLANGEIRKRPLIETNGETGEIVWDKGRDFATVRKVLSMPQVNIVKKTEVQTGGFSKESILPKRNSDKLIARKKDWDPKKYGGFDSPTVAYSVLVVAKVEKGKSKKLKSVKELLGITIMERSSFEKNPIDFLEAKGYKEVKKDLIIKLPKYSLFELENGRKRMLASAGELQKGNELALPSKYVNFLYLASHYEKLKGSPEDNEQKQLFVEQHKHYLDEIIEQISEFSKRVILADANLDKVLSAYNKHRDKPIREQAENIIHLFTLTNLGAPAAFKYFDTTIDRKRYTSTKEVLDATLIHQSITGLYETRIDLSQLGGDGGEAAAKEAAAKEAAAKEAAAKEAAAKEAAAKGGTLNIEDEYRLHETSKEPDVSLGSTWLSDFPQAWAETGGMGLAVRQAPLIIPLKATSTPVSIKQYPMSQEARLGIKPHIQRLLDQGILVPCQSPWNTPLLPVKKPGTNDYRPVQDLREVNKRVEDIHPTVPNPYNLLSGLPPSHQWYTVLDLKDAFFCLRLHPTSQPLFAFEWRDPEMGISGQLTWTRLPQGFKNSPTLFNEALHRDLAGFRIQHPDLILLQYVDDLLLAATSELDCQQGTRALLQTLGDLGYRASAKKAQICQKQVKYLGYLLKEGQRWLTEARKETVMGQPIPKTPRQLREFLGKAGFCRLFIPGFAEMAAPLYPLTKPGTLFNWGPDQQKAFQEIKQALLTAPALGLPDLTKPFELFVDEKQGYAKGVLTQKLGPWRRPVAYLSKKLDPVAAGWPPCLRMVAAIAVLTKDAGKLTMGQPLVILAPHAVEALVKQPPDRWLSNARMTHYQALLLDTDRVQFGPVVALNPATLLPLPEEGLQHDCLDILAEAHGTRSDLMDQPLPDADHTWYTDGSSFLQEGQRKAGAAVTTETEVIWARALPAGTSAQRAELIALTQALKMAEGKKLNVYTDSRYAFATAHIHGEIYRRRGWLTSEGKEIKNKDEILALLKALFLPKRLSIIHCPGHQKGNSAEARGNRMADQAAREVATRETPETSTLLAGKRTADGSEFEKRTADGSEFESPKKKAKVE

SEQ ID NO: 2323 - protein, 2088 aa, synthetic construct
MPAAKRVKLDGGDKKYSIGLDIGTNSVGWAVITDEYKVPSKKFKVLGNTDRHSIKKNLIGALLFDSGETAEATRLKRTARRRYTRRKNRICYLQEIFSNEMAKVDDSFFHRLEESFLVEEDKKHERHPIFGNIVDEVAYHEKYPTIYHLRKKLVDSTDKADLRLIYLALAHMIKFRGHFLIEGDLNPDNSDVDKLFIQLVQTYNQLFEENPINASGVDAKAILSARLSKSRRLENLIAQLPGEKKNGLFGNLIALSLGLTPNFKSNFDLAEDAKLQLSKDTYDDDLDNLLAQIGDQYADLFLAAKNLSDAILLSDILRVNTEITKAPLSASMIKRYDEHHQDLTLLKALVRQQLPEKYKEIFFDQSKNGYAGYIDGGASQEEFYKFIKPILEKMDGTEELLVKLNREDLLRKQRTFDNGSIPHQIHLGELHAILRRQEDFYPFLKDNREKIEKILTFRIPYYVGPLARGNSRFAWMTRKSEETITPWNFEEVVDKGASAQSFIERMTNFDKNLPNEKVLPKHSLLYEYFTVYNELTKVKYVTEGMRKPAFLSGEQKKAIVDLLFKTNRKVTVKQLKEDYFKKIECFDSVEISGVEDRFNASLGTYHDLLKIIKDKDFLDNEENEDILEDIVLTLTLFEDREMIEERLKTYAHLFDDKVMKQLKRRRYTGWGRLSRKLINGIRDKQSGKTILDFLKSDGFANRNFMQLIHDDSLTFKEDIQKAQVSGQGDSLHEHIANLAGSPAIKKGILQTVKVVDELVKVMGRHKPENIVIEMARENQTTQKGQKNSRERMKRIEEGIKELGSQILKEHPVENTQLQNEKLYLYYLQNGRDMYVDQELDINRLSDYDVDHIVPQSFLKDDSIDNKVLTRSDKARGKSDNVPSEEVVKKMKNYWRQLLNAKLITQRKFDNLTKAERGGLSELDKAGFIKRQLVETRQITKHVAQILDSRMNTKYDENDKLIREVKVITLKSKLVSDFRKDFQFYKVREINNYHHAHDAYLNAVVGTALIKKYPKLESEFVYGDYKVYDVRKMIAKSEQEIGKATAKYFFYSNIMNFFKTEITLANGEIRKRPLIETNGETGEIVWDKGRDFATVRKVLSMPQVNIVKKTEVQTGGFSKESILPKRNSDKLIARKKDWDPKKYGGFDSPTVAYSVLVVAKVEKGKSKKLKSVKELLGITIMERSSFEKNPIDFLEAKGYKEVKKDLIIKLPKYSLFELENGRKRMLASAGELQKGNELALPSKYVNFLYLASHYEKLKGSPEDNEQKQLFVEQHKHYLDEIIEQISEFSKRVILADANLDKVLSAYNKHRDKPIREQAENIIHLFTLTNLGAPAAFKYFDTTIDRKRYTSTKEVLDATLIHQSITGLYETRIDLSQLGGDGGGGSGGTLNIEDEYRLHETSKEPDVSLGSTWLSDFPQAWAETGGMGLAVRQAPLIIPLKATSTPVSIKQYPMSQEARLGIKPHIQRLLDQGILVPCQSPWNTPLLPVKKPGTNDYRPVQDLREVNKRVEDIHPTVPNPYNLLSGLPPSHQWYTVLDLKDAFFCLRLHPTSQPLFAFEWRDPEMGISGQLTWTRLPQGFKNSPTLFNEALHRDLAGFRIQHPDLILLQYVDDLLLAATSELDCQQGTRALLQTLGDLGYRASAKKAQICQKQVKYLGYLLKEGQRWLTEARKETVMGQPIPKTPRQLREFLGKAGFCRLFIPGFAEMAAPLYPLTKPGTLFNWGPDQQKAFQEIKQALLTAPALGLPDLTKPFELFVDEKQGYAKGVLTQKLGPWRRPVAYLSKKLDPVAAGWPPCLRMVAAIAVLTKDAGKLTMGQPLVILAPHAVEALVKQPPDRWLSNARMTHYQALLLDTDRVQFGPVVALNPATLLPLPEEGLQHDCLDILAEAHGTRSDLMDQPLPDADHTWYTDGSSFLQEGQRKAGAAVTTETEVIWARALPAGTSAQRAELIALTQALKMAEGKKLNVYTDSRYAFATAHIHGEIYRRRGWLTSEGKEIKNKDEILALLKALFLPKRLSIIHCPGHQKGNSAEARGNRMADQAAREVATRETPETSTLLAGKRTADGSEFEKRTADGSEFESPKKKAKVE

SEQ ID NO: 2324 - protein, 2110 aa, synthetic construct
MPAAKRVKLDGGDKKYSIGLDIGTNSVGWAVITDEYKVPSKKFKVLGNTDRHSIKKNLIGALLFDSGETAEATRLKRTARRRYTRRKNRICYLQEIFSNEMAKVDDSFFHRLEESFLVEEDKKHERHPIFGNIVDEVAYHEKYPTIYHLRKKLVDSTDKADLRLIYLALAHMIKFRGHFLIEGDLNPDNSDVDKLFIQLVQTYNQLFEENPINASGVDAKAILSARLSKSRRLENLIAQLPGEKKNGLFGNLIALSLGLTPNFKSNFDLAEDAKLQLSKDTYDDDLDNLLAQIGDQYADLFLAAKNLSDAILLSDILRVNTEITKAPLSASMIKRYDEHHQDLTLLKALVRQQLPEKYKEIFFDQSKNGYAGYIDGGASQEEFYKFIKPILEKMDGTEELLVKLNREDLLRKQRTFDNGSIPHQIHLGELHAILRRQEDFYPFLKDNREKIEKILTFRIPYYVGPLARGNSRFAWMTRKSEETITPWNFEEVVDKGASAQSFIERMTNFDKNLPNEKVLPKHSLLYEYFTVYNELTKVKYVTEGMRKPAFLSGEQKKAIVDLLFKTNRKVTVKQLKEDYFKKIECFDSVEISGVEDRFNASLGTYHDLLKIIKDKDFLDNEENEDILEDIVLTLTLFEDREMIEERLKTYAHLFDDKVMKQLKRRRYTGWGRLSRKLINGIRDKQSGKTILDFLKSDGFANRNFMQLIHDDSLTFKEDIQKAQVSGQGDSLHEHIANLAGSPAIKKGILQTVKVVDELVKVMGRHKPENIVIEMARENQTTQKGQKNSRERMKRIEEGIKELGSQILKEHPVENTQLQNEKLYLYYLQNGRDMYVDQELDINRLSDYDVDHIVPQSFLKDDSIDNKVLTRSDKARGKSDNVPSEEVVKKMKNYWRQLLNAKLITQRKFDNLTKAERGGLSELDKAGFIKRQLVETRQITKHVAQILDSRMNTKYDENDKLIREVKVITLKSKLVSDFRKDFQFYKVREINNYHHAHDAYLNAVVGTALIKKYPKLESEFVYGDYKVYDVRKMIAKSEQEIGKATAKYFFYSNIMNFFKTEITLANGEIRKRPLIETNGETGEIVWDKGRDFATVRKVLSMPQVNIVKKTEVQTGGFSKESILPKRNSDKLIARKKDWDPKKYGGFDSPTVAYSVLVVAKVEKGKSKKLKSVKELLGITIMERSSFEKNPIDFLEAKGYKEVKKDLIIKLPKYSLFELENGRKRMLASAGELQKGNELALPSKYVNFLYLASHYEKLKGSPEDNEQKQLFVEQHKHYLDEIIEQISEFSKRVILADANLDKVLSAYNKHRDKPIREQAENIIHLFTLTNLGAPAAFKYFDTTIDRKRYTSTKEVLDATLIHQSITGLYETRIDLSQLGGDGGEAAAKEAAAKEAAAKEAAAKEAAAKGGTLNIEDEYRLHETSKEPDVSLGSTWLSDFPQAWAETGGMGLAVRQAPLIIPLKATSTPVSIKQYPMSQEARLGIKPHIQRLLDQGILVPCQSPWNTPLLPVKKPGTNDYRPVQDLREVNKRVEDIHPTVPNPYNLLSGLPPSHQWYTVLDLKDAFFCLRLHPTSQPLFAFEWRDPEMGISGQLTWTRLPQGFKNSPTLFNEALHRDLAGFRIQHPDLILLQYVDDLLLAATSELDCQQGTRALLQTLGDLGYRASAKKAQICQKQVKYLGYLLKEGQRWLTEARKETVMGQPIPKTPRQLREFLGKAGFCRLFIPGFAEMAAPLYPLTKPGTLFNWGPDQQKAFQEIKQALLTAPALGLPDLTKPFELFVDEKQGYAKGVLTQKLGPWRRPVAYLSKKLDPVAAGWPPCLRMVAAIAVLTKDAGKLTMGQPLVILAPHAVEALVKQPPDRWLSNARMTHYQALLLDTDRVQFGPVVALNPATLLPLPEEGLQHDCLDILAEAHGTRSDLMDQPLPDADHTWYTDGSSFLQEGQRKAGAAVTTETEVIWARALPAGTSAQRAELIALTQALKMAEGKKLNVYTDSRYAFATAHIHGEIYRRRGWLTSEGKEIKNKDEILALLKALFLPKRLSIIHCPGHQKGNSAEARGNRMADQAAREVATRETPETSTLLAGKRTADGSEFEKRTADGSEFESPKKKAKVE

SEQ ID NO: 2325 - protein, 2105 aa, synthetic construct
MPAAKRVKLDGGDKKYSIGLDIGTNSVGWAVITDEYKVPSKKFKVLGNTDRHSIKKNLIGALLFDSGETAEATRLKRTARRRYTRRKNRICYLQEIFSNEMAKVDDSFFHRLEESFLVEEDKKHERHPIFGNIVDEVAYHEKYPTIYHLRKKLVDSTDKADLRLIYLALAHMIKFRGHFLIEGDLNPDNSDVDKLFIQLVQTYNQLFEENPINASGVDAKAILSARLSKSRRLENLIAQLPGEKKNGLFGNLIALSLGLTPNFKSNFDLAEDAKLQLSKDTYDDDLDNLLAQIGDQYADLFLAAKNLSDAILLSDILRVNTEITKAPLSASMIKRYDEHHQDLTLLKALVRQQLPEKYKEIFFDQSKNGYAGYIDGGASQEEFYKFIKPILEKMDGTEELLVKLNREDLLRKQRTFDNGSIPHQIHLGELHAILRRQEDFYPFLKDNREKIEKILTFRIPYYVGPLARGNSRFAWMTRKSEETITPWNFEEVVDKGASAQSFIERMTNFDKNLPNEKVLPKHSLLYEYFTVYNELTKVKYVTEGMRKPAFLSGEQKKAIVDLLFKTNRKVTVKQLKEDYFKKIECFDSVEISGVEDRFNASLGTYHDLLKIIKDKDFLDNEENEDILEDIVLTLTLFEDREMIEERLKTYAHLFDDKVMKQLKRRRYTGWGRLSRKLINGIRDKQSGKTILDFLKSDGFANRNFMQLIHDDSLTFKEDIQKAQVSGQGDSLHEHIANLAGSPAIKKGILQTVKVVDELVKVMGRHKPENIVIEMARENQTTQKGQKNSRERMKRIEEGIKELGSQILKEHPVENTQLQNEKLYLYYLQNGRDMYVDQELDINRLSDYDVDHIVPQSFLKDDSIDNKVLTRSDKARGKSDNVPSEEVVKKMKNYWRQLLNAKLITQRKFDNLTKAERGGLSELDKAGFIKRQLVETRQITKHVAQILDSRMNTKYDENDKLIREVKVITLKSKLVSDFRKDFQFYKVREINNYHHAHDAYLNAVVGTALIKKYPKLESEFVYGDYKVYDVRKMIAKSEQEIGKATAKYFFYSNIMNFFKTEITLANGEIRKRPLIETNGETGEIVWDKGRDFATVRKVLSMPQVNIVKKTEVQTGGFSKESILPKRNSDKLIARKKDWDPKKYGGFDSPTVAYSVLVVAKVEKGKSKKLKSVKELLGITIMERSSFEKNPIDFLEAKGYKEVKKDLIIKLPKYSLFELENGRKRMLASAGELQKGNELALPSKYVNFLYLASHYEKLKGSPEDNEQKQLFVEQHKHYLDEIIEQISEFSKRVILADANLDKVLSAYNKHRDKPIREQAENIIHLFTLTNLGAPAAFKYFDTTIDRKRYTSTKEVLDATLIHQSITGLYETRIDLSQLGGDGGEAAAKEAAAKEAAAKEAAAKGGTLNIEDEYRLHETSKEPDVSLGSTWLSDFPQAWAETGGMGLAVRQAPLIIPLKATSTPVSIKQYPMSQEARLGIKPHIQRLLDQGILVPCQSPWNTPLLPVKKPGTNDYRPVQDLREVNKRVEDIHPTVPNPYNLLSGLPPSHQWYTVLDLKDAFFCLRLHPTSQPLFAFEWRDPEMGISGQLTWTRLPQGFKNSPTLFNEALHRDLAGFRIQHPDLILLQYVDDLLLAATSELDCQQGTRALLQTLGDLGYRASAKKAQICQKQVKYLGYLLKEGQRWLTEARKETVMGQPIPKTPRQLREFLGKAGFCRLFIPGFAEMAAPLYPLTKPGTLFNWGPDQQKAFQEIKQALLTAPALGLPDLTKPFELFVDEKQGYAKGVLTQKLGPWRRPVAYLSKKLDPVAAGWPPCLRMVAAIAVLTKDAGKLTMGQPLVILAPHAVEALVKQPPDRWLSNARMTHYQALLLDTDRVQFGPVVALNPATLLPLPEEGLQHDCLDILAEAHGTRSDLMDQPLPDADHTWYTDGSSFLQEGQRKAGAAVTTETEVIWARALPAGTSAQRAELIALTQALKMAEGKKLNVYTDSRYAFATAHIHGEIYRRRGWLTSEGKEIKNKDEILALLKALFLPKRLSIIHCPGHQKGNSAEARGNRMADQAAREVATRETPETSTLLAGKRTADGSEFEKRTADGSEFESPKKKAKVE

SEQ ID NO: 2326 - protein, 2096 aa, synthetic construct
MPAAKRVKLDGGDKKYSIGLDIGTNSVGWAVITDEYKVPSKKFKVLGNTDRHSIKKNLIGALLFDSGETAEATRLKRTARRRYTRRKNRICYLQEIFSNEMAKVDDSFFHRLEESFLVEEDKKHERHPIFGNIVDEVAYHEKYPTIYHLRKKLVDSTDKADLRLIYLALAHMIKFRGHFLIEGDLNPDNSDVDKLFIQLVQTYNQLFEENPINASGVDAKAILSARLSKSRRLENLIAQLPGEKKNGLFGNLIALSLGLTPNFKSNFDLAEDAKLQLSKDTYDDDLDNLLAQIGDQYADLFLAAKNLSDAILLSDILRVNTEITKAPLSASMIKRYDEHHQDLTLLKALVRQQLPEKYKEIFFDQSKNGYAGYIDGGASQEEFYKFIKPILEKMDGTEELLVKLNREDLLRKQRTFDNGSIPHQIHLGELHAILRRQEDFYPFLKDNREKIEKILTFRIPYYVGPLARGNSRFAWMTRKSEETITPWNFEEVVDKGASAQSFIERMTNFDKNLPNEKVLPKHSLLYEYFTVYNELTKVKYVTEGMRKPAFLSGEQKKAIVDLLFKTNRKVTVKQLKEDYFKKIECFDSVEISGVEDRFNASLGTYHDLLKIIKDKDFLDNEENEDILEDIVLTLTLFEDREMIEERLKTYAHLFDDKVMKQLKRRRYTGWGRLSRKLINGIRDKQSGKTILDFLKSDGFANRNFMQLIHDDSLTFKEDIQKAQVSGQGDSLHEHIANLAGSPAIKKGILQTVKVVDELVKVMGRHKPENIVIEMARENQTTQKGQKNSRERMKRIEEGIKELGSQILKEHPVENTQLQNEKLYLYYLQNGRDMYVDQELDINRLSDYDVDHIVPQSFLKDDSIDNKVLTRSDKARGKSDNVPSEEVVKKMKNYWRQLLNAKLITQRKFDNLTKAERGGLSELDKAGFIKRQLVETRQITKHVAQILDSRMNTKYDENDKLIREVKVITLKSKLVSDFRKDFQFYKVREINNYHHAHDAYLNAVVGTALIKKYPKLESEFVYGDYKVYDVRKMIAKSEQEIGKATAKYFFYSNIMNFFKTEITLANGEIRKRPLIETNGETGEIVWDKGRDFATVRKVLSMPQVNIVKKTEVQTGGFSKESILPKRNSDKLIARKKDWDPKKYGGFDSPTVAYSVLVVAKVEKGKSKKLKSVKELLGITIMERSSFEKNPIDFLEAKGYKEVKKDLIIKLPKYSLFELENGRKRMLASAGELQKGNELALPSKYVNFLYLASHYEKLKGSPEDNEQKQLFVEQHKHYLDEIIEQISEFSKRVILADANLDKVLSAYNKHRDKPIREQAENIIHLFTLTNLGAPAAFKYFDTTIDRKRYTSTKEVLDATLIHQSITGLYETRIDLSQLGGDGGGGSEAAAKPAPGGTLNIEDEYRLHETSKEPDVSLGSTWLSDFPQAWAETGGMGLAVRQAPLIIPLKATSTPVSIKQYPMSQEARLGIKPHIQRLLDQGILVPCQSPWNTPLLPVKKPGTNDYRPVQDLREVNKRVEDIHPTVPNPYNLLSGLPPSHQWYTVLDLKDAFFCLRLHPTSQPLFAFEWRDPEMGISGQLTWTRLPQGFKNSPTLFNEALHRDLAGFRIQHPDLILLQYVDDLLLAATSELDCQQGTRALLQTLGDLGYRASAKKAQICQKQVKYLGYLLKEGQRWLTEARKETVMGQPIPKTPRQLREFLGKAGFCRLFIPGFAEMAAPLYPLTKPGTLFNWGPDQQKAFQEIKQALLTAPALGLPDLTKPFELFVDEKQGYAKGVLTQKLGPWRRPVAYLSKKLDPVAAGWPPCLRMVAAIAVLTKDAGKLTMGQPLVILAPHAVEALVKQPPDRWLSNARMTHYQALLLDTDRVQFGPVVALNPATLLPLPEEGLQHDCLDILAEAHGTRSDLMDQPLPDADHTWYTDGSSFLQEGQRKAGAAVTTETEVIWARALPAGTSAQRAELIALTQALKMAEGKKLNVYTDSRYAFATAHIHGEIYRRRGWLTSEGKEIKNKDEILALLKALFLPKRLSIIHCPGHQKGNSAEARGNRMADQAAREVATRETPETSTLLAGKRTADGSEFEKRTADGSEFESPKKKAKVE

SEQ ID NO: 2327 - protein, 2096 aa, synthetic construct
MPAAKRVKLDGGDKKYSIGLDIGTNSVGWAVITDEYKVPSKKFKVLGNTDRHSIKKNLIGALLFDSGETAEATRLKRTARRRYTRRKNRICYLQEIFSNEMAKVDDSFFHRLEESFLVEEDKKHERHPIFGNIVDEVAYHEKYPTIYHLRKKLVDSTDKADLRLIYLALAHMIKFRGHFLIEGDLNPDNSDVDKLFIQLVQTYNQLFEENPINASGVDAKAILSARLSKSRRLENLIAQLPGEKKNGLFGNLIALSLGLTPNFKSNFDLAEDAKLQLSKDTYDDDLDNLLAQIGDQYADLFLAAKNLSDAILLSDILRVNTEITKAPLSASMIKRYDEHHQDLTLLKALVRQQLPEKYKEIFFDQSKNGYAGYIDGGASQEEFYKFIKPILEKMDGTEELLVKLNREDLLRKQRTFDNGSIPHQIHLGELHAILRRQEDFYPFLKDNREKIEKILTFRIPYYVGPLARGNSRFAWMTRKSEETITPWNFEEVVDKGASAQSFIERMTNFDKNLPNEKVLPKHSLLYEYFTVYNELTKVKYVTEGMRKPAFLSGEQKKAIVDLLFKTNRKVTVKQLKEDYFKKIECFDSVEISGVEDRFNASLGTYHDLLKIIKDKDFLDNEENEDILEDIVLTLTLFEDREMIEERLKTYAHLFDDKVMKQLKRRRYTGWGRLSRKLINGIRDKQSGKTILDFLKSDGFANRNFMQLIHDDSLTFKEDIQKAQVSGQGDSLHEHIANLAGSPAIKKGILQTVKVVDELVKVMGRHKPENIVIEMARENQTTQKGQKNSRERMKRIEEGIKELGSQILKEHPVENTQLQNEKLYLYYLQNGRDMYVDQELDINRLSDYDVDHIVPQSFLKDDSIDNKVLTRSDKARGKSDNVPSEEVVKKMKNYWRQLLNAKLITQRKFDNLTKAERGGLSELDKAGFIKRQLVETRQITKHVAQILDSRMNTKYDENDKLIREVKVITLKSKLVSDFRKDFQFYKVREINNYHHAHDAYLNAVVGTALIKKYPKLESEFVYGDYKVYDVRKMIAKSEQEIGKATAKYFFYSNIMNFFKTEITLANGEIRKRPLIETNGETGEIVWDKGRDFATVRKVLSMPQVNIVKKTEVQTGGFSKESILPKRNSDKLIARKKDWDPKKYGGFDSPTVAYSVLVVAKVEKGKSKKLKSVKELLGITIMERSSFEKNPIDFLEAKGYKEVKKDLIIKLPKYSLFELENGRKRMLASAGELQKGNELALPSKYVNFLYLASHYEKLKGSPEDNEQKQLFVEQHKHYLDEIIEQISEFSKRVILADANLDKVLSAYNKHRDKPIREQAENIIHLFTLTNLGAPAAFKYFDTTIDRKRYTSTKEVLDATLIHQSITGLYETRIDLSQLGGDGGGGGGSSEAAAKGGTLNIEDEYRLHETSKEPDVSLGSTWLSDFPQAWAETGGMGLAVRQAPLIIPLKATSTPVSIKQYPMSQEARLGIKPHIQRLLDQGILVPCQSPWNTPLLPVKKPGTNDYRPVQDLREVNKRVEDIHPTVPNPYNLLSGLPPSHQWYTVLDLKDAFFCLRLHPTSQPLFAFEWRDPEMGISGQLTWTRLPQGFKNSPTLFNEALHRDLAGFRIQHPDLILLQYVDDLLLAATSELDCQQGTRALLQTLGDLGYRASAKKAQICQKQVKYLGYLLKEGQRWLTEARKETVMGQPIPKTPRQLREFLGKAGFCRLFIPGFAEMAAPLYPLTKPGTLFNWGPDQQKAFQEIKQALLTAPALGLPDLTKPFELFVDEKQGYAKGVLTQKLGPWRRPVAYLSKKLDPVAAGWPPCLRMVAAIAVLTKDAGKLTMGQPLVILAPHAVEALVKQPPDRWLSNARMTHYQALLLDTDRVQFGPVVALNPATLLPLPEEGLQHDCLDILAEAHGTRSDLMDQPLPDADHTWYTDGSSFLQEGQRKAGAAVTTETEVIWARALPAGTSAQRAELIALTQALKMAEGKKLNVYTDSRYAFATAHIHGEIYRRRGWLTSEGKEIKNKDEILALLKALFLPKRLSIIHCPGHQKGNSAEARGNRMADQAAREVATRETPETSTLLAGKRTADGSEFEKRTADGSEFESPKKKAKVE

SEQ ID NO: 2328 - protein, 2090 aa, synthetic construct
MPAAKRVKLDGGDKKYSIGLDIGTNSVGWAVITDEYKVPSKKFKVLGNTDRHSIKKNLIGALLFDSGETAEATRLKRTARRRYTRRKNRICYLQEIFSNEMAKVDDSFFHRLEESFLVEEDKKHERHPIFGNIVDEVAYHEKYPTIYHLRKKLVDSTDKADLRLIYLALAHMIKFRGHFLIEGDLNPDNSDVDKLFIQLVQTYNQLFEENPINASGVDAKAILSARLSKSRRLENLIAQLPGEKKNGLFGNLIALSLGLTPNFKSNFDLAEDAKLQLSKDTYDDDLDNLLAQIGDQYADLFLAAKNLSDAILLSDILRVNTEITKAPLSASMIKRYDEHHQDLTLLKALVRQQLPEKYKEIFFDQSKNGYAGYIDGGASQEEFYKFIKPILEKMDGTEELLVKLNREDLLRKQRTFDNGSIPHQIHLGELHAILRRQEDFYPFLKDNREKIEKILTFRIPYYVGPLARGNSRFAWMTRKSEETITPWNFEEVVDKGASAQSFIERMTNFDKNLPNEKVLPKHSLLYEYFTVYNELTKVKYVTEGMRKPAFLSGEQKKAIVDLLFKTNRKVTVKQLKEDYFKKIECFDSVEISGVEDRFNASLGTYHDLLKIIKDKDFLDNEENEDILEDIVLTLTLFEDREMIEERLKTYAHLFDDKVMKQLKRRRYTGWGRLSRKLINGIRDKQSGKTILDFLKSDGFANRNFMQLIHDDSLTFKEDIQKAQVSGQGDSLHEHIANLAGSPAIKKGILQTVKVVDELVKVMGRHKPENIVIEMARENQTTQKGQKNSRERMKRIEEGIKELGSQILKEHPVENTQLQNEKLYLYYLQNGRDMYVDQELDINRLSDYDVDHIVPQSFLKDDSIDNKVLTRSDKARGKSDNVPSEEVVKKMKNYWRQLLNAKLITQRKFDNLTKAERGGLSELDKAGFIKRQLVETRQITKHVAQILDSRMNTKYDENDKLIREVKVITLKSKLVSDFRKDFQFYKVREINNYHHAHDAYLNAVVGTALIKKYPKLESEFVYGDYKVYDVRKMIAKSEQEIGKATAKYFFYSNIMNFFKTEITLANGEIRKRPLIETNGETGEIVWDKGRDFATVRKVLSMPQVNIVKKTEVQTGGFSKESILPKRNSDKLIARKKDWDPKKYGGFDSPTVAYSVLVVAKVEKGKSKKLKSVKELLGITIMERSSFEKNPIDFLEAKGYKEVKKDLIIKLPKYSLFELENGRKRMLASAGELQKGNELALPSKYVNFLYLASHYEKLKGSPEDNEQKQLFVEQHKHYLDEIIEQISEFSKRVILADANLDKVLSAYNKHRDKPIREQAENIIHLFTLTNLGAPAAFKYFDTTIDRKRYTSTKEVLDATLIHQSITGLYETRIDLSQLGGDGGEAAAKGGTLNIEDEYRLHETSKEPDVSLGSTWLSDFPQAWAETGGMGLAVRQAPLIIPLKATSTPVSIKQYPMSQEARLGIKPHIQRLLDQGILVPCQSPWNTPLLPVKKPGTNDYRPVQDLREVNKRVEDIHPTVPNPYNLLSGLPPSHQWYTVLDLKDAFFCLRLHPTSQPLFAFEWRDPEMGISGQLTWTRLPQGFKNSPTLFNEALHRDLAGFRIQHPDLILLQYVDDLLLAATSELDCQQGTRALLQTLGDLGYRASAKKAQICQKQVKYLGYLLKEGQRWLTEARKETVMGQPIPKTPRQLREFLGKAGFCRLFIPGFAEMAAPLYPLTKPGTLFNWGPDQQKAFQEIKQALLTAPALGLPDLTKPFELFVDEKQGYAKGVLTQKLGPWRRPVAYLSKKLDPVAAGWPPCLRMVAAIAVLTKDAGKLTMGQPLVILAPHAVEALVKQPPDRWLSNARMTHYQALLLDTDRVQFGPVVALNPATLLPLPEEGLQHDCLDILAEAHGTRSDLMDQPLPDADHTWYTDGSSFLQEGQRKAGAAVTTETEVIWARALPAGTSAQRAELIALTQALKMAEGKKLNVYTDSRYAFATAHIHGEIYRRRGWLTSEGKEIKNKDEILALLKALFLPKRLSIIHCPGHQKGNSAEARGNRMADQAAREVATRETPETSTLLAGKRTADGSEFEKRTADGSEFESPKKKAKVE

SEQ ID NO: 2329 - protein, 2094 aa, synthetic construct
MPAAKRVKLDGGDKKYSIGLDIGTNSVGWAVITDEYKVPSKKFKVLGNTDRHSIKKNLIGALLFDSGETAEATRLKRTARRRYTRRKNRICYLQEIFSNEMAKVDDSFFHRLEESFLVEEDKKHERHPIFGNIVDEVAYHEKYPTIYHLRKKLVDSTDKADLRLIYLALAHMIKFRGHFLIEGDLNPDNSDVDKLFIQLVQTYNQLFEENPINASGVDAKAILSARLSKSRRLENLIAQLPGEKKNGLFGNLIALSLGLTPNFKSNFDLAEDAKLQLSKDTYDDDLDNLLAQIGDQYADLFLAAKNLSDAILLSDILRVNTEITKAPLSASMIKRYDEHHQDLTLLKALVRQQLPEKYKEIFFDQSKNGYAGYIDGGASQEEFYKFIKPILEKMDGTEELLVKLNREDLLRKQRTFDNGSIPHQIHLGELHAILRRQEDFYPFLKDNREKIEKILTFRIPYYVGPLARGNSRFAWMTRKSEETITPWNFEEVVDKGASAQSFIERMTNFDKNLPNEKVLPKHSLLYEYFTVYNELTKVKYVTEGMRKPAFLSGEQKKAIVDLLFKTNRKVTVKQLKEDYFKKIECFDSVEISGVEDRFNASLGTYHDLLKIIKDKDFLDNEENEDILEDIVLTLTLFEDREMIEERLKTYAHLFDDKVMKQLKRRRYTGWGRLSRKLINGIRDKQSGKTILDFLKSDGFANRNFMQLIHDDSLTFKEDIQKAQVSGQGDSLHEHIANLAGSPAIKKGILQTVKVVDELVKVMGRHKPENIVIEMARENQTTQKGQKNSRERMKRIEEGIKELGSQILKEHPVENTQLQNEKLYLYYLQNGRDMYVDQELDINRLSDYDVDHIVPQSFLKDDSIDNKVLTRSDKARGKSDNVPSEEVVKKMKNYWRQLLNAKLITQRKFDNLTKAERGGLSELDKAGFIKRQLVETRQITKHVAQILDSRMNTKYDENDKLIREVKVITLKSKLVSDFRKDFQFYKVREINNYHHAHDAYLNAVVGTALIKKYPKLESEFVYGDYKVYDVRKMIAKSEQEIGKATAKYFFYSNIMNFFKTEITLANGEIRKRPLIETNGETGEIVWDKGRDFATVRKVLSMPQVNIVKKTEVQTGGFSKESILPKRNSDKLIARKKDWDPKKYGGFDSPTVAYSVLVVAKVEKGKSKKLKSVKELLGITIMERSSFEKNPIDFLEAKGYKEVKKDLIIKLPKYSLFELENGRKRMLASAGELQKGNELALPSKYVNFLYLASHYEKLKGSPEDNEQKQLFVEQHKHYLDEIIEQISEFSKRVILADANLDKVLSAYNKHRDKPIREQAENIIHLFTLTNLGAPAAFKYFDTTIDRKRYTSTKEVLDATLIHQSITGLYETRIDLSQLGGDGGGSSPAPGGGGGTLNIEDEYRLHETSKEPDVSLGSTWLSDFPQAWAETGGMGLAVRQAPLIIPLKATSTPVSIKQYPMSQEARLGIKPHIQRLLDQGILVPCQSPWNTPLLPVKKPGTNDYRPVQDLREVNKRVEDIHPTVPNPYNLLSGLPPSHQWYTVLDLKDAFFCLRLHPTSQPLFAFEWRDPEMGISGQLTWTRLPQGFKNSPTLFNEALHRDLAGFRIQHPDLILLQYVDDLLLAATSELDCQQGTRALLQTLGDLGYRASAKKAQICQKQVKYLGYLLKEGQRWLTEARKETVMGQPIPKTPRQLREFLGKAGFCRLFIPGFAEMAAPLYPLTKPGTLFNWGPDQQKAFQEIKQALLTAPALGLPDLTKPFELFVDEKQGYAKGVLTQKLGPWRRPVAYLSKKLDPVAAGWPPCLRMVAAIAVLTKDAGKLTMGQPLVILAPHAVEALVKQPPDRWLSNARMTHYQALLLDTDRVQFGPVVALNPATLLPLPEEGLQHDCLDILAEAHGTRSDLMDQPLPDADHTWYTDGSSFLQEGQRKAGAAVTTETEVIWARALPAGTSAQRAELIALTQALKMAEGKKLNVYTDSRYAFATAHIHGEIYRRRGWLTSEGKEIKNKDEILALLKALFLPKRLSIIHCPGHQKGNSAEARGNRMADQAAREVATRETPETSTLLAGKRTADGSEFEKRTADGSEFESPKKKAKVE

SEQ ID NO: 2330 - protein, 2088 aa, synthetic construct
MPAAKRVKLDGGDKKYSIGLDIGTNSVGWAVITDEYKVPSKKFKVLGNTDRHSIKKNLIGALLFDSGETAEATRLKRTARRRYTRRKNRICYLQEIFSNEMAKVDDSFFHRLEESFLVEEDKKHERHPIFGNIVDEVAYHEKYPTIYHLRKKLVDSTDKADLRLIYLALAHMIKFRGHFLIEGDLNPDNSDVDKLFIQLVQTYNQLFEENPINASGVDAKAILSARLSKSRRLENLIAQLPGEKKNGLFGNLIALSLGLTPNFKSNFDLAEDAKLQLSKDTYDDDLDNLLAQIGDQYADLFLAAKNLSDAILLSDILRVNTEITKAPLSASMIKRYDEHHQDLTLLKALVRQQLPEKYKEIFFDQSKNGYAGYIDGGASQEEFYKFIKPILEKMDGTEELLVKLNREDLLRKQRTFDNGSIPHQIHLGELHAILRRQEDFYPFLKDNREKIEKILTFRIPYYVGPLARGNSRFAWMTRKSEETITPWNFEEVVDKGASAQSFIERMTNFDKNLPNEKVLPKHSLLYEYFTVYNELTKVKYVTEGMRKPAFLSGEQKKAIVDLLFKTNRKVTVKQLKEDYFKKIECFDSVEISGVEDRFNASLGTYHDLLKIIKDKDFLDNEENEDILEDIVLTLTLFEDREMIEERLKTYAHLFDDKVMKQLKRRRYTGWGRLSRKLINGIRDKQSGKTILDFLKSDGFANRNFMQLIHDDSLTFKEDIQKAQVSGQGDSLHEHIANLAGSPAIKKGILQTVKVVDELVKVMGRHKPENIVIEMARENQTTQKGQKNSRERMKRIEEGIKELGSQILKEHPVENTQLQNEKLYLYYLQNGRDMYVDQELDINRLSDYDVDHIVPQSFLKDDSIDNKVLTRSDKARGKSDNVPSEEVVKKMKNYWRQLLNAKLITQRKFDNLTKAERGGLSELDKAGFIKRQLVETRQITKHVAQILDSRMNTKYDENDKLIREVKVITLKSKLVSDFRKDFQFYKVREINNYHHAHDAYLNAVVGTALIKKYPKLESEFVYGDYKVYDVRKMIAKSEQEIGKATAKYFFYSNIMNFFKTEITLANGEIRKRPLIETNGETGEIVWDKGRDFATVRKVLSMPQVNIVKKTEVQTGGFSKESILPKRNSDKLIARKKDWDPKKYGGFDSPTVAYSVLVVAKVEKGKSKKLKSVKELLGITIMERSSFEKNPIDFLEAKGYKEVKKDLIIKLPKYSLFELENGRKRMLASAGELQKGNELALPSKYVNFLYLASHYEKLKGSPEDNEQKQLFVEQHKHYLDEIIEQISEFSKRVILADANLDKVLSAYNKHRDKPIREQAENIIHLFTLTNLGAPAAFKYFDTTIDRKRYTSTKEVLDATLIHQSITGLYETRIDLSQLGGDGGGSSGGTLNIEDEYRLHETSKEPDVSLGSTWLSDFPQAWAETGGMGLAVRQAPLIIPLKATSTPVSIKQYPMSQEARLGIKPHIQRLLDQGILVPCQSPWNTPLLPVKKPGTNDYRPVQDLREVNKRVEDIHPTVPNPYNLLSGLPPSHQWYTVLDLKDAFFCLRLHPTSQPLFAFEWRDPEMGISGQLTWTRLPQGFKNSPTLFNEALHRDLAGFRIQHPDLILLQYVDDLLLAATSELDCQQGTRALLQTLGDLGYRASAKKAQICQKQVKYLGYLLKEGQRWLTEARKETVMGQPIPKTPRQLREFLGKAGFCRLFIPGFAEMAAPLYPLTKPGTLFNWGPDQQKAFQEIKQALLTAPALGLPDLTKPFELFVDEKQGYAKGVLTQKLGPWRRPVAYLSKKLDPVAAGWPPCLRMVAAIAVLTKDAGKLTMGQPLVILAPHAVEALVKQPPDRWLSNARMTHYQALLLDTDRVQFGPVVALNPATLLPLPEEGLQHDCLDILAEAHGTRSDLMDQPLPDADHTWYTDGSSFLQEGQRKAGAAVTTETEVIWARALPAGTSAQRAELIALTQALKMAEGKKLNVYTDSRYAFATAHIHGEIYRRRGWLTSEGKEIKNKDEILALLKALFLPKRLSIIHCPGHQKGNSAEARGNRMADQAAREVATRETPETSTLLAGKRTADGSEFEKRTADGSEFESPKKKAKVE

SEQ ID NO: 2331 - protein, 2094 aa, synthetic construct
MPAAKRVKLDGGDKKYSIGLDIGTNSVGWAVITDEYKVPSKKFKVLGNTDRHSIKKNLIGALLFDSGETAEATRLKRTARRRYTRRKNRICYLQEIFSNEMAKVDDSFFHRLEESFLVEEDKKHERHPIFGNIVDEVAYHEKYPTIYHLRKKLVDSTDKADLRLIYLALAHMIKFRGHFLIEGDLNPDNSDVDKLFIQLVQTYNQLFEENPINASGVDAKAILSARLSKSRRLENLIAQLPGEKKNGLFGNLIALSLGLTPNFKSNFDLAEDAKLQLSKDTYDDDLDNLLAQIGDQYADLFLAAKNLSDAILLSDILRVNTEITKAPLSASMIKRYDEHHQDLTLLKALVRQQLPEKYKEIFFDQSKNGYAGYIDGGASQEEFYKFIKPILEKMDGTEELLVKLNREDLLRKQRTFDNGSIPHQIHLGELHAILRRQEDFYPFLKDNREKIEKILTFRIPYYVGPLARGNSRFAWMTRKSEETITPWNFEEVVDKGASAQSFIERMTNFDKNLPNEKVLPKHSLLYEYFTVYNELTKVKYVTEGMRKPAFLSGEQKKAIVDLLFKTNRKVTVKQLKEDYFKKIECFDSVEISGVEDRFNASLGTYHDLLKIIKDKDFLDNEENEDILEDIVLTLTLFEDREMIEERLKTYAHLFDDKVMKQLKRRRYTGWGRLSRKLINGIRDKQSGKTILDFLKSDGFANRNFMQLIHDDSLTFKEDIQKAQVSGQGDSLHEHIANLAGSPAIKKGILQTVKVVDELVKVMGRHKPENIVIEMARENQTTQKGQKNSRERMKRIEEGIKELGSQILKEHPVENTQLQNEKLYLYYLQNGRDMYVDQELDINRLSDYDVDHIVPQSFLKDDSIDNKVLTRSDKARGKSDNVPSEEVVKKMKNYWRQLLNAKLITQRKFDNLTKAERGGLSELDKAGFIKRQLVETRQITKHVAQILDSRMNTKYDENDKLIREVKVITLKSKLVSDFRKDFQFYKVREINNYHHAHDAYLNAVVGTALIKKYPKLESEFVYGDYKVYDVRKMIAKSEQEIGKATAKYFFYSNIMNFFKTEITLANGEIRKRPLIETNGETGEIVWDKGRDFATVRKVLSMPQVNIVKKTEVQTGGFSKESILPKRNSDKLIARKKDWDPKKYGGFDSPTVAYSVLVVAKVEKGKSKKLKSVKELLGITIMERSSFEKNPIDFLEAKGYKEVKKDLIIKLPKYSLFELENGRKRMLASAGELQKGNELALPSKYVNFLYLASHYEKLKGSPEDNEQKQLFVEQHKHYLDEIIEQISEFSKRVILADANLDKVLSAYNKHRDKPIREQAENIIHLFTLTNLGAPAAFKYFDTTIDRKRYTSTKEVLDATLIHQSITGLYETRIDLSQLGGDGGGGSGSSGGGGGTLNIEDEYRLHETSKEPDVSLGSTWLSDFPQAWAETGGMGLAVRQAPLIIPLKATSTPVSIKQYPMSQEARLGIKPHIQRLLDQGILVPCQSPWNTPLLPVKKPGTNDYRPVQDLREVNKRVEDIHPTVPNPYNLLSGLPPSHQWYTVLDLKDAFFCLRLHPTSQPLFAFEWRDPEMGISGQLTWTRLPQGFKNSPTLFNEALHRDLAGFRIQHPDLILLQYVDDLLLAATSELDCQQGTRALLQTLGDLGYRASAKKAQICQKQVKYLGYLLKEGQRWLTEARKETVMGQPIPKTPRQLREFLGKAGFCRLFIPGFAEMAAPLYPLTKPGTLFNWGPDQQKAFQEIKQALLTAPALGLPDLTKPFELFVDEKQGYAKGVLTQKLGPWRRPVAYLSKKLDPVAAGWPPCLRMVAAIAVLTKDAGKLTMGQPLVILAPHAVEALVKQPPDRWLSNARMTHYQALLLDTDRVQFGPVVALNPATLLPLPEEGLQHDCLDILAEAHGTRSDLMDQPLPDADHTWYTDGSSFLQEGQRKAGAAVTTETEVIWARALPAGTSAQRAELIALTQALKMAEGKKLNVYTDSRYAFATAHIHGEIYRRRGWLTSEGKEIKNKDEILALLKALFLPKRLSIIHCPGHQKGNSAEARGNRMADQAAREVATRETPETSTLLAGKRTADGSEFEKRTADGSEFESPKKKAKVE

SEQ ID NO: 2332 - protein, 2096 aa, synthetic construct
MPAAKRVKLDGGDKKYSIGLDIGTNSVGWAVITDEYKVPSKKFKVLGNTDRHSIKKNLIGALLFDSGETAEATRLKRTARRRYTRRKNRICYLQEIFSNEMAKVDDSFFHRLEESFLVEEDKKHERHPIFGNIVDEVAYHEKYPTIYHLRKKLVDSTDKADLRLIYLALAHMIKFRGHFLIEGDLNPDNSDVDKLFIQLVQTYNQLFEENPINASGVDAKAILSARLSKSRRLENLIAQLPGEKKNGLFGNLIALSLGLTPNFKSNFDLAEDAKLQLSKDTYDDDLDNLLAQIGDQYADLFLAAKNLSDAILLSDILRVNTEITKAPLSASMIKRYDEHHQDLTLLKALVRQQLPEKYKEIFFDQSKNGYAGYIDGGASQEEFYKFIKPILEKMDGTEELLVKLNREDLLRKQRTFDNGSIPHQIHLGELHAILRRQEDFYPFLKDNREKIEKILTFRIPYYVGPLARGNSRFAWMTRKSEETITPWNFEEVVDKGASAQSFIERMTNFDKNLPNEKVLPKHSLLYEYFTVYNELTKVKYVTEGMRKPAFLSGEQKKAIVDLLFKTNRKVTVKQLKEDYFKKIECFDSVEISGVEDRFNASLGTYHDLLKIIKDKDFLDNEENEDILEDIVLTLTLFEDREMIEERLKTYAHLFDDKVMKQLKRRRYTGWGRLSRKLINGIRDKQSGKTILDFLKSDGFANRNFMQLIHDDSLTFKEDIQKAQVSGQGDSLHEHIANLAGSPAIKKGILQTVKVVDELVKVMGRHKPENIVIEMARENQTTQKGQKNSRERMKRIEEGIKELGSQILKEHPVENTQLQNEKLYLYYLQNGRDMYVDQELDINRLSDYDVDHIVPQSFLKDDSIDNKVLTRSDKARGKSDNVPSEEVVKKMKNYWRQLLNAKLITQRKFDNLTKAERGGLSELDKAGFIKRQLVETRQITKHVAQILDSRMNTKYDENDKLIREVKVITLKSKLVSDFRKDFQFYKVREINNYHHAHDAYLNAVVGTALIKKYPKLESEFVYGDYKVYDVRKMIAKSEQEIGKATAKYFFYSNIMNFFKTEITLANGEIRKRPLIETNGETGEIVWDKGRDFATVRKVLSMPQVNIVKKTEVQTGGFSKESILPKRNSDKLIARKKDWDPKKYGGFDSPTVAYSVLVVAKVEKGKSKKLKSVKELLGITIMERSSFEKNPIDFLEAKGYKEVKKDLIIKLPKYSLFELENGRKRMLASAGELQKGNELALPSKYVNFLYLASHYEKLKGSPEDNEQKQLFVEQHKHYLDEIIEQISEFSKRVILADANLDKVLSAYNKHRDKPIREQAENIIHLFTLTNLGAPAAFKYFDTTIDRKRYTSTKEVLDATLIHQSITGLYETRIDLSQLGGDGGPAPGGSEAAAKGGTLNIEDEYRLHETSKEPDVSLGSTWLSDFPQAWAETGGMGLAVRQAPLIIPLKATSTPVSIKQYPMSQEARLGIKPHIQRLLDQGILVPCQSPWNTPLLPVKKPGTNDYRPVQDLREVNKRVEDIHPTVPNPYNLLSGLPPSHQWYTVLDLKDAFFCLRLHPTSQPLFAFEWRDPEMGISGQLTWTRLPQGFKNSPTLFNEALHRDLAGFRIQHPDLILLQYVDDLLLAATSELDCQQGTRALLQTLGDLGYRASAKKAQICQKQVKYLGYLLKEGQRWLTEARKETVMGQPIPKTPRQLREFLGKAGFCRLFIPGFAEMAAPLYPLTKPGTLFNWGPDQQKAFQEIKQALLTAPALGLPDLTKPFELFVDEKQGYAKGVLTQKLGPWRRPVAYLSKKLDPVAAGWPPCLRMVAAIAVLTKDAGKLTMGQPLVILAPHAVEALVKQPPDRWLSNARMTHYQALLLDTDRVQFGPVVALNPATLLPLPEEGLQHDCLDILAEAHGTRSDLMDQPLPDADHTWYTDGSSFLQEGQRKAGAAVTTETEVIWARALPAGTSAQRAELIALTQALKMAEGKKLNVYTDSRYAFATAHIHGEIYRRRGWLTSEGKEIKNKDEILALLKALFLPKRLSIIHCPGHQKGNSAEARGNRMADQAAREVATRETPETSTLLAGKRTADGSEFEKRTADGSEFESPKKKAKVE

SEQ ID NO: 2333 - protein, 2100 aa, synthetic construct
MPAAKRVKLDGGDKKYSIGLDIGTNSVGWAVITDEYKVPSKKFKVLGNTDRHSIKKNLIGALLFDSGETAEATRLKRTARRRYTRRKNRICYLQEIFSNEMAKVDDSFFHRLEESFLVEEDKKHERHPIFGNIVDEVAYHEKYPTIYHLRKKLVDSTDKADLRLIYLALAHMIKFRGHFLIEGDLNPDNSDVDKLFIQLVQTYNQLFEENPINASGVDAKAILSARLSKSRRLENLIAQLPGEKKNGLFGNLIALSLGLTPNFKSNFDLAEDAKLQLSKDTYDDDLDNLLAQIGDQYADLFLAAKNLSDAILLSDILRVNTEITKAPLSASMIKRYDEHHQDLTLLKALVRQQLPEKYKEIFFDQSKNGYAGYIDGGASQEEFYKFIKPILEKMDGTEELLVKLNREDLLRKQRTFDNGSIPHQIHLGELHAILRRQEDFYPFLKDNREKIEKILTFRIPYYVGPLARGNSRFAWMTRKSEETITPWNFEEVVDKGASAQSFIERMTNFDKNLPNEKVLPKHSLLYEYFTVYNELTKVKYVTEGMRKPAFLSGEQKKAIVDLLFKTNRKVTVKQLKEDYFKKIECFDSVEISGVEDRFNASLGTYHDLLKIIKDKDFLDNEENEDILEDIVLTLTLFEDREMIEERLKTYAHLFDDKVMKQLKRRRYTGWGRLSRKLINGIRDKQSGKTILDFLKSDGFANRNFMQLIHDDSLTFKEDIQKAQVSGQGDSLHEHIANLAGSPAIKKGILQTVKVVDELVKVMGRHKPENIVIEMARENQTTQKGQKNSRERMKRIEEGIKELGSQILKEHPVENTQLQNEKLYLYYLQNGRDMYVDQELDINRLSDYDVDHIVPQSFLKDDSIDNKVLTRSDKARGKSDNVPSEEVVKKMKNYWRQLLNAKLITQRKFDNLTKAERGGLSELDKAGFIKRQLVETRQITKHVAQILDSRMNTKYDENDKLIREVKVITLKSKLVSDFRKDFQFYKVREINNYHHAHDAYLNAVVGTALIKKYPKLESEFVYGDYKVYDVRKMIAKSEQEIGKATAKYFFYSNIMNFFKTEITLANGEIRKRPLIETNGETGEIVWDKGRDFATVRKVLSMPQVNIVKKTEVQTGGFSKESILPKRNSDKLIARKKDWDPKKYGGFDSPTVAYSVLVVAKVEKGKSKKLKSVKELLGITIMERSSFEKNPIDFLEAKGYKEVKKDLIIKLPKYSLFELENGRKRMLASAGELQKGNELALPSKYVNFLYLASHYEKLKGSPEDNEQKQLFVEQHKHYLDEIIEQISEFSKRVILADANLDKVLSAYNKHRDKPIREQAENIIHLFTLTNLGAPAAFKYFDTTIDRKRYTSTKEVLDATLIHQSITGLYETRIDLSQLGGDGGGGGGSGGGGSGGGGSGGTLNIEDEYRLHETSKEPDVSLGSTWLSDFPQAWAETGGMGLAVRQAPLIIPLKATSTPVSIKQYPMSQEARLGIKPHIQRLLDQGILVPCQSPWNTPLLPVKKPGTNDYRPVQDLREVNKRVEDIHPTVPNPYNLLSGLPPSHQWYTVLDLKDAFFCLRLHPTSQPLFAFEWRDPEMGISGQLTWTRLPQGFKNSPTLFNEALHRDLAGFRIQHPDLILLQYVDDLLLAATSELDCQQGTRALLQTLGDLGYRASAKKAQICQKQVKYLGYLLKEGQRWLTEARKETVMGQPIPKTPRQLREFLGKAGFCRLFIPGFAEMAAPLYPLTKPGTLFNWGPDQQKAFQEIKQALLTAPALGLPDLTKPFELFVDEKQGYAKGVLTQKLGPWRRPVAYLSKKLDPVAAGWPPCLRMVAAIAVLTKDAGKLTMGQPLVILAPHAVEALVKQPPDRWLSNARMTHYQALLLDTDRVQFGPVVALNPATLLPLPEEGLQHDCLDILAEAHGTRSDLMDQPLPDADHTWYTDGSSFLQEGQRKAGAAVTTETEVIWARALPAGTSAQRAELIALTQALKMAEGKKLNVYTDSRYAFATAHIHGEIYRRRGWLTSEGKEIKNKDEILALLKALFLPKRLSIIHCPGHQKGNSAEARGNRMADQAAREVATRETPETSTLLAGKRTADGSEFEKRTADGSEFESPKKKAKVE

SEQ ID NO: 2334 - protein, 2096 aa, synthetic construct
MPAAKRVKLDGGDKKYSIGLDIGTNSVGWAVITDEYKVPSKKFKVLGNTDRHSIKKNLIGALLFDSGETAEATRLKRTARRRYTRRKNRICYLQEIFSNEMAKVDDSFFHRLEESFLVEEDKKHERHPIFGNIVDEVAYHEKYPTIYHLRKKLVDSTDKADLRLIYLALAHMIKFRGHFLIEGDLNPDNSDVDKLFIQLVQTYNQLFEENPINASGVDAKAILSARLSKSRRLENLIAQLPGEKKNGLFGNLIALSLGLTPNFKSNFDLAEDAKLQLSKDTYDDDLDNLLAQIGDQYADLFLAAKNLSDAILLSDILRVNTEITKAPLSASMIKRYDEHHQDLTLLKALVRQQLPEKYKEIFFDQSKNGYAGYIDGGASQEEFYKFIKPILEKMDGTEELLVKLNREDLLRKQRTFDNGSIPHQIHLGELHAILRRQEDFYPFLKDNREKIEKILTFRIPYYVGPLARGNSRFAWMTRKSEETITPWNFEEVVDKGASAQSFIERMTNFDKNLPNEKVLPKHSLLYEYFTVYNELTKVKYVTEGMRKPAFLSGEQKKAIVDLLFKTNRKVTVKQLKEDYFKKIECFDSVEISGVEDRFNASLGTYHDLLKIIKDKDFLDNEENEDILEDIVLTLTLFEDREMIEERLKTYAHLFDDKVMKQLKRRRYTGWGRLSRKLINGIRDKQSGKTILDFLKSDGFANRNFMQLIHDDSLTFKEDIQKAQVSGQGDSLHEHIANLAGSPAIKKGILQTVKVVDELVKVMGRHKPENIVIEMARENQTTQKGQKNSRERMKRIEEGIKELGSQILKEHPVENTQLQNEKLYLYYLQNGRDMYVDQELDINRLSDYDVDHIVPQSFLKDDSIDNKVLTRSDKARGKSDNVPSEEVVKKMKNYWRQLLNAKLITQRKFDNLTKAERGGLSELDKAGFIKRQLVETRQITKHVAQILDSRMNTKYDENDKLIREVKVITLKSKLVSDFRKDFQFYKVREINNYHHAHDAYLNAVVGTALIKKYPKLESEFVYGDYKVYDVRKMIAKSEQEIGKATAKYFFYSNIMNFFKTEITLANGEIRKRPLIETNGETGEIVWDKGRDFATVRKVLSMPQVNIVKKTEVQTGGFSKESILPKRNSDKLIARKKDWDPKKYGGFDSPTVAYSVLVVAKVEKGKSKKLKSVKELLGITIMERSSFEKNPIDFLEAKGYKEVKKDLIIKLPKYSLFELENGRKRMLASAGELQKGNELALPSKYVNFLYLASHYEKLKGSPEDNEQKQLFVEQHKHYLDEIIEQISEFSKRVILADANLDKVLSAYNKHRDKPIREQAENIIHLFTLTNLGAPAAFKYFDTTIDRKRYTSTKEVLDATLIHQSITGLYETRIDLSQLGGDGGEAAAKGGSGGGGGTLNIEDEYRLHETSKEPDVSLGSTWLSDFPQAWAETGGMGLAVRQAPLIIPLKATSTPVSIKQYPMSQEARLGIKPHIQRLLDQGILVPCQSPWNTPLLPVKKPGTNDYRPVQDLREVNKRVEDIHPTVPNPYNLLSGLPPSHQWYTVLDLKDAFFCLRLHPTSQPLFAFEWRDPEMGISGQLTWTRLPQGFKNSPTLFNEALHRDLAGFRIQHPDLILLQYVDDLLLAATSELDCQQGTRALLQTLGDLGYRASAKKAQICQKQVKYLGYLLKEGQRWLTEARKETVMGQPIPKTPRQLREFLGKAGFCRLFIPGFAEMAAPLYPLTKPGTLFNWGPDQQKAFQEIKQALLTAPALGLPDLTKPFELFVDEKQGYAKGVLTQKLGPWRRPVAYLSKKLDPVAAGWPPCLRMVAAIAVLTKDAGKLTMGQPLVILAPHAVEALVKQPPDRWLSNARMTHYQALLLDTDRVQFGPVVALNPATLLPLPEEGLQHDCLDILAEAHGTRSDLMDQPLPDADHTWYTDGSSFLQEGQRKAGAAVTTETEVIWARALPAGTSAQRAELIALTQALKMAEGKKLNVYTDSRYAFATAHIHGEIYRRRGWLTSEGKEIKNKDEILALLKALFLPKRLSIIHCPGHQKGNSAEARGNRMADQAAREVATRETPETSTLLAGKRTADGSEFEKRTADGSEFESPKKKAKVE

SEQ ID NO: 2335 - protein, 2091 aa, synthetic construct
MPAAKRVKLDGGDKKYSIGLDIGTNSVGWAVITDEYKVPSKKFKVLGNTDRHSIKKNLIGALLFDSGETAEATRLKRTARRRYTRRKNRICYLQEIFSNEMAKVDDSFFHRLEESFLVEEDKKHERHPIFGNIVDEVAYHEKYPTIYHLRKKLVDSTDKADLRLIYLALAHMIKFRGHFLIEGDLNPDNSDVDKLFIQLVQTYNQLFEENPINASGVDAKAILSARLSKSRRLENLIAQLPGEKKNGLFGNLIALSLGLTPNFKSNFDLAEDAKLQLSKDTYDDDLDNLLAQIGDQYADLFLAAKNLSDAILLSDILRVNTEITKAPLSASMIKRYDEHHQDLTLLKALVRQQLPEKYKEIFFDQSKNGYAGYIDGGASQEEFYKFIKPILEKMDGTEELLVKLNREDLLRKQRTFDNGSIPHQIHLGELHAILRRQEDFYPFLKDNREKIEKILTFRIPYYVGPLARGNSRFAWMTRKSEETITPWNFEEVVDKGASAQSFIERMTNFDKNLPNEKVLPKHSLLYEYFTVYNELTKVKYVTEGMRKPAFLSGEQKKAIVDLLFKTNRKVTVKQLKEDYFKKIECFDSVEISGVEDRFNASLGTYHDLLKIIKDKDFLDNEENEDILEDIVLTLTLFEDREMIEERLKTYAHLFDDKVMKQLKRRRYTGWGRLSRKLINGIRDKQSGKTILDFLKSDGFANRNFMQLIHDDSLTFKEDIQKAQVSGQGDSLHEHIANLAGSPAIKKGILQTVKVVDELVKVMGRHKPENIVIEMARENQTTQKGQKNSRERMKRIEEGIKELGSQILKEHPVENTQLQNEKLYLYYLQNGRDMYVDQELDINRLSDYDVDHIVPQSFLKDDSIDNKVLTRSDKARGKSDNVPSEEVVKKMKNYWRQLLNAKLITQRKFDNLTKAERGGLSELDKAGFIKRQLVETRQITKHVAQILDSRMNTKYDENDKLIREVKVITLKSKLVSDFRKDFQFYKVREINNYHHAHDAYLNAVVGTALIKKYPKLESEFVYGDYKVYDVRKMIAKSEQEIGKATAKYFFYSNIMNFFKTEITLANGEIRKRPLIETNGETGEIVWDKGRDFATVRKVLSMPQVNIVKKTEVQTGGFSKESILPKRNSDKLIARKKDWDPKKYGGFDSPTVAYSVLVVAKVEKGKSKKLKSVKELLGITIMERSSFEKNPIDFLEAKGYKEVKKDLIIKLPKYSLFELENGRKRMLASAGELQKGNELALPSKYVNFLYLASHYEKLKGSPEDNEQKQLFVEQHKHYLDEIIEQISEFSKRVILADANLDKVLSAYNKHRDKPIREQAENIIHLFTLTNLGAPAAFKYFDTTIDRKRYTSTKEVLDATLIHQSITGLYETRIDLSQLGGDGGGGSGGGGGTLNIEDEYRLHETSKEPDVSLGSTWLSDFPQAWAETGGMGLAVRQAPLIIPLKATSTPVSIKQYPMSQEARLGIKPHIQRLLDQGILVPCQSPWNTPLLPVKKPGTNDYRPVQDLREVNKRVEDIHPTVPNPYNLLSGLPPSHQWYTVLDLKDAFFCLRLHPTSQPLFAFEWRDPEMGISGQLTWTRLPQGFKNSPTLFNEALHRDLAGFRIQHPDLILLQYVDDLLLAATSELDCQQGTRALLQTLGDLGYRASAKKAQICQKQVKYLGYLLKEGQRWLTEARKETVMGQPIPKTPRQLREFLGKAGFCRLFIPGFAEMAAPLYPLTKPGTLFNWGPDQQKAFQEIKQALLTAPALGLPDLTKPFELFVDEKQGYAKGVLTQKLGPWRRPVAYLSKKLDPVAAGWPPCLRMVAAIAVLTKDAGKLTMGQPLVILAPHAVEALVKQPPDRWLSNARMTHYQALLLDTDRVQFGPVVALNPATLLPLPEEGLQHDCLDILAEAHGTRSDLMDQPLPDADHTWYTDGSSFLQEGQRKAGAAVTTETEVIWARALPAGTSAQRAELIALTQALKMAEGKKLNVYTDSRYAFATAHIHGEIYRRRGWLTSEGKEIKNKDEILALLKALFLPKRLSIIHCPGHQKGNSAEARGNRMADQAAREVATRETPETSTLLAGKRTADGSEFEKRTADGSEFESPKKKAKVE

SEQ ID NO: 2336 - protein, 2091 aa, synthetic construct
MPAAKRVKLDGGDKKYSIGLDIGTNSVGWAVITDEYKVPSKKFKVLGNTDRHSIKKNLIGALLFDSGETAEATRLKRTARRRYTRRKNRICYLQEIFSNEMAKVDDSFFHRLEESFLVEEDKKHERHPIFGNIVDEVAYHEKYPTIYHLRKKLVDSTDKADLRLIYLALAHMIKFRGHFLIEGDLNPDNSDVDKLFIQLVQTYNQLFEENPINASGVDAKAILSARLSKSRRLENLIAQLPGEKKNGLFGNLIALSLGLTPNFKSNFDLAEDAKLQLSKDTYDDDLDNLLAQIGDQYADLFLAAKNLSDAILLSDILRVNTEITKAPLSASMIKRYDEHHQDLTLLKALVRQQLPEKYKEIFFDQSKNGYAGYIDGGASQEEFYKFIKPILEKMDGTEELLVKLNREDLLRKQRTFDNGSIPHQIHLGELHAILRRQEDFYPFLKDNREKIEKILTFRIPYYVGPLARGNSRFAWMTRKSEETITPWNFEEVVDKGASAQSFIERMTNFDKNLPNEKVLPKHSLLYEYFTVYNELTKVKYVTEGMRKPAFLSGEQKKAIVDLLFKTNRKVTVKQLKEDYFKKIECFDSVEISGVEDRFNASLGTYHDLLKIIKDKDFLDNEENEDILEDIVLTLTLFEDREMIEERLKTYAHLFDDKVMKQLKRRRYTGWGRLSRKLINGIRDKQSGKTILDFLKSDGFANRNFMQLIHDDSLTFKEDIQKAQVSGQGDSLHEHIANLAGSPAIKKGILQTVKVVDELVKVMGRHKPENIVIEMARENQTTQKGQKNSRERMKRIEEGIKELGSQILKEHPVENTQLQNEKLYLYYLQNGRDMYVDQELDINRLSDYDVDHIVPQSFLKDDSIDNKVLTRSDKARGKSDNVPSEEVVKKMKNYWRQLLNAKLITQRKFDNLTKAERGGLSELDKAGFIKRQLVETRQITKHVAQILDSRMNTKYDENDKLIREVKVITLKSKLVSDFRKDFQFYKVREINNYHHAHDAYLNAVVGTALIKKYPKLESEFVYGDYKVYDVRKMIAKSEQEIGKATAKYFFYSNIMNFFKTEITLANGEIRKRPLIETNGETGEIVWDKGRDFATVRKVLSMPQVNIVKKTEVQTGGFSKESILPKRNSDKLIARKKDWDPKKYGGFDSPTVAYSVLVVAKVEKGKSKKLKSVKELLGITIMERSSFEKNPIDFLEAKGYKEVKKDLIIKLPKYSLFELENGRKRMLASAGELQKGNELALPSKYVNFLYLASHYEKLKGSPEDNEQKQLFVEQHKHYLDEIIEQISEFSKRVILADANLDKVLSAYNKHRDKPIREQAENIIHLFTLTNLGAPAAFKYFDTTIDRKRYTSTKEVLDATLIHQSITGLYETRIDLSQLGGDGGPAPGSSGGTLNIEDEYRLHETSKEPDVSLGSTWLSDFPQAWAETGGMGLAVRQAPLIIPLKATSTPVSIKQYPMSQEARLGIKPHIQRLLDQGILVPCQSPWNTPLLPVKKPGTNDYRPVQDLREVNKRVEDIHPTVPNPYNLLSGLPPSHQWYTVLDLKDAFFCLRLHPTSQPLFAFEWRDPEMGISGQLTWTRLPQGFKNSPTLFNEALHRDLAGFRIQHPDLILLQYVDDLLLAATSELDCQQGTRALLQTLGDLGYRASAKKAQICQKQVKYLGYLLKEGQRWLTEARKETVMGQPIPKTPRQLREFLGKAGFCRLFIPGFAEMAAPLYPLTKPGTLFNWGPDQQKAFQEIKQALLTAPALGLPDLTKPFELFVDEKQGYAKGVLTQKLGPWRRPVAYLSKKLDPVAAGWPPCLRMVAAIAVLTKDAGKLTMGQPLVILAPHAVEALVKQPPDRWLSNARMTHYQALLLDTDRVQFGPVVALNPATLLPLPEEGLQHDCLDILAEAHGTRSDLMDQPLPDADHTWYTDGSSFLQEGQRKAGAAVTTETEVIWARALPAGTSAQRAELIALTQALKMAEGKKLNVYTDSRYAFATAHIHGEIYRRRGWLTSEGKEIKNKDEILALLKALFLPKRLSIIHCPGHQKGNSAEARGNRMADQAAREVATRETPETSTLLAGKRTADGSEFEKRTADGSEFESPKKKAKVE

SEQ ID NO: 2337 - protein, 2093 aa, synthetic construct
MPAAKRVKLDGGDKKYSIGLDIGTNSVGWAVITDEYKVPSKKFKVLGNTDRHSIKKNLIGALLFDSGETAEATRLKRTARRRYTRRKNRICYLQEIFSNEMAKVDDSFFHRLEESFLVEEDKKHERHPIFGNIVDEVAYHEKYPTIYHLRKKLVDSTDKADLRLIYLALAHMIKFRGHFLIEGDLNPDNSDVDKLFIQLVQTYNQLFEENPINASGVDAKAILSARLSKSRRLENLIAQLPGEKKNGLFGNLIALSLGLTPNFKSNFDLAEDAKLQLSKDTYDDDLDNLLAQIGDQYADLFLAAKNLSDAILLSDILRVNTEITKAPLSASMIKRYDEHHQDLTLLKALVRQQLPEKYKEIFFDQSKNGYAGYIDGGASQEEFYKFIKPILEKMDGTEELLVKLNREDLLRKQRTFDNGSIPHQIHLGELHAILRRQEDFYPFLKDNREKIEKILTFRIPYYVGPLARGNSRFAWMTRKSEETITPWNFEEVVDKGASAQSFIERMTNFDKNLPNEKVLPKHSLLYEYFTVYNELTKVKYVTEGMRKPAFLSGEQKKAIVDLLFKTNRKVTVKQLKEDYFKKIECFDSVEISGVEDRFNASLGTYHDLLKIIKDKDFLDNEENEDILEDIVLTLTLFEDREMIEERLKTYAHLFDDKVMKQLKRRRYTGWGRLSRKLINGIRDKQSGKTILDFLKSDGFANRNFMQLIHDDSLTFKEDIQKAQVSGQGDSLHEHIANLAGSPAIKKGILQTVKVVDELVKVMGRHKPENIVIEMARENQTTQKGQKNSRERMKRIEEGIKELGSQILKEHPVENTQLQNEKLYLYYLQNGRDMYVDQELDINRLSDYDVDHIVPQSFLKDDSIDNKVLTRSDKARGKSDNVPSEEVVKKMKNYWRQLLNAKLITQRKFDNLTKAERGGLSELDKAGFIKRQLVETRQITKHVAQILDSRMNTKYDENDKLIREVKVITLKSKLVSDFRKDFQFYKVREINNYHHAHDAYLNAVVGTALIKKYPKLESEFVYGDYKVYDVRKMIAKSEQEIGKATAKYFFYSNIMNFFKTEITLANGEIRKRPLIETNGETGEIVWDKGRDFATVRKVLSMPQVNIVKKTEVQTGGFSKESILPKRNSDKLIARKKDWDPKKYGGFDSPTVAYSVLVVAKVEKGKSKKLKSVKELLGITIMERSSFEKNPIDFLEAKGYKEVKKDLIIKLPKYSLFELENGRKRMLASAGELQKGNELALPSKYVNFLYLASHYEKLKGSPEDNEQKQLFVEQHKHYLDEIIEQISEFSKRVILADANLDKVLSAYNKHRDKPIREQAENIIHLFTLTNLGAPAAFKYFDTTIDRKRYTSTKEVLDATLIHQSITGLYETRIDLSQLGGDGGEAAAKPAPGGTLNIEDEYRLHETSKEPDVSLGSTWLSDFPQAWAETGGMGLAVRQAPLIIPLKATSTPVSIKQYPMSQEARLGIKPHIQRLLDQGILVPCQSPWNTPLLPVKKPGTNDYRPVQDLREVNKRVEDIHPTVPNPYNLLSGLPPSHQWYTVLDLKDAFFCLRLHPTSQPLFAFEWRDPEMGISGQLTWTRLPQGFKNSPTLFNEALHRDLAGFRIQHPDLILLQYVDDLLLAATSELDCQQGTRALLQTLGDLGYRASAKKAQICQKQVKYLGYLLKEGQRWLTEARKETVMGQPIPKTPRQLREFLGKAGFCRLFIPGFAEMAAPLYPLTKPGTLFNWGPDQQKAFQEIKQALLTAPALGLPDLTKPFELFVDEKQGYAKGVLTQKLGPWRRPVAYLSKKLDPVAAGWPPCLRMVAAIAVLTKDAGKLTMGQPLVILAPHAVEALVKQPPDRWLSNARMTHYQALLLDTDRVQFGPVVALNPATLLPLPEEGLQHDCLDILAEAHGTRSDLMDQPLPDADHTWYTDGSSFLQEGQRKAGAAVTTETEVIWARALPAGTSAQRAELIALTQALKMAEGKKLNVYTDSRYAFATAHIHGEIYRRRGWLTSEGKEIKNKDEILALLKALFLPKRLSIIHCPGHQKGNSAEARGNRMADQAAREVATRETPETSTLLAGKRTADGSEFEKRTADGSEFESPKKKAKVE

SEQ ID NO: 2338 - protein, 2096 aa, synthetic construct
MPAAKRVKLDGGDKKYSIGLDIGTNSVGWAVITDEYKVPSKKFKVLGNTDRHSIKKNLIGALLFDSGETAEATRLKRTARRRYTRRKNRICYLQEIFSNEMAKVDDSFFHRLEESFLVEEDKKHERHPIFGNIVDEVAYHEKYPTIYHLRKKLVDSTDKADLRLIYLALAHMIKFRGHFLIEGDLNPDNSDVDKLFIQLVQTYNQLFEENPINASGVDAKAILSARLSKSRRLENLIAQLPGEKKNGLFGNLIALSLGLTPNFKSNFDLAEDAKLQLSKDTYDDDLDNLLAQIGDQYADLFLAAKNLSDAILLSDILRVNTEITKAPLSASMIKRYDEHHQDLTLLKALVRQQLPEKYKEIFFDQSKNGYAGYIDGGASQEEFYKFIKPILEKMDGTEELLVKLNREDLLRKQRTFDNGSIPHQIHLGELHAILRRQEDFYPFLKDNREKIEKILTFRIPYYVGPLARGNSRFAWMTRKSEETITPWNFEEVVDKGASAQSFIERMTNFDKNLPNEKVLPKHSLLYEYFTVYNELTKVKYVTEGMRKPAFLSGEQKKAIVDLLFKTNRKVTVKQLKEDYFKKIECFDSVEISGVEDRFNASLGTYHDLLKIIKDKDFLDNEENEDILEDIVLTLTLFEDREMIEERLKTYAHLFDDKVMKQLKRRRYTGWGRLSRKLINGIRDKQSGKTILDFLKSDGFANRNFMQLIHDDSLTFKEDIQKAQVSGQGDSLHEHIANLAGSPAIKKGILQTVKVVDELVKVMGRHKPENIVIEMARENQTTQKGQKNSRERMKRIEEGIKELGSQILKEHPVENTQLQNEKLYLYYLQNGRDMYVDQELDINRLSDYDVDHIVPQSFLKDDSIDNKVLTRSDKARGKSDNVPSEEVVKKMKNYWRQLLNAKLITQRKFDNLTKAERGGLSELDKAGFIKRQLVETRQITKHVAQILDSRMNTKYDENDKLIREVKVITLKSKLVSDFRKDFQFYKVREINNYHHAHDAYLNAVVGTALIKKYPKLESEFVYGDYKVYDVRKMIAKSEQEIGKATAKYFFYSNIMNFFKTEITLANGEIRKRPLIETNGETGEIVWDKGRDFATVRKVLSMPQVNIVKKTEVQTGGFSKESILPKRNSDKLIARKKDWDPKKYGGFDSPTVAYSVLVVAKVEKGKSKKLKSVKELLGITIMERSSFEKNPIDFLEAKGYKEVKKDLIIKLPKYSLFELENGRKRMLASAGELQKGNELALPSKYVNFLYLASHYEKLKGSPEDNEQKQLFVEQHKHYLDEIIEQISEFSKRVILADANLDKVLSAYNKHRDKPIREQAENIIHLFTLTNLGAPAAFKYFDTTIDRKRYTSTKEVLDATLIHQSITGLYETRIDLSQLGGDGGGGSPAPEAAAKGGTLNIEDEYRLHETSKEPDVSLGSTWLSDFPQAWAETGGMGLAVRQAPLIIPLKATSTPVSIKQYPMSQEARLGIKPHIQRLLDQGILVPCQSPWNTPLLPVKKPGTNDYRPVQDLREVNKRVEDIHPTVPNPYNLLSGLPPSHQWYTVLDLKDAFFCLRLHPTSQPLFAFEWRDPEMGISGQLTWTRLPQGFKNSPTLFNEALHRDLAGFRIQHPDLILLQYVDDLLLAATSELDCQQGTRALLQTLGDLGYRASAKKAQICQKQVKYLGYLLKEGQRWLTEARKETVMGQPIPKTPRQLREFLGKAGFCRLFIPGFAEMAAPLYPLTKPGTLFNWGPDQQKAFQEIKQALLTAPALGLPDLTKPFELFVDEKQGYAKGVLTQKLGPWRRPVAYLSKKLDPVAAGWPPCLRMVAAIAVLTKDAGKLTMGQPLVILAPHAVEALVKQPPDRWLSNARMTHYQALLLDTDRVQFGPVVALNPATLLPLPEEGLQHDCLDILAEAHGTRSDLMDQPLPDADHTWYTDGSSFLQEGQRKAGAAVTTETEVIWARALPAGTSAQRAELIALTQALKMAEGKKLNVYTDSRYAFATAHIHGEIYRRRGWLTSEGKEIKNKDEILALLKALFLPKRLSIIHCPGHQKGNSAEARGNRMADQAAREVATRETPETSTLLAGKRTADGSEFEKRTADGSEFESPKKKAKVE

SEQ ID NO: 2339 - protein, 2094 aa, synthetic construct
MPAAKRVKLDGGDKKYSIGLDIGTNSVGWAVITDEYKVPSKKFKVLGNTDRHSIKKNLIGALLFDSGETAEATRLKRTARRRYTRRKNRICYLQEIFSNEMAKVDDSFFHRLEESFLVEEDKKHERHPIFGNIVDEVAYHEKYPTIYHLRKKLVDSTDKADLRLIYLALAHMIKFRGHFLIEGDLNPDNSDVDKLFIQLVQTYNQLFEENPINASGVDAKAILSARLSKSRRLENLIAQLPGEKKNGLFGNLIALSLGLTPNFKSNFDLAEDAKLQLSKDTYDDDLDNLLAQIGDQYADLFLAAKNLSDAILLSDILRVNTEITKAPLSASMIKRYDEHHQDLTLLKALVRQQLPEKYKEIFFDQSKNGYAGYIDGGASQEEFYKFIKPILEKMDGTEELLVKLNREDLLRKQRTFDNGSIPHQIHLGELHAILRRQEDFYPFLKDNREKIEKILTFRIPYYVGPLARGNSRFAWMTRKSEETITPWNFEEVVDKGASAQSFIERMTNFDKNLPNEKVLPKHSLLYEYFTVYNELTKVKYVTEGMRKPAFLSGEQKKAIVDLLFKTNRKVTVKQLKEDYFKKIECFDSVEISGVEDRFNASLGTYHDLLKIIKDKDFLDNEENEDILEDIVLTLTLFEDREMIEERLKTYAHLFDDKVMKQLKRRRYTGWGRLSRKLINGIRDKQSGKTILDFLKSDGFANRNFMQLIHDDSLTFKEDIQKAQVSGQGDSLHEHIANLAGSPAIKKGILQTVKVVDELVKVMGRHKPENIVIEMARENQTTQKGQKNSRERMKRIEEGIKELGSQILKEHPVENTQLQNEKLYLYYLQNGRDMYVDQELDINRLSDYDVDHIVPQSFLKDDSIDNKVLTRSDKARGKSDNVPSEEVVKKMKNYWRQLLNAKLITQRKFDNLTKAERGGLSELDKAGFIKRQLVETRQITKHVAQILDSRMNTKYDENDKLIREVKVITLKSKLVSDFRKDFQFYKVREINNYHHAHDAYLNAVVGTALIKKYPKLESEFVYGDYKVYDVRKMIAKSEQEIGKATAKYFFYSNIMNFFKTEITLANGEIRKRPLIETNGETGEIVWDKGRDFATVRKVLSMPQVNIVKKTEVQTGGFSKESILPKRNSDKLIARKKDWDPKKYGGFDSPTVAYSVLVVAKVEKGKSKKLKSVKELLGITIMERSSFEKNPIDFLEAKGYKEVKKDLIIKLPKYSLFELENGRKRMLASAGELQKGNELALPSKYVNFLYLASHYEKLKGSPEDNEQKQLFVEQHKHYLDEIIEQISEFSKRVILADANLDKVLSAYNKHRDKPIREQAENIIHLFTLTNLGAPAAFKYFDTTIDRKRYTSTKEVLDATLIHQSITGLYETRIDLSQLGGDGGGGSGSSPAPGGTLNIEDEYRLHETSKEPDVSLGSTWLSDFPQAWAETGGMGLAVRQAPLIIPLKATSTPVSIKQYPMSQEARLGIKPHIQRLLDQGILVPCQSPWNTPLLPVKKPGTNDYRPVQDLREVNKRVEDIHPTVPNPYNLLSGLPPSHQWYTVLDLKDAFFCLRLHPTSQPLFAFEWRDPEMGISGQLTWTRLPQGFKNSPTLFNEALHRDLAGFRIQHPDLILLQYVDDLLLAATSELDCQQGTRALLQTLGDLGYRASAKKAQICQKQVKYLGYLLKEGQRWLTEARKETVMGQPIPKTPRQLREFLGKAGFCRLFIPGFAEMAAPLYPLTKPGTLFNWGPDQQKAFQEIKQALLTAPALGLPDLTKPFELFVDEKQGYAKGVLTQKLGPWRRPVAYLSKKLDPVAAGWPPCLRMVAAIAVLTKDAGKLTMGQPLVILAPHAVEALVKQPPDRWLSNARMTHYQALLLDTDRVQFGPVVALNPATLLPLPEEGLQHDCLDILAEAHGTRSDLMDQPLPDADHTWYTDGSSFLQEGQRKAGAAVTTETEVIWARALPAGTSAQRAELIALTQALKMAEGKKLNVYTDSRYAFATAHIHGEIYRRRGWLTSEGKEIKNKDEILALLKALFLPKRLSIIHCPGHQKGNSAEARGNRMADQAAREVATRETPETSTLLAGKRTADGSEFEKRTADGSEFESPKKKAKVE

SEQ ID NO: 2340 - protein, 2091 aa, synthetic construct
MPAAKRVKLDGGDKKYSIGLDIGTNSVGWAVITDEYKVPSKKFKVLGNTDRHSIKKNLIGALLFDSGETAEATRLKRTARRRYTRRKNRICYLQEIFSNEMAKVDDSFFHRLEESFLVEEDKKHERHPIFGNIVDEVAYHEKYPTIYHLRKKLVDSTDKADLRLIYLALAHMIKFRGHFLIEGDLNPDNSDVDKLFIQLVQTYNQLFEENPINASGVDAKAILSARLSKSRRLENLIAQLPGEKKNGLFGNLIALSLGLTPNFKSNFDLAEDAKLQLSKDTYDDDLDNLLAQIGDQYADLFLAAKNLSDAILLSDILRVNTEITKAPLSASMIKRYDEHHQDLTLLKALVRQQLPEKYKEIFFDQSKNGYAGYIDGGASQEEFYKFIKPILEKMDGTEELLVKLNREDLLRKQRTFDNGSIPHQIHLGELHAILRRQEDFYPFLKDNREKIEKILTFRIPYYVGPLARGNSRFAWMTRKSEETITPWNFEEVVDKGASAQSFIERMTNFDKNLPNEKVLPKHSLLYEYFTVYNELTKVKYVTEGMRKPAFLSGEQKKAIVDLLFKTNRKVTVKQLKEDYFKKIECFDSVEISGVEDRFNASLGTYHDLLKIIKDKDFLDNEENEDILEDIVLTLTLFEDREMIEERLKTYAHLFDDKVMKQLKRRRYTGWGRLSRKLINGIRDKQSGKTILDFLKSDGFANRNFMQLIHDDSLTFKEDIQKAQVSGQGDSLHEHIANLAGSPAIKKGILQTVKVVDELVKVMGRHKPENIVIEMARENQTTQKGQKNSRERMKRIEEGIKELGSQILKEHPVENTQLQNEKLYLYYLQNGRDMYVDQELDINRLSDYDVDHIVPQSFLKDDSIDNKVLTRSDKARGKSDNVPSEEVVKKMKNYWRQLLNAKLITQRKFDNLTKAERGGLSELDKAGFIKRQLVETRQITKHVAQILDSRMNTKYDENDKLIREVKVITLKSKLVSDFRKDFQFYKVREINNYHHAHDAYLNAVVGTALIKKYPKLESEFVYGDYKVYDVRKMIAKSEQEIGKATAKYFFYSNIMNFFKTEITLANGEIRKRPLIETNGETGEIVWDKGRDFATVRKVLSMPQVNIVKKTEVQTGGFSKESILPKRNSDKLIARKKDWDPKKYGGFDSPTVAYSVLVVAKVEKGKSKKLKSVKELLGITIMERSSFEKNPIDFLEAKGYKEVKKDLIIKLPKYSLFELENGRKRMLASAGELQKGNELALPSKYVNFLYLASHYEKLKGSPEDNEQKQLFVEQHKHYLDEIIEQISEFSKRVILADANLDKVLSAYNKHRDKPIREQAENIIHLFTLTNLGAPAAFKYFDTTIDRKRYTSTKEVLDATLIHQSITGLYETRIDLSQLGGDGGPAPGGSGGTLNIEDEYRLHETSKEPDVSLGSTWLSDFPQAWAETGGMGLAVRQAPLIIPLKATSTPVSIKQYPMSQEARLGIKPHIQRLLDQGILVPCQSPWNTPLLPVKKPGTNDYRPVQDLREVNKRVEDIHPTVPNPYNLLSGLPPSHQWYTVLDLKDAFFCLRLHPTSQPLFAFEWRDPEMGISGQLTWTRLPQGFKNSPTLFNEALHRDLAGFRIQHPDLILLQYVDDLLLAATSELDCQQGTRALLQTLGDLGYRASAKKAQICQKQVKYLGYLLKEGQRWLTEARKETVMGQPIPKTPRQLREFLGKAGFCRLFIPGFAEMAAPLYPLTKPGTLFNWGPDQQKAFQEIKQALLTAPALGLPDLTKPFELFVDEKQGYAKGVLTQKLGPWRRPVAYLSKKLDPVAAGWPPCLRMVAAIAVLTKDAGKLTMGQPLVILAPHAVEALVKQPPDRWLSNARMTHYQALLLDTDRVQFGPVVALNPATLLPLPEEGLQHDCLDILAEAHGTRSDLMDQPLPDADHTWYTDGSSFLQEGQRKAGAAVTTETEVIWARALPAGTSAQRAELIALTQALKMAEGKKLNVYTDSRYAFATAHIHGEIYRRRGWLTSEGKEIKNKDEILALLKALFLPKRLSIIHCPGHQKGNSAEARGNRMADQAAREVATRETPETSTLLAGKRTADGSEFEKRTADGSEFESPKKKAKVE

SEQ ID NO: 2341 - protein, 2093 aa, synthetic construct
MPAAKRVKLDGGDKKYSIGLDIGTNSVGWAVITDEYKVPSKKFKVLGNTDRHSIKKNLIGALLFDSGETAEATRLKRTARRRYTRRKNRICYLQEIFSNEMAKVDDSFFHRLEESFLVEEDKKHERHPIFGNIVDEVAYHEKYPTIYHLRKKLVDSTDKADLRLIYLALAHMIKFRGHFLIEGDLNPDNSDVDKLFIQLVQTYNQLFEENPINASGVDAKAILSARLSKSRRLENLIAQLPGEKKNGLFGNLIALSLGLTPNFKSNFDLAEDAKLQLSKDTYDDDLDNLLAQIGDQYADLFLAAKNLSDAILLSDILRVNTEITKAPLSASMIKRYDEHHQDLTLLKALVRQQLPEKYKEIFFDQSKNGYAGYIDGGASQEEFYKFIKPILEKMDGTEELLVKLNREDLLRKQRTFDNGSIPHQIHLGELHAILRRQEDFYPFLKDNREKIEKILTFRIPYYVGPLARGNSRFAWMTRKSEETITPWNFEEVVDKGASAQSFIERMTNFDKNLPNEKVLPKHSLLYEYFTVYNELTKVKYVTEGMRKPAFLSGEQKKAIVDLLFKTNRKVTVKQLKEDYFKKIECFDSVEISGVEDRFNASLGTYHDLLKIIKDKDFLDNEENEDILEDIVLTLTLFEDREMIEERLKTYAHLFDDKVMKQLKRRRYTGWGRLSRKLINGIRDKQSGKTILDFLKSDGFANRNFMQLIHDDSLTFKEDIQKAQVSGQGDSLHEHIANLAGSPAIKKGILQTVKVVDELVKVMGRHKPENIVIEMARENQTTQKGQKNSRERMKRIEEGIKELGSQILKEHPVENTQLQNEKLYLYYLQNGRDMYVDQELDINRLSDYDVDHIVPQSFLKDDSIDNKVLTRSDKARGKSDNVPSEEVVKKMKNYWRQLLNAKLITQRKFDNLTKAERGGLSELDKAGFIKRQLVETRQITKHVAQILDSRMNTKYDENDKLIREVKVITLKSKLVSDFRKDFQFYKVREINNYHHAHDAYLNAVVGTALIKKYPKLESEFVYGDYKVYDVRKMIAKSEQEIGKATAKYFFYSNIMNFFKTEITLANGEIRKRPLIETNGETGEIVWDKGRDFATVRKVLSMPQVNIVKKTEVQTGGFSKESILPKRNSDKLIARKKDWDPKKYGGFDSPTVAYSVLVVAKVEKGKSKKLKSVKELLGITIMERSSFEKNPIDFLEAKGYKEVKKDLIIKLPKYSLFELENGRKRMLASAGELQKGNELALPSKYVNFLYLASHYEKLKGSPEDNEQKQLFVEQHKHYLDEIIEQISEFSKRVILADANLDKVLSAYNKHRDKPIREQAENIIHLFTLTNLGAPAAFKYFDTTIDRKRYTSTKEVLDATLIHQSITGLYETRIDLSQLGGDGGEAAAKGGSGGTLNIEDEYRLHETSKEPDVSLGSTWLSDFPQAWAETGGMGLAVRQAPLIIPLKATSTPVSIKQYPMSQEARLGIKPHIQRLLDQGILVPCQSPWNTPLLPVKKPGTNDYRPVQDLREVNKRVEDIHPTVPNPYNLLSGLPPSHQWYTVLDLKDAFFCLRLHPTSQPLFAFEWRDPEMGISGQLTWTRLPQGFKNSPTLFNEALHRDLAGFRIQHPDLILLQYVDDLLLAATSELDCQQGTRALLQTLGDLGYRASAKKAQICQKQVKYLGYLLKEGQRWLTEARKETVMGQPIPKTPRQLREFLGKAGFCRLFIPGFAEMAAPLYPLTKPGTLFNWGPDQQKAFQEIKQALLTAPALGLPDLTKPFELFVDEKQGYAKGVLTQKLGPWRRPVAYLSKKLDPVAAGWPPCLRMVAAIAVLTKDAGKLTMGQPLVILAPHAVEALVKQPPDRWLSNARMTHYQALLLDTDRVQFGPVVALNPATLLPLPEEGLQHDCLDILAEAHGTRSDLMDQPLPDADHTWYTDGSSFLQEGQRKAGAAVTTETEVIWARALPAGTSAQRAELIALTQALKMAEGKKLNVYTDSRYAFATAHIHGEIYRRRGWLTSEGKEIKNKDEILALLKALFLPKRLSIIHCPGHQKGNSAEARGNRMADQAAREVATRETPETSTLLAGKRTADGSEFEKRTADGSEFESPKKKAKVE

SEQ ID NO: 2342 - protein, 2093 aa, synthetic construct
MPAAKRVKLDGGDKKYSIGLDIGTNSVGWAVITDEYKVPSKKFKVLGNTDRHSIKKNLIGALLFDSGETAEATRLKRTARRRYTRRKNRICYLQEIFSNEMAKVDDSFFHRLEESFLVEEDKKHERHPIFGNIVDEVAYHEKYPTIYHLRKKLVDSTDKADLRLIYLALAHMIKFRGHFLIEGDLNPDNSDVDKLFIQLVQTYNQLFEENPINASGVDAKAILSARLSKSRRLENLIAQLPGEKKNGLFGNLIALSLGLTPNFKSNFDLAEDAKLQLSKDTYDDDLDNLLAQIGDQYADLFLAAKNLSDAILLSDILRVNTEITKAPLSASMIKRYDEHHQDLTLLKALVRQQLPEKYKEIFFDQSKNGYAGYIDGGASQEEFYKFIKPILEKMDGTEELLVKLNREDLLRKQRTFDNGSIPHQIHLGELHAILRRQEDFYPFLKDNREKIEKILTFRIPYYVGPLARGNSRFAWMTRKSEETITPWNFEEVVDKGASAQSFIERMTNFDKNLPNEKVLPKHSLLYEYFTVYNELTKVKYVTEGMRKPAFLSGEQKKAIVDLLFKTNRKVTVKQLKEDYFKKIECFDSVEISGVEDRFNASLGTYHDLLKIIKDKDFLDNEENEDILEDIVLTLTLFEDREMIEERLKTYAHLFDDKVMKQLKRRRYTGWGRLSRKLINGIRDKQSGKTILDFLKSDGFANRNFMQLIHDDSLTFKEDIQKAQVSGQGDSLHEHIANLAGSPAIKKGILQTVKVVDELVKVMGRHKPENIVIEMARENQTTQKGQKNSRERMKRIEEGIKELGSQILKEHPVENTQLQNEKLYLYYLQNGRDMYVDQELDINRLSDYDVDHIVPQSFLKDDSIDNKVLTRSDKARGKSDNVPSEEVVKKMKNYWRQLLNAKLITQRKFDNLTKAERGGLSELDKAGFIKRQLVETRQITKHVAQILDSRMNTKYDENDKLIREVKVITLKSKLVSDFRKDFQFYKVREINNYHHAHDAYLNAVVGTALIKKYPKLESEFVYGDYKVYDVRKMIAKSEQEIGKATAKYFFYSNIMNFFKTEITLANGEIRKRPLIETNGETGEIVWDKGRDFATVRKVLSMPQVNIVKKTEVQTGGFSKESILPKRNSDKLIARKKDWDPKKYGGFDSPTVAYSVLVVAKVEKGKSKKLKSVKELLGITIMERSSFEKNPIDFLEAKGYKEVKKDLIIKLPKYSLFELENGRKRMLASAGELQKGNELALPSKYVNFLYLASHYEKLKGSPEDNEQKQLFVEQHKHYLDEIIEQISEFSKRVILADANLDKVLSAYNKHRDKPIREQAENIIHLFTLTNLGAPAAFKYFDTTIDRKRYTSTKEVLDATLIHQSITGLYETRIDLSQLGGDGGGGGEAAAKGGTLNIEDEYRLHETSKEPDVSLGSTWLSDFPQAWAETGGMGLAVRQAPLIIPLKATSTPVSIKQYPMSQEARLGIKPHIQRLLDQGILVPCQSPWNTPLLPVKKPGTNDYRPVQDLREVNKRVEDIHPTVPNPYNLLSGLPPSHQWYTVLDLKDAFFCLRLHPTSQPLFAFEWRDPEMGISGQLTWTRLPQGFKNSPTLFNEALHRDLAGFRIQHPDLILLQYVDDLLLAATSELDCQQGTRALLQTLGDLGYRASAKKAQICQKQVKYLGYLLKEGQRWLTEARKETVMGQPIPKTPRQLREFLGKAGFCRLFIPGFAEMAAPLYPLTKPGTLFNWGPDQQKAFQEIKQALLTAPALGLPDLTKPFELFVDEKQGYAKGVLTQKLGPWRRPVAYLSKKLDPVAAGWPPCLRMVAAIAVLTKDAGKLTMGQPLVILAPHAVEALVKQPPDRWLSNARMTHYQALLLDTDRVQFGPVVALNPATLLPLPEEGLQHDCLDILAEAHGTRSDLMDQPLPDADHTWYTDGSSFLQEGQRKAGAAVTTETEVIWARALPAGTSAQRAELIALTQALKMAEGKKLNVYTDSRYAFATAHIHGEIYRRRGWLTSEGKEIKNKDEILALLKALFLPKRLSIIHCPGHQKGNSAEARGNRMADQAAREVATRETPETSTLLAGKRTADGSEFEKRTADGSEFESPKKKAKVE

SEQ ID NO: 2343 - protein, 2131 aa, synthetic construct
MPAAKRVKLDGGDKKYSIGLDIGTNSVGWAVITDEYKVPSKKFKVLGNTDRHSIKKNLIGALLFDSGETAEATRLKRTARRRYTRRKNRICYLQEIFSNEMAKVDDSFFHRLEESFLVEEDKKHERHPIFGNIVDEVAYHEKYPTIYHLRKKLVDSTDKADLRLIYLALAHMIKFRGHFLIEGDLNPDNSDVDKLFIQLVQTYNQLFEENPINASGVDAKAILSARLSKSRRLENLIAQLPGEKKNGLFGNLIALSLGLTPNFKSNFDLAEDAKLQLSKDTYDDDLDNLLAQIGDQYADLFLAAKNLSDAILLSDILRVNTEITKAPLSASMIKRYDEHHQDLTLLKALVRQQLPEKYKEIFFDQSKNGYAGYIDGGASQEEFYKFIKPILEKMDGTEELLVKLNREDLLRKQRTFDNGSIPHQIHLGELHAILRRQEDFYPFLKDNREKIEKILTFRIPYYVGPLARGNSRFAWMTRKSEETITPWNFEEVVDKGASAQSFIERMTNFDKNLPNEKVLPKHSLLYEYFTVYNELTKVKYVTEGMRKPAFLSGEQKKAIVDLLFKTNRKVTVKQLKEDYFKKIECFDSVEISGVEDRFNASLGTYHDLLKIIKDKDFLDNEENEDILEDIVLTLTLFEDREMIEERLKTYAHLFDDKVMKQLKRRRYTGWGRLSRKLINGIRDKQSGKTILDFLKSDGFANRNFMQLIHDDSLTFKEDIQKAQVSGQGDSLHEHIANLAGSPAIKKGILQTVKVVDELVKVMGRHKPENIVIEMARENQTTQKGQKNSRERMKRIEEGIKELGSQILKEHPVENTQLQNEKLYLYYLQNGRDMYVDQELDINRLSDYDVDHIVPQSFLKDDSIDNKVLTRSDKARGKSDNVPSEEVVKKMKNYWRQLLNAKLITQRKFDNLTKAERGGLSELDKAGFIKRQLVETRQITKHVAQILDSRMNTKYDENDKLIREVKVITLKSKLVSDFRKDFQFYKVREINNYHHAHDAYLNAVVGTALIKKYPKLESEFVYGDYKVYDVRKMIAKSEQEIGKATAKYFFYSNIMNFFKTEITLANGEIRKRPLIETNGETGEIVWDKGRDFATVRKVLSMPQVNIVKKTEVQTGGFSKESILPKRNSDKLIARKKDWDPKKYGGFDSPTVAYSVLVVAKVEKGKSKKLKSVKELLGITIMERSSFEKNPIDFLEAKGYKEVKKDLIIKLPKYSLFELENGRKRMLASAGELQKGNELALPSKYVNFLYLASHYEKLKGSPEDNEQKQLFVEQHKHYLDEIIEQISEFSKRVILADANLDKVLSAYNKHRDKPIREQAENIIHLFTLTNLGAPAAFKYFDTTIDRKRYTSTKEVLDATLIHQSITGLYETRIDLSQLGGDGGAEAAAKEAAAKEAAAKEAAAKALEAEAAAKEAAAKEAAAKEAAAKAGGTLNIEDEYRLHETSKEPDVSLGSTWLSDFPQAWAETGGMGLAVRQAPLIIPLKATSTPVSIKQYPMSQEARLGIKPHIQRLLDQGILVPCQSPWNTPLLPVKKPGTNDYRPVQDLREVNKRVEDIHPTVPNPYNLLSGLPPSHQWYTVLDLKDAFFCLRLHPTSQPLFAFEWRDPEMGISGQLTWTRLPQGFKNSPTLFNEALHRDLAGFRIQHPDLILLQYVDDLLLAATSELDCQQGTRALLQTLGDLGYRASAKKAQICQKQVKYLGYLLKEGQRWLTEARKETVMGQPIPKTPRQLREFLGKAGFCRLFIPGFAEMAAPLYPLTKPGTLFNWGPDQQKAFQEIKQALLTAPALGLPDLTKPFELFVDEKQGYAKGVLTQKLGPWRRPVAYLSKKLDPVAAGWPPCLRMVAAIAVLTKDAGKLTMGQPLVILAPHAVEALVKQPPDRWLSNARMTHYQALLLDTDRVQFGPVVALNPATLLPLPEEGLQHDCLDILAEAHGTRSDLMDQPLPDADHTWYTDGSSFLQEGQRKAGAAVTTETEVIWARALPAGTSAQRAELIALTQALKMAEGKKLNVYTDSRYAFATAHIHGEIYRRRGWLTSEGKEIKNKDEILALLKALFLPKRLSIIHCPGHQKGNSAEARGNRMADQAAREVATRETPETSTLLAGKRTADGSEFEKRTADGSEFESPKKKAKVE

SEQ ID NO: 2344 - protein, 2096 aa, synthetic construct
MPAAKRVKLDGGDKKYSIGLDIGTNSVGWAVITDEYKVPSKKFKVLGNTDRHSIKKNLIGALLFDSGETAEATRLKRTARRRYTRRKNRICYLQEIFSNEMAKVDDSFFHRLEESFLVEEDKKHERHPIFGNIVDEVAYHEKYPTIYHLRKKLVDSTDKADLRLIYLALAHMIKFRGHFLIEGDLNPDNSDVDKLFIQLVQTYNQLFEENPINASGVDAKAILSARLSKSRRLENLIAQLPGEKKNGLFGNLIALSLGLTPNFKSNFDLAEDAKLQLSKDTYDDDLDNLLAQIGDQYADLFLAAKNLSDAILLSDILRVNTEITKAPLSASMIKRYDEHHQDLTLLKALVRQQLPEKYKEIFFDQSKNGYAGYIDGGASQEEFYKFIKPILEKMDGTEELLVKLNREDLLRKQRTFDNGSIPHQIHLGELHAILRRQEDFYPFLKDNREKIEKILTFRIPYYVGPLARGNSRFAWMTRKSEETITPWNFEEVVDKGASAQSFIERMTNFDKNLPNEKVLPKHSLLYEYFTVYNELTKVKYVTEGMRKPAFLSGEQKKAIVDLLFKTNRKVTVKQLKEDYFKKIECFDSVEISGVEDRFNASLGTYHDLLKIIKDKDFLDNEENEDILEDIVLTLTLFEDREMIEERLKTYAHLFDDKVMKQLKRRRYTGWGRLSRKLINGIRDKQSGKTILDFLKSDGFANRNFMQLIHDDSLTFKEDIQKAQVSGQGDSLHEHIANLAGSPAIKKGILQTVKVVDELVKVMGRHKPENIVIEMARENQTTQKGQKNSRERMKRIEEGIKELGSQILKEHPVENTQLQNEKLYLYYLQNGRDMYVDQELDINRLSDYDVDHIVPQSFLKDDSIDNKVLTRSDKARGKSDNVPSEEVVKKMKNYWRQLLNAKLITQRKFDNLTKAERGGLSELDKAGFIKRQLVETRQITKHVAQILDSRMNTKYDENDKLIREVKVITLKSKLVSDFRKDFQFYKVREINNYHHAHDAYLNAVVGTALIKKYPKLESEFVYGDYKVYDVRKMIAKSEQEIGKATAKYFFYSNIMNFFKTEITLANGEIRKRPLIETNGETGEIVWDKGRDFATVRKVLSMPQVNIVKKTEVQTGGFSKESILPKRNSDKLIARKKDWDPKKYGGFDSPTVAYSVLVVAKVEKGKSKKLKSVKELLGITIMERSSFEKNPIDFLEAKGYKEVKKDLIIKLPKYSLFELENGRKRMLASAGELQKGNELALPSKYVNFLYLASHYEKLKGSPEDNEQKQLFVEQHKHYLDEIIEQISEFSKRVILADANLDKVLSAYNKHRDKPIREQAENIIHLFTLTNLGAPAAFKYFDTTIDRKRYTSTKEVLDATLIHQSITGLYETRIDLSQLGGDGGEAAAKGGGGGSGGTLNIEDEYRLHETSKEPDVSLGSTWLSDFPQAWAETGGMGLAVRQAPLIIPLKATSTPVSIKQYPMSQEARLGIKPHIQRLLDQGILVPCQSPWNTPLLPVKKPGTNDYRPVQDLREVNKRVEDIHPTVPNPYNLLSGLPPSHQWYTVLDLKDAFFCLRLHPTSQPLFAFEWRDPEMGISGQLTWTRLPQGFKNSPTLFNEALHRDLAGFRIQHPDLILLQYVDDLLLAATSELDCQQGTRALLQTLGDLGYRASAKKAQICQKQVKYLGYLLKEGQRWLTEARKETVMGQPIPKTPRQLREFLGKAGFCRLFIPGFAEMAAPLYPLTKPGTLFNWGPDQQKAFQEIKQALLTAPALGLPDLTKPFELFVDEKQGYAKGVLTQKLGPWRRPVAYLSKKLDPVAAGWPPCLRMVAAIAVLTKDAGKLTMGQPLVILAPHAVEALVKQPPDRWLSNARMTHYQALLLDTDRVQFGPVVALNPATLLPLPEEGLQHDCLDILAEAHGTRSDLMDQPLPDADHTWYTDGSSFLQEGQRKAGAAVTTETEVIWARALPAGTSAQRAELIALTQALKMAEGKKLNVYTDSRYAFATAHIHGEIYRRRGWLTSEGKEIKNKDEILALLKALFLPKRLSIIHCPGHQKGNSAEARGNRMADQAAREVATRETPETSTLLAGKRTADGSEFEKRTADGSEFESPKKKAKVE

SEQ ID NO: 2345 - protein, 2096 aa, synthetic construct
MPAAKRVKLDGGDKKYSIGLDIGTNSVGWAVITDEYKVPSKKFKVLGNTDRHSIKKNLIGALLFDSGETAEATRLKRTARRRYTRRKNRICYLQEIFSNEMAKVDDSFFHRLEESFLVEEDKKHERHPIFGNIVDEVAYHEKYPTIYHLRKKLVDSTDKADLRLIYLALAHMIKFRGHFLIEGDLNPDNSDVDKLFIQLVQTYNQLFEENPINASGVDAKAILSARLSKSRRLENLIAQLPGEKKNGLFGNLIALSLGLTPNFKSNFDLAEDAKLQLSKDTYDDDLDNLLAQIGDQYADLFLAAKNLSDAILLSDILRVNTEITKAPLSASMIKRYDEHHQDLTLLKALVRQQLPEKYKEIFFDQSKNGYAGYIDGGASQEEFYKFIKPILEKMDGTEELLVKLNREDLLRKQRTFDNGSIPHQIHLGELHAILRRQEDFYPFLKDNREKIEKILTFRIPYYVGPLARGNSRFAWMTRKSEETITPWNFEEVVDKGASAQSFIERMTNFDKNLPNEKVLPKHSLLYEYFTVYNELTKVKYVTEGMRKPAFLSGEQKKAIVDLLFKTNRKVTVKQLKEDYFKKIECFDSVEISGVEDRFNASLGTYHDLLKIIKDKDFLDNEENEDILEDIVLTLTLFEDREMIEERLKTYAHLFDDKVMKQLKRRRYTGWGRLSRKLINGIRDKQSGKTILDFLKSDGFANRNFMQLIHDDSLTFKEDIQKAQVSGQGDSLHEHIANLAGSPAIKKGILQTVKVVDELVKVMGRHKPENIVIEMARENQTTQKGQKNSRERMKRIEEGIKELGSQILKEHPVENTQLQNEKLYLYYLQNGRDMYVDQELDINRLSDYDVDHIVPQSFLKDDSIDNKVLTRSDKARGKSDNVPSEEVVKKMKNYWRQLLNAKLITQRKFDNLTKAERGGLSELDKAGFIKRQLVETRQITKHVAQILDSRMNTKYDENDKLIREVKVITLKSKLVSDFRKDFQFYKVREINNYHHAHDAYLNAVVGTALIKKYPKLESEFVYGDYKVYDVRKMIAKSEQEIGKATAKYFFYSNIMNFFKTEITLANGEIRKRPLIETNGETGEIVWDKGRDFATVRKVLSMPQVNIVKKTEVQTGGFSKESILPKRNSDKLIARKKDWDPKKYGGFDSPTVAYSVLVVAKVEKGKSKKLKSVKELLGITIMERSSFEKNPIDFLEAKGYKEVKKDLIIKLPKYSLFELENGRKRMLASAGELQKGNELALPSKYVNFLYLASHYEKLKGSPEDNEQKQLFVEQHKHYLDEIIEQISEFSKRVILADANLDKVLSAYNKHRDKPIREQAENIIHLFTLTNLGAPAAFKYFDTTIDRKRYTSTKEVLDATLIHQSITGLYETRIDLSQLGGDGGGSSPAPEAAAKGGTLNIEDEYRLHETSKEPDVSLGSTWLSDFPQAWAETGGMGLAVRQAPLIIPLKATSTPVSIKQYPMSQEARLGIKPHIQRLLDQGILVPCQSPWNTPLLPVKKPGTNDYRPVQDLREVNKRVEDIHPTVPNPYNLLSGLPPSHQWYTVLDLKDAFFCLRLHPTSQPLFAFEWRDPEMGISGQLTWTRLPQGFKNSPTLFNEALHRDLAGFRIQHPDLILLQYVDDLLLAATSELDCQQGTRALLQTLGDLGYRASAKKAQICQKQVKYLGYLLKEGQRWLTEARKETVMGQPIPKTPRQLREFLGKAGFCRLFIPGFAEMAAPLYPLTKPGTLFNWGPDQQKAFQEIKQALLTAPALGLPDLTKPFELFVDEKQGYAKGVLTQKLGPWRRPVAYLSKKLDPVAAGWPPCLRMVAAIAVLTKDAGKLTMGQPLVILAPHAVEALVKQPPDRWLSNARMTHYQALLLDTDRVQFGPVVALNPATLLPLPEEGLQHDCLDILAEAHGTRSDLMDQPLPDADHTWYTDGSSFLQEGQRKAGAAVTTETEVIWARALPAGTSAQRAELIALTQALKMAEGKKLNVYTDSRYAFATAHIHGEIYRRRGWLTSEGKEIKNKDEILALLKALFLPKRLSIIHCPGHQKGNSAEARGNRMADQAAREVATRETPETSTLLAGKRTADGSEFEKRTADGSEFESPKKKAKVE

SEQ ID NO: 2346 - protein, 2094 aa, synthetic construct
MPAAKRVKLDGGDKKYSIGLDIGTNSVGWAVITDEYKVPSKKFKVLGNTDRHSIKKNLIGALLFDSGETAEATRLKRTARRRYTRRKNRICYLQEIFSNEMAKVDDSFFHRLEESFLVEEDKKHERHPIFGNIVDEVAYHEKYPTIYHLRKKLVDSTDKADLRLIYLALAHMIKFRGHFLIEGDLNPDNSDVDKLFIQLVQTYNQLFEENPINASGVDAKAILSARLSKSRRLENLIAQLPGEKKNGLFGNLIALSLGLTPNFKSNFDLAEDAKLQLSKDTYDDDLDNLLAQIGDQYADLFLAAKNLSDAILLSDILRVNTEITKAPLSASMIKRYDEHHQDLTLLKALVRQQLPEKYKEIFFDQSKNGYAGYIDGGASQEEFYKFIKPILEKMDGTEELLVKLNREDLLRKQRTFDNGSIPHQIHLGELHAILRRQEDFYPFLKDNREKIEKILTFRIPYYVGPLARGNSRFAWMTRKSEETITPWNFEEVVDKGASAQSFIERMTNFDKNLPNEKVLPKHSLLYEYFTVYNELTKVKYVTEGMRKPAFLSGEQKKAIVDLLFKTNRKVTVKQLKEDYFKKIECFDSVEISGVEDRFNASLGTYHDLLKIIKDKDFLDNEENEDILEDIVLTLTLFEDREMIEERLKTYAHLFDDKVMKQLKRRRYTGWGRLSRKLINGIRDKQSGKTILDFLKSDGFANRNFMQLIHDDSLTFKEDIQKAQVSGQGDSLHEHIANLAGSPAIKKGILQTVKVVDELVKVMGRHKPENIVIEMARENQTTQKGQKNSRERMKRIEEGIKELGSQILKEHPVENTQLQNEKLYLYYLQNGRDMYVDQELDINRLSDYDVDHIVPQSFLKDDSIDNKVLTRSDKARGKSDNVPSEEVVKKMKNYWRQLLNAKLITQRKFDNLTKAERGGLSELDKAGFIKRQLVETRQITKHVAQILDSRMNTKYDENDKLIREVKVITLKSKLVSDFRKDFQFYKVREINNYHHAHDAYLNAVVGTALIKKYPKLESEFVYGDYKVYDVRKMIAKSEQEIGKATAKYFFYSNIMNFFKTEITLANGEIRKRPLIETNGETGEIVWDKGRDFATVRKVLSMPQVNIVKKTEVQTGGFSKESILPKRNSDKLIARKKDWDPKKYGGFDSPTVAYSVLVVAKVEKGKSKKLKSVKELLGITIMERSSFEKNPIDFLEAKGYKEVKKDLIIKLPKYSLFELENGRKRMLASAGELQKGNELALPSKYVNFLYLASHYEKLKGSPEDNEQKQLFVEQHKHYLDEIIEQISEFSKRVILADANLDKVLSAYNKHRDKPIREQAENIIHLFTLTNLGAPAAFKYFDTTIDRKRYTSTKEVLDATLIHQSITGLYETRIDLSQLGGDGGGGGGSSPAPGGTLNIEDEYRLHETSKEPDVSLGSTWLSDFPQAWAETGGMGLAVRQAPLIIPLKATSTPVSIKQYPMSQEARLGIKPHIQRLLDQGILVPCQSPWNTPLLPVKKPGTNDYRPVQDLREVNKRVEDIHPTVPNPYNLLSGLPPSHQWYTVLDLKDAFFCLRLHPTSQPLFAFEWRDPEMGISGQLTWTRLPQGFKNSPTLFNEALHRDLAGFRIQHPDLILLQYVDDLLLAATSELDCQQGTRALLQTLGDLGYRASAKKAQICQKQVKYLGYLLKEGQRWLTEARKETVMGQPIPKTPRQLREFLGKAGFCRLFIPGFAEMAAPLYPLTKPGTLFNWGPDQQKAFQEIKQALLTAPALGLPDLTKPFELFVDEKQGYAKGVLTQKLGPWRRPVAYLSKKLDPVAAGWPPCLRMVAAIAVLTKDAGKLTMGQPLVILAPHAVEALVKQPPDRWLSNARMTHYQALLLDTDRVQFGPVVALNPATLLPLPEEGLQHDCLDILAEAHGTRSDLMDQPLPDADHTWYTDGSSFLQEGQRKAGAAVTTETEVIWARALPAGTSAQRAELIALTQALKMAEGKKLNVYTDSRYAFATAHIHGEIYRRRGWLTSEGKEIKNKDEILALLKALFLPKRLSIIHCPGHQKGNSAEARGNRMADQAAREVATRETPETSTLLAGKRTADGSEFEKRTADGSEFESPKKKAKVE

SEQ ID NO: 2347 - protein, 2096 aa, synthetic construct
MPAAKRVKLDGGDKKYSIGLDIGTNSVGWAVITDEYKVPSKKFKVLGNTDRHSIKKNLIGALLFDSGETAEATRLKRTARRRYTRRKNRICYLQEIFSNEMAKVDDSFFHRLEESFLVEEDKKHERHPIFGNIVDEVAYHEKYPTIYHLRKKLVDSTDKADLRLIYLALAHMIKFRGHFLIEGDLNPDNSDVDKLFIQLVQTYNQLFEENPINASGVDAKAILSARLSKSRRLENLIAQLPGEKKNGLFGNLIALSLGLTPNFKSNFDLAEDAKLQLSKDTYDDDLDNLLAQIGDQYADLFLAAKNLSDAILLSDILRVNTEITKAPLSASMIKRYDEHHQDLTLLKALVRQQLPEKYKEIFFDQSKNGYAGYIDGGASQEEFYKFIKPILEKMDGTEELLVKLNREDLLRKQRTFDNGSIPHQIHLGELHAILRRQEDFYPFLKDNREKIEKILTFRIPYYVGPLARGNSRFAWMTRKSEETITPWNFEEVVDKGASAQSFIERMTNFDKNLPNEKVLPKHSLLYEYFTVYNELTKVKYVTEGMRKPAFLSGEQKKAIVDLLFKTNRKVTVKQLKEDYFKKIECFDSVEISGVEDRFNASLGTYHDLLKIIKDKDFLDNEENEDILEDIVLTLTLFEDREMIEERLKTYAHLFDDKVMKQLKRRRYTGWGRLSRKLINGIRDKQSGKTILDFLKSDGFANRNFMQLIHDDSLTFKEDIQKAQVSGQGDSLHEHIANLAGSPAIKKGILQTVKVVDELVKVMGRHKPENIVIEMARENQTTQKGQKNSRERMKRIEEGIKELGSQILKEHPVENTQLQNEKLYLYYLQNGRDMYVDQELDINRLSDYDVDHIVPQSFLKDDSIDNKVLTRSDKARGKSDNVPSEEVVKKMKNYWRQLLNAKLITQRKFDNLTKAERGGLSELDKAGFIKRQLVETRQITKHVAQILDSRMNTKYDENDKLIREVKVITLKSKLVSDFRKDFQFYKVREINNYHHAHDAYLNAVVGTALIKKYPKLESEFVYGDYKVYDVRKMIAKSEQEIGKATAKYFFYSNIMNFFKTEITLANGEIRKRPLIETNGETGEIVWDKGRDFATVRKVLSMPQVNIVKKTEVQTGGFSKESILPKRNSDKLIARKKDWDPKKYGGFDSPTVAYSVLVVAKVEKGKSKKLKSVKELLGITIMERSSFEKNPIDFLEAKGYKEVKKDLIIKLPKYSLFELENGRKRMLASAGELQKGNELALPSKYVNFLYLASHYEKLKGSPEDNEQKQLFVEQHKHYLDEIIEQISEFSKRVILADANLDKVLSAYNKHRDKPIREQAENIIHLFTLTNLGAPAAFKYFDTTIDRKRYTSTKEVLDATLIHQSITGLYETRIDLSQLGGDGGPAPEAAAKGSSGGTLNIEDEYRLHETSKEPDVSLGSTWLSDFPQAWAETGGMGLAVRQAPLIIPLKATSTPVSIKQYPMSQEARLGIKPHIQRLLDQGILVPCQSPWNTPLLPVKKPGTNDYRPVQDLREVNKRVEDIHPTVPNPYNLLSGLPPSHQWYTVLDLKDAFFCLRLHPTSQPLFAFEWRDPEMGISGQLTWTRLPQGFKNSPTLFNEALHRDLAGFRIQHPDLILLQYVDDLLLAATSELDCQQGTRALLQTLGDLGYRASAKKAQICQKQVKYLGYLLKEGQRWLTEARKETVMGQPIPKTPRQLREFLGKAGFCRLFIPGFAEMAAPLYPLTKPGTLFNWGPDQQKAFQEIKQALLTAPALGLPDLTKPFELFVDEKQGYAKGVLTQKLGPWRRPVAYLSKKLDPVAAGWPPCLRMVAAIAVLTKDAGKLTMGQPLVILAPHAVEALVKQPPDRWLSNARMTHYQALLLDTDRVQFGPVVALNPATLLPLPEEGLQHDCLDILAEAHGTRSDLMDQPLPDADHTWYTDGSSFLQEGQRKAGAAVTTETEVIWARALPAGTSAQRAELIALTQALKMAEGKKLNVYTDSRYAFATAHIHGEIYRRRGWLTSEGKEIKNKDEILALLKALFLPKRLSIIHCPGHQKGNSAEARGNRMADQAAREVATRETPETSTLLAGKRTADGSEFEKRTADGSEFESPKKKAKVE

SEQ ID NO: 2348 - protein, 2093 aa, synthetic construct
MPAAKRVKLDGGDKKYSIGLDIGTNSVGWAVITDEYKVPSKKFKVLGNTDRHSIKKNLIGALLFDSGETAEATRLKRTARRRYTRRKNRICYLQEIFSNEMAKVDDSFFHRLEESFLVEEDKKHERHPIFGNIVDEVAYHEKYPTIYHLRKKLVDSTDKADLRLIYLALAHMIKFRGHFLIEGDLNPDNSDVDKLFIQLVQTYNQLFEENPINASGVDAKAILSARLSKSRRLENLIAQLPGEKKNGLFGNLIALSLGLTPNFKSNFDLAEDAKLQLSKDTYDDDLDNLLAQIGDQYADLFLAAKNLSDAILLSDILRVNTEITKAPLSASMIKRYDEHHQDLTLLKALVRQQLPEKYKEIFFDQSKNGYAGYIDGGASQEEFYKFIKPILEKMDGTEELLVKLNREDLLRKQRTFDNGSIPHQIHLGELHAILRRQEDFYPFLKDNREKIEKILTFRIPYYVGPLARGNSRFAWMTRKSEETITPWNFEEVVDKGASAQSFIERMTNFDKNLPNEKVLPKHSLLYEYFTVYNELTKVKYVTEGMRKPAFLSGEQKKAIVDLLFKTNRKVTVKQLKEDYFKKIECFDSVEISGVEDRFNASLGTYHDLLKIIKDKDFLDNEENEDILEDIVLTLTLFEDREMIEERLKTYAHLFDDKVMKQLKRRRYTGWGRLSRKLINGIRDKQSGKTILDFLKSDGFANRNFMQLIHDDSLTFKEDIQKAQVSGQGDSLHEHIANLAGSPAIKKGILQTVKVVDELVKVMGRHKPENIVIEMARENQTTQKGQKNSRERMKRIEEGIKELGSQILKEHPVENTQLQNEKLYLYYLQNGRDMYVDQELDINRLSDYDVDHIVPQSFLKDDSIDNKVLTRSDKARGKSDNVPSEEVVKKMKNYWRQLLNAKLITQRKFDNLTKAERGGLSELDKAGFIKRQLVETRQITKHVAQILDSRMNTKYDENDKLIREVKVITLKSKLVSDFRKDFQFYKVREINNYHHAHDAYLNAVVGTALIKKYPKLESEFVYGDYKVYDVRKMIAKSEQEIGKATAKYFFYSNIMNFFKTEITLANGEIRKRPLIETNGETGEIVWDKGRDFATVRKVLSMPQVNIVKKTEVQTGGFSKESILPKRNSDKLIARKKDWDPKKYGGFDSPTVAYSVLVVAKVEKGKSKKLKSVKELLGITIMERSSFEKNPIDFLEAKGYKEVKKDLIIKLPKYSLFELENGRKRMLASAGELQKGNELALPSKYVNFLYLASHYEKLKGSPEDNEQKQLFVEQHKHYLDEIIEQISEFSKRVILADANLDKVLSAYNKHRDKPIREQAENIIHLFTLTNLGAPAAFKYFDTTIDRKRYTSTKEVLDATLIHQSITGLYETRIDLSQLGGDGGEAAAKGGGGGTLNIEDEYRLHETSKEPDVSLGSTWLSDFPQAWAETGGMGLAVRQAPLIIPLKATSTPVSIKQYPMSQEARLGIKPHIQRLLDQGILVPCQSPWNTPLLPVKKPGTNDYRPVQDLREVNKRVEDIHPTVPNPYNLLSGLPPSHQWYTVLDLKDAFFCLRLHPTSQPLFAFEWRDPEMGISGQLTWTRLPQGFKNSPTLFNEALHRDLAGFRIQHPDLILLQYVDDLLLAATSELDCQQGTRALLQTLGDLGYRASAKKAQICQKQVKYLGYLLKEGQRWLTEARKETVMGQPIPKTPRQLREFLGKAGFCRLFIPGFAEMAAPLYPLTKPGTLFNWGPDQQKAFQEIKQALLTAPALGLPDLTKPFELFVDEKQGYAKGVLTQKLGPWRRPVAYLSKKLDPVAAGWPPCLRMVAAIAVLTKDAGKLTMGQPLVILAPHAVEALVKQPPDRWLSNARMTHYQALLLDTDRVQFGPVVALNPATLLPLPEEGLQHDCLDILAEAHGTRSDLMDQPLPDADHTWYTDGSSFLQEGQRKAGAAVTTETEVIWARALPAGTSAQRAELIALTQALKMAEGKKLNVYTDSRYAFATAHIHGEIYRRRGWLTSEGKEIKNKDEILALLKALFLPKRLSIIHCPGHQKGNSAEARGNRMADQAAREVATRETPETSTLLAGKRTADGSEFEKRTADGSEFESPKKKAKVE

SEQ ID NO: 2349 - protein, 2093 aa, synthetic construct
MPAAKRVKLDGGDKKYSIGLDIGTNSVGWAVITDEYKVPSKKFKVLGNTDRHSIKKNLIGALLFDSGETAEATRLKRTARRRYTRRKNRICYLQEIFSNEMAKVDDSFFHRLEESFLVEEDKKHERHPIFGNIVDEVAYHEKYPTIYHLRKKLVDSTDKADLRLIYLALAHMIKFRGHFLIEGDLNPDNSDVDKLFIQLVQTYNQLFEENPINASGVDAKAILSARLSKSRRLENLIAQLPGEKKNGLFGNLIALSLGLTPNFKSNFDLAEDAKLQLSKDTYDDDLDNLLAQIGDQYADLFLAAKNLSDAILLSDILRVNTEITKAPLSASMIKRYDEHHQDLTLLKALVRQQLPEKYKEIFFDQSKNGYAGYIDGGASQEEFYKFIKPILEKMDGTEELLVKLNREDLLRKQRTFDNGSIPHQIHLGELHAILRRQEDFYPFLKDNREKIEKILTFRIPYYVGPLARGNSRFAWMTRKSEETITPWNFEEVVDKGASAQSFIERMTNFDKNLPNEKVLPKHSLLYEYFTVYNELTKVKYVTEGMRKPAFLSGEQKKAIVDLLFKTNRKVTVKQLKEDYFKKIECFDSVEISGVEDRFNASLGTYHDLLKIIKDKDFLDNEENEDILEDIVLTLTLFEDREMIEERLKTYAHLFDDKVMKQLKRRRYTGWGRLSRKLINGIRDKQSGKTILDFLKSDGFANRNFMQLIHDDSLTFKEDIQKAQVSGQGDSLHEHIANLAGSPAIKKGILQTVKVVDELVKVMGRHKPENIVIEMARENQTTQKGQKNSRERMKRIEEGIKELGSQILKEHPVENTQLQNEKLYLYYLQNGRDMYVDQELDINRLSDYDVDHIVPQSFLKDDSIDNKVLTRSDKARGKSDNVPSEEVVKKMKNYWRQLLNAKLITQRKFDNLTKAERGGLSELDKAGFIKRQLVETRQITKHVAQILDSRMNTKYDENDKLIREVKVITLKSKLVSDFRKDFQFYKVREINNYHHAHDAYLNAVVGTALIKKYPKLESEFVYGDYKVYDVRKMIAKSEQEIGKATAKYFFYSNIMNFFKTEITLANGEIRKRPLIETNGETGEIVWDKGRDFATVRKVLSMPQVNIVKKTEVQTGGFSKESILPKRNSDKLIARKKDWDPKKYGGFDSPTVAYSVLVVAKVEKGKSKKLKSVKELLGITIMERSSFEKNPIDFLEAKGYKEVKKDLIIKLPKYSLFELENGRKRMLASAGELQKGNELALPSKYVNFLYLASHYEKLKGSPEDNEQKQLFVEQHKHYLDEIIEQISEFSKRVILADANLDKVLSAYNKHRDKPIREQAENIIHLFTLTNLGAPAAFKYFDTTIDRKRYTSTKEVLDATLIHQSITGLYETRIDLSQLGGDGGGGGGGGGGGGTLNIEDEYRLHETSKEPDVSLGSTWLSDFPQAWAETGGMGLAVRQAPLIIPLKATSTPVSIKQYPMSQEARLGIKPHIQRLLDQGILVPCQSPWNTPLLPVKKPGTNDYRPVQDLREVNKRVEDIHPTVPNPYNLLSGLPPSHQWYTVLDLKDAFFCLRLHPTSQPLFAFEWRDPEMGISGQLTWTRLPQGFKNSPTLFNEALHRDLAGFRIQHPDLILLQYVDDLLLAATSELDCQQGTRALLQTLGDLGYRASAKKAQICQKQVKYLGYLLKEGQRWLTEARKETVMGQPIPKTPRQLREFLGKAGFCRLFIPGFAEMAAPLYPLTKPGTLFNWGPDQQKAFQEIKQALLTAPALGLPDLTKPFELFVDEKQGYAKGVLTQKLGPWRRPVAYLSKKLDPVAAGWPPCLRMVAAIAVLTKDAGKLTMGQPLVILAPHAVEALVKQPPDRWLSNARMTHYQALLLDTDRVQFGPVVALNPATLLPLPEEGLQHDCLDILAEAHGTRSDLMDQPLPDADHTWYTDGSSFLQEGQRKAGAAVTTETEVIWARALPAGTSAQRAELIALTQALKMAEGKKLNVYTDSRYAFATAHIHGEIYRRRGWLTSEGKEIKNKDEILALLKALFLPKRLSIIHCPGHQKGNSAEARGNRMADQAAREVATRETPETSTLLAGKRTADGSEFEKRTADGSEFESPKKKAKVE

SEQ ID NO: 2350 - protein, 2093 aa, synthetic construct
MPAAKRVKLDGGDKKYSIGLDIGTNSVGWAVITDEYKVPSKKFKVLGNTDRHSIKKNLIGALLFDSGETAEATRLKRTARRRYTRRKNRICYLQEIFSNEMAKVDDSFFHRLEESFLVEEDKKHERHPIFGNIVDEVAYHEKYPTIYHLRKKLVDSTDKADLRLIYLALAHMIKFRGHFLIEGDLNPDNSDVDKLFIQLVQTYNQLFEENPINASGVDAKAILSARLSKSRRLENLIAQLPGEKKNGLFGNLIALSLGLTPNFKSNFDLAEDAKLQLSKDTYDDDLDNLLAQIGDQYADLFLAAKNLSDAILLSDILRVNTEITKAPLSASMIKRYDEHHQDLTLLKALVRQQLPEKYKEIFFDQSKNGYAGYIDGGASQEEFYKFIKPILEKMDGTEELLVKLNREDLLRKQRTFDNGSIPHQIHLGELHAILRRQEDFYPFLKDNREKIEKILTFRIPYYVGPLARGNSRFAWMTRKSEETITPWNFEEVVDKGASAQSFIERMTNFDKNLPNEKVLPKHSLLYEYFTVYNELTKVKYVTEGMRKPAFLSGEQKKAIVDLLFKTNRKVTVKQLKEDYFKKIECFDSVEISGVEDRFNASLGTYHDLLKIIKDKDFLDNEENEDILEDIVLTLTLFEDREMIEERLKTYAHLFDDKVMKQLKRRRYTGWGRLSRKLINGIRDKQSGKTILDFLKSDGFANRNFMQLIHDDSLTFKEDIQKAQVSGQGDSLHEHIANLAGSPAIKKGILQTVKVVDELVKVMGRHKPENIVIEMARENQTTQKGQKNSRERMKRIEEGIKELGSQILKEHPVENTQLQNEKLYLYYLQNGRDMYVDQELDINRLSDYDVDHIVPQSFLKDDSIDNKVLTRSDKARGKSDNVPSEEVVKKMKNYWRQLLNAKLITQRKFDNLTKAERGGLSELDKAGFIKRQLVETRQITKHVAQILDSRMNTKYDENDKLIREVKVITLKSKLVSDFRKDFQFYKVREINNYHHAHDAYLNAVVGTALIKKYPKLESEFVYGDYKVYDVRKMIAKSEQEIGKATAKYFFYSNIMNFFKTEITLANGEIRKRPLIETNGETGEIVWDKGRDFATVRKVLSMPQVNIVKKTEVQTGGFSKESILPKRNSDKLIARKKDWDPKKYGGFDSPTVAYSVLVVAKVEKGKSKKLKSVKELLGITIMERSSFEKNPIDFLEAKGYKEVKKDLIIKLPKYSLFELENGRKRMLASAGELQKGNELALPSKYVNFLYLASHYEKLKGSPEDNEQKQLFVEQHKHYLDEIIEQISEFSKRVILADANLDKVLSAYNKHRDKPIREQAENIIHLFTLTNLGAPAAFKYFDTTIDRKRYTSTKEVLDATLIHQSITGLYETRIDLSQLGGDGGEAAAKGSSGGTLNIEDEYRLHETSKEPDVSLGSTWLSDFPQAWAETGGMGLAVRQAPLIIPLKATSTPVSIKQYPMSQEARLGIKPHIQRLLDQGILVPCQSPWNTPLLPVKKPGTNDYRPVQDLREVNKRVEDIHPTVPNPYNLLSGLPPSHQWYTVLDLKDAFFCLRLHPTSQPLFAFEWRDPEMGISGQLTWTRLPQGFKNSPTLFNEALHRDLAGFRIQHPDLILLQYVDDLLLAATSELDCQQGTRALLQTLGDLGYRASAKKAQICQKQVKYLGYLLKEGQRWLTEARKETVMGQPIPKTPRQLREFLGKAGFCRLFIPGFAEMAAPLYPLTKPGTLFNWGPDQQKAFQEIKQALLTAPALGLPDLTKPFELFVDEKQGYAKGVLTQKLGPWRRPVAYLSKKLDPVAAGWPPCLRMVAAIAVLTKDAGKLTMGQPLVILAPHAVEALVKQPPDRWLSNARMTHYQALLLDTDRVQFGPVVALNPATLLPLPEEGLQHDCLDILAEAHGTRSDLMDQPLPDADHTWYTDGSSFLQEGQRKAGAAVTTETEVIWARALPAGTSAQRAELIALTQALKMAEGKKLNVYTDSRYAFATAHIHGEIYRRRGWLTSEGKEIKNKDEILALLKALFLPKRLSIIHCPGHQKGNSAEARGNRMADQAAREVATRETPETSTLLAGKRTADGSEFEKRTADGSEFESPKKKAKVE

SEQ ID NO: 2351 - protein, 2096 aa, synthetic construct
MPAAKRVKLDGGDKKYSIGLDIGTNSVGWAVITDEYKVPSKKFKVLGNTDRHSIKKNLIGALLFDSGETAEATRLKRTARRRYTRRKNRICYLQEIFSNEMAKVDDSFFHRLEESFLVEEDKKHERHPIFGNIVDEVAYHEKYPTIYHLRKKLVDSTDKADLRLIYLALAHMIKFRGHFLIEGDLNPDNSDVDKLFIQLVQTYNQLFEENPINASGVDAKAILSARLSKSRRLENLIAQLPGEKKNGLFGNLIALSLGLTPNFKSNFDLAEDAKLQLSKDTYDDDLDNLLAQIGDQYADLFLAAKNLSDAILLSDILRVNTEITKAPLSASMIKRYDEHHQDLTLLKALVRQQLPEKYKEIFFDQSKNGYAGYIDGGASQEEFYKFIKPILEKMDGTEELLVKLNREDLLRKQRTFDNGSIPHQIHLGELHAILRRQEDFYPFLKDNREKIEKILTFRIPYYVGPLARGNSRFAWMTRKSEETITPWNFEEVVDKGASAQSFIERMTNFDKNLPNEKVLPKHSLLYEYFTVYNELTKVKYVTEGMRKPAFLSGEQKKAIVDLLFKTNRKVTVKQLKEDYFKKIECFDSVEISGVEDRFNASLGTYHDLLKIIKDKDFLDNEENEDILEDIVLTLTLFEDREMIEERLKTYAHLFDDKVMKQLKRRRYTGWGRLSRKLINGIRDKQSGKTILDFLKSDGFANRNFMQLIHDDSLTFKEDIQKAQVSGQGDSLHEHIANLAGSPAIKKGILQTVKVVDELVKVMGRHKPENIVIEMARENQTTQKGQKNSRERMKRIEEGIKELGSQILKEHPVENTQLQNEKLYLYYLQNGRDMYVDQELDINRLSDYDVDHIVPQSFLKDDSIDNKVLTRSDKARGKSDNVPSEEVVKKMKNYWRQLLNAKLITQRKFDNLTKAERGGLSELDKAGFIKRQLVETRQITKHVAQILDSRMNTKYDENDKLIREVKVITLKSKLVSDFRKDFQFYKVREINNYHHAHDAYLNAVVGTALIKKYPKLESEFVYGDYKVYDVRKMIAKSEQEIGKATAKYFFYSNIMNFFKTEITLANGEIRKRPLIETNGETGEIVWDKGRDFATVRKVLSMPQVNIVKKTEVQTGGFSKESILPKRNSDKLIARKKDWDPKKYGGFDSPTVAYSVLVVAKVEKGKSKKLKSVKELLGITIMERSSFEKNPIDFLEAKGYKEVKKDLIIKLPKYSLFELENGRKRMLASAGELQKGNELALPSKYVNFLYLASHYEKLKGSPEDNEQKQLFVEQHKHYLDEIIEQISEFSKRVILADANLDKVLSAYNKHRDKPIREQAENIIHLFTLTNLGAPAAFKYFDTTIDRKRYTSTKEVLDATLIHQSITGLYETRIDLSQLGGDGGGGGGGSEAAAKGGTLNIEDEYRLHETSKEPDVSLGSTWLSDFPQAWAETGGMGLAVRQAPLIIPLKATSTPVSIKQYPMSQEARLGIKPHIQRLLDQGILVPCQSPWNTPLLPVKKPGTNDYRPVQDLREVNKRVEDIHPTVPNPYNLLSGLPPSHQWYTVLDLKDAFFCLRLHPTSQPLFAFEWRDPEMGISGQLTWTRLPQGFKNSPTLFNEALHRDLAGFRIQHPDLILLQYVDDLLLAATSELDCQQGTRALLQTLGDLGYRASAKKAQICQKQVKYLGYLLKEGQRWLTEARKETVMGQPIPKTPRQLREFLGKAGFCRLFIPGFAEMAAPLYPLTKPGTLFNWGPDQQKAFQEIKQALLTAPALGLPDLTKPFELFVDEKQGYAKGVLTQKLGPWRRPVAYLSKKLDPVAAGWPPCLRMVAAIAVLTKDAGKLTMGQPLVILAPHAVEALVKQPPDRWLSNARMTHYQALLLDTDRVQFGPVVALNPATLLPLPEEGLQHDCLDILAEAHGTRSDLMDQPLPDADHTWYTDGSSFLQEGQRKAGAAVTTETEVIWARALPAGTSAQRAELIALTQALKMAEGKKLNVYTDSRYAFATAHIHGEIYRRRGWLTSEGKEIKNKDEILALLKALFLPKRLSIIHCPGHQKGNSAEARGNRMADQAAREVATRETPETSTLLAGKRTADGSEFEKRTADGSEFESPKKKAKVE

SEQ ID NO: 2352 - protein, 2096 aa, synthetic construct
MPAAKRVKLDGGDKKYSIGLDIGTNSVGWAVITDEYKVPSKKFKVLGNTDRHSIKKNLIGALLFDSGETAEATRLKRTARRRYTRRKNRICYLQEIFSNEMAKVDDSFFHRLEESFLVEEDKKHERHPIFGNIVDEVAYHEKYPTIYHLRKKLVDSTDKADLRLIYLALAHMIKFRGHFLIEGDLNPDNSDVDKLFIQLVQTYNQLFEENPINASGVDAKAILSARLSKSRRLENLIAQLPGEKKNGLFGNLIALSLGLTPNFKSNFDLAEDAKLQLSKDTYDDDLDNLLAQIGDQYADLFLAAKNLSDAILLSDILRVNTEITKAPLSASMIKRYDEHHQDLTLLKALVRQQLPEKYKEIFFDQSKNGYAGYIDGGASQEEFYKFIKPILEKMDGTEELLVKLNREDLLRKQRTFDNGSIPHQIHLGELHAILRRQEDFYPFLKDNREKIEKILTFRIPYYVGPLARGNSRFAWMTRKSEETITPWNFEEVVDKGASAQSFIERMTNFDKNLPNEKVLPKHSLLYEYFTVYNELTKVKYVTEGMRKPAFLSGEQKKAIVDLLFKTNRKVTVKQLKEDYFKKIECFDSVEISGVEDRFNASLGTYHDLLKIIKDKDFLDNEENEDILEDIVLTLTLFEDREMIEERLKTYAHLFDDKVMKQLKRRRYTGWGRLSRKLINGIRDKQSGKTILDFLKSDGFANRNFMQLIHDDSLTFKEDIQKAQVSGQGDSLHEHIANLAGSPAIKKGILQTVKVVDELVKVMGRHKPENIVIEMARENQTTQKGQKNSRERMKRIEEGIKELGSQILKEHPVENTQLQNEKLYLYYLQNGRDMYVDQELDINRLSDYDVDHIVPQSFLKDDSIDNKVLTRSDKARGKSDNVPSEEVVKKMKNYWRQLLNAKLITQRKFDNLTKAERGGLSELDKAGFIKRQLVETRQITKHVAQILDSRMNTKYDENDKLIREVKVITLKSKLVSDFRKDFQFYKVREINNYHHAHDAYLNAVVGTALIKKYPKLESEFVYGDYKVYDVRKMIAKSEQEIGKATAKYFFYSNIMNFFKTEITLANGEIRKRPLIETNGETGEIVWDKGRDFATVRKVLSMPQVNIVKKTEVQTGGFSKESILPKRNSDKLIARKKDWDPKKYGGFDSPTVAYSVLVVAKVEKGKSKKLKSVKELLGITIMERSSFEKNPIDFLEAKGYKEVKKDLIIKLPKYSLFELENGRKRMLASAGELQKGNELALPSKYVNFLYLASHYEKLKGSPEDNEQKQLFVEQHKHYLDEIIEQISEFSKRVILADANLDKVLSAYNKHRDKPIREQAENIIHLFTLTNLGAPAAFKYFDTTIDRKRYTSTKEVLDATLIHQSITGLYETRIDLSQLGGDGGGSSEAAAKGGSGGTLNIEDEYRLHETSKEPDVSLGSTWLSDFPQAWAETGGMGLAVRQAPLIIPLKATSTPVSIKQYPMSQEARLGIKPHIQRLLDQGILVPCQSPWNTPLLPVKKPGTNDYRPVQDLREVNKRVEDIHPTVPNPYNLLSGLPPSHQWYTVLDLKDAFFCLRLHPTSQPLFAFEWRDPEMGISGQLTWTRLPQGFKNSPTLFNEALHRDLAGFRIQHPDLILLQYVDDLLLAATSELDCQQGTRALLQTLGDLGYRASAKKAQICQKQVKYLGYLLKEGQRWLTEARKETVMGQPIPKTPRQLREFLGKAGFCRLFIPGFAEMAAPLYPLTKPGTLFNWGPDQQKAFQEIKQALLTAPALGLPDLTKPFELFVDEKQGYAKGVLTQKLGPWRRPVAYLSKKLDPVAAGWPPCLRMVAAIAVLTKDAGKLTMGQPLVILAPHAVEALVKQPPDRWLSNARMTHYQALLLDTDRVQFGPVVALNPATLLPLPEEGLQHDCLDILAEAHGTRSDLMDQPLPDADHTWYTDGSSFLQEGQRKAGAAVTTETEVIWARALPAGTSAQRAELIALTQALKMAEGKKLNVYTDSRYAFATAHIHGEIYRRRGWLTSEGKEIKNKDEILALLKALFLPKRLSIIHCPGHQKGNSAEARGNRMADQAAREVATRETPETSTLLAGKRTADGSEFEKRTADGSEFESPKKKAKVE

SEQ ID NO: 2353 - protein, 2091 aa, synthetic construct
MPAAKRVKLDGGDKKYSIGLDIGTNSVGWAVITDEYKVPSKKFKVLGNTDRHSIKKNLIGALLFDSGETAEATRLKRTARRRYTRRKNRICYLQEIFSNEMAKVDDSFFHRLEESFLVEEDKKHERHPIFGNIVDEVAYHEKYPTIYHLRKKLVDSTDKADLRLIYLALAHMIKFRGHFLIEGDLNPDNSDVDKLFIQLVQTYNQLFEENPINASGVDAKAILSARLSKSRRLENLIAQLPGEKKNGLFGNLIALSLGLTPNFKSNFDLAEDAKLQLSKDTYDDDLDNLLAQIGDQYADLFLAAKNLSDAILLSDILRVNTEITKAPLSASMIKRYDEHHQDLTLLKALVRQQLPEKYKEIFFDQSKNGYAGYIDGGASQEEFYKFIKPILEKMDGTEELLVKLNREDLLRKQRTFDNGSIPHQIHLGELHAILRRQEDFYPFLKDNREKIEKILTFRIPYYVGPLARGNSRFAWMTRKSEETITPWNFEEVVDKGASAQSFIERMTNFDKNLPNEKVLPKHSLLYEYFTVYNELTKVKYVTEGMRKPAFLSGEQKKAIVDLLFKTNRKVTVKQLKEDYFKKIECFDSVEISGVEDRFNASLGTYHDLLKIIKDKDFLDNEENEDILEDIVLTLTLFEDREMIEERLKTYAHLFDDKVMKQLKRRRYTGWGRLSRKLINGIRDKQSGKTILDFLKSDGFANRNFMQLIHDDSLTFKEDIQKAQVSGQGDSLHEHIANLAGSPAIKKGILQTVKVVDELVKVMGRHKPENIVIEMARENQTTQKGQKNSRERMKRIEEGIKELGSQILKEHPVENTQLQNEKLYLYYLQNGRDMYVDQELDINRLSDYDVDHIVPQSFLKDDSIDNKVLTRSDKARGKSDNVPSEEVVKKMKNYWRQLLNAKLITQRKFDNLTKAERGGLSELDKAGFIKRQLVETRQITKHVAQILDSRMNTKYDENDKLIREVKVITLKSKLVSDFRKDFQFYKVREINNYHHAHDAYLNAVVGTALIKKYPKLESEFVYGDYKVYDVRKMIAKSEQEIGKATAKYFFYSNIMNFFKTEITLANGEIRKRPLIETNGETGEIVWDKGRDFATVRKVLSMPQVNIVKKTEVQTGGFSKESILPKRNSDKLIARKKDWDPKKYGGFDSPTVAYSVLVVAKVEKGKSKKLKSVKELLGITIMERSSFEKNPIDFLEAKGYKEVKKDLIIKLPKYSLFELENGRKRMLASAGELQKGNELALPSKYVNFLYLASHYEKLKGSPEDNEQKQLFVEQHKHYLDEIIEQISEFSKRVILADANLDKVLSAYNKHRDKPIREQAENIIHLFTLTNLGAPAAFKYFDTTIDRKRYTSTKEVLDATLIHQSITGLYETRIDLSQLGGDGGGGSGSSGGTLNIEDEYRLHETSKEPDVSLGSTWLSDFPQAWAETGGMGLAVRQAPLIIPLKATSTPVSIKQYPMSQEARLGIKPHIQRLLDQGILVPCQSPWNTPLLPVKKPGTNDYRPVQDLREVNKRVEDIHPTVPNPYNLLSGLPPSHQWYTVLDLKDAFFCLRLHPTSQPLFAFEWRDPEMGISGQLTWTRLPQGFKNSPTLFNEALHRDLAGFRIQHPDLILLQYVDDLLLAATSELDCQQGTRALLQTLGDLGYRASAKKAQICQKQVKYLGYLLKEGQRWLTEARKETVMGQPIPKTPRQLREFLGKAGFCRLFIPGFAEMAAPLYPLTKPGTLFNWGPDQQKAFQEIKQALLTAPALGLPDLTKPFELFVDEKQGYAKGVLTQKLGPWRRPVAYLSKKLDPVAAGWPPCLRMVAAIAVLTKDAGKLTMGQPLVILAPHAVEALVKQPPDRWLSNARMTHYQALLLDTDRVQFGPVVALNPATLLPLPEEGLQHDCLDILAEAHGTRSDLMDQPLPDADHTWYTDGSSFLQEGQRKAGAAVTTETEVIWARALPAGTSAQRAELIALTQALKMAEGKKLNVYTDSRYAFATAHIHGEIYRRRGWLTSEGKEIKNKDEILALLKALFLPKRLSIIHCPGHQKGNSAEARGNRMADQAAREVATRETPETSTLLAGKRTADGSEFEKRTADGSEFESPKKKAKVE

SEQ ID NO: 2354 - protein, 2091 aa, synthetic construct
MPAAKRVKLDGGDKKYSIGLDIGTNSVGWAVITDEYKVPSKKFKVLGNTDRHSIKKNLIGALLFDSGETAEATRLKRTARRRYTRRKNRICYLQEIFSNEMAKVDDSFFHRLEESFLVEEDKKHERHPIFGNIVDEVAYHEKYPTIYHLRKKLVDSTDKADLRLIYLALAHMIKFRGHFLIEGDLNPDNSDVDKLFIQLVQTYNQLFEENPINASGVDAKAILSARLSKSRRLENLIAQLPGEKKNGLFGNLIALSLGLTPNFKSNFDLAEDAKLQLSKDTYDDDLDNLLAQIGDQYADLFLAAKNLSDAILLSDILRVNTEITKAPLSASMIKRYDEHHQDLTLLKALVRQQLPEKYKEIFFDQSKNGYAGYIDGGASQEEFYKFIKPILEKMDGTEELLVKLNREDLLRKQRTFDNGSIPHQIHLGELHAILRRQEDFYPFLKDNREKIEKILTFRIPYYVGPLARGNSRFAWMTRKSEETITPWNFEEVVDKGASAQSFIERMTNFDKNLPNEKVLPKHSLLYEYFTVYNELTKVKYVTEGMRKPAFLSGEQKKAIVDLLFKTNRKVTVKQLKEDYFKKIECFDSVEISGVEDRFNASLGTYHDLLKIIKDKDFLDNEENEDILEDIVLTLTLFEDREMIEERLKTYAHLFDDKVMKQLKRRRYTGWGRLSRKLINGIRDKQSGKTILDFLKSDGFANRNFMQLIHDDSLTFKEDIQKAQVSGQGDSLHEHIANLAGSPAIKKGILQTVKVVDELVKVMGRHKPENIVIEMARENQTTQKGQKNSRERMKRIEEGIKELGSQILKEHPVENTQLQNEKLYLYYLQNGRDMYVDQELDINRLSDYDVDHIVPQSFLKDDSIDNKVLTRSDKARGKSDNVPSEEVVKKMKNYWRQLLNAKLITQRKFDNLTKAERGGLSELDKAGFIKRQLVETRQITKHVAQILDSRMNTKYDENDKLIREVKVITLKSKLVSDFRKDFQFYKVREINNYHHAHDAYLNAVVGTALIKKYPKLESEFVYGDYKVYDVRKMIAKSEQEIGKATAKYFFYSNIMNFFKTEITLANGEIRKRPLIETNGETGEIVWDKGRDFATVRKVLSMPQVNIVKKTEVQTGGFSKESILPKRNSDKLIARKKDWDPKKYGGFDSPTVAYSVLVVAKVEKGKSKKLKSVKELLGITIMERSSFEKNPIDFLEAKGYKEVKKDLIIKLPKYSLFELENGRKRMLASAGELQKGNELALPSKYVNFLYLASHYEKLKGSPEDNEQKQLFVEQHKHYLDEIIEQISEFSKRVILADANLDKVLSAYNKHRDKPIREQAENIIHLFTLTNLGAPAAFKYFDTTIDRKRYTSTKEVLDATLIHQSITGLYETRIDLSQLGGDGGGGGGGGGGTLNIEDEYRLHETSKEPDVSLGSTWLSDFPQAWAETGGMGLAVRQAPLIIPLKATSTPVSIKQYPMSQEARLGIKPHIQRLLDQGILVPCQSPWNTPLLPVKKPGTNDYRPVQDLREVNKRVEDIHPTVPNPYNLLSGLPPSHQWYTVLDLKDAFFCLRLHPTSQPLFAFEWRDPEMGISGQLTWTRLPQGFKNSPTLFNEALHRDLAGFRIQHPDLILLQYVDDLLLAATSELDCQQGTRALLQTLGDLGYRASAKKAQICQKQVKYLGYLLKEGQRWLTEARKETVMGQPIPKTPRQLREFLGKAGFCRLFIPGFAEMAAPLYPLTKPGTLFNWGPDQQKAFQEIKQALLTAPALGLPDLTKPFELFVDEKQGYAKGVLTQKLGPWRRPVAYLSKKLDPVAAGWPPCLRMVAAIAVLTKDAGKLTMGQPLVILAPHAVEALVKQPPDRWLSNARMTHYQALLLDTDRVQFGPVVALNPATLLPLPEEGLQHDCLDILAEAHGTRSDLMDQPLPDADHTWYTDGSSFLQEGQRKAGAAVTTETEVIWARALPAGTSAQRAELIALTQALKMAEGKKLNVYTDSRYAFATAHIHGEIYRRRGWLTSEGKEIKNKDEILALLKALFLPKRLSIIHCPGHQKGNSAEARGNRMADQAAREVATRETPETSTLLAGKRTADGSEFEKRTADGSEFESPKKKAKVE

SEQ ID NO: 2355 - protein, 2096 aa, synthetic construct
MPAAKRVKLDGGDKKYSIGLDIGTNSVGWAVITDEYKVPSKKFKVLGNTDRHSIKKNLIGALLFDSGETAEATRLKRTARRRYTRRKNRICYLQEIFSNEMAKVDDSFFHRLEESFLVEEDKKHERHPIFGNIVDEVAYHEKYPTIYHLRKKLVDSTDKADLRLIYLALAHMIKFRGHFLIEGDLNPDNSDVDKLFIQLVQTYNQLFEENPINASGVDAKAILSARLSKSRRLENLIAQLPGEKKNGLFGNLIALSLGLTPNFKSNFDLAEDAKLQLSKDTYDDDLDNLLAQIGDQYADLFLAAKNLSDAILLSDILRVNTEITKAPLSASMIKRYDEHHQDLTLLKALVRQQLPEKYKEIFFDQSKNGYAGYIDGGASQEEFYKFIKPILEKMDGTEELLVKLNREDLLRKQRTFDNGSIPHQIHLGELHAILRRQEDFYPFLKDNREKIEKILTFRIPYYVGPLARGNSRFAWMTRKSEETITPWNFEEVVDKGASAQSFIERMTNFDKNLPNEKVLPKHSLLYEYFTVYNELTKVKYVTEGMRKPAFLSGEQKKAIVDLLFKTNRKVTVKQLKEDYFKKIECFDSVEISGVEDRFNASLGTYHDLLKIIKDKDFLDNEENEDILEDIVLTLTLFEDREMIEERLKTYAHLFDDKVMKQLKRRRYTGWGRLSRKLINGIRDKQSGKTILDFLKSDGFANRNFMQLIHDDSLTFKEDIQKAQVSGQGDSLHEHIANLAGSPAIKKGILQTVKVVDELVKVMGRHKPENIVIEMARENQTTQKGQKNSRERMKRIEEGIKELGSQILKEHPVENTQLQNEKLYLYYLQNGRDMYVDQELDINRLSDYDVDHIVPQSFLKDDSIDNKVLTRSDKARGKSDNVPSEEVVKKMKNYWRQLLNAKLITQRKFDNLTKAERGGLSELDKAGFIKRQLVETRQITKHVAQILDSRMNTKYDENDKLIREVKVITLKSKLVSDFRKDFQFYKVREINNYHHAHDAYLNAVVGTALIKKYPKLESEFVYGDYKVYDVRKMIAKSEQEIGKATAKYFFYSNIMNFFKTEITLANGEIRKRPLIETNGETGEIVWDKGRDFATVRKVLSMPQVNIVKKTEVQTGGFSKESILPKRNSDKLIARKKDWDPKKYGGFDSPTVAYSVLVVAKVEKGKSKKLKSVKELLGITIMERSSFEKNPIDFLEAKGYKEVKKDLIIKLPKYSLFELENGRKRMLASAGELQKGNELALPSKYVNFLYLASHYEKLKGSPEDNEQKQLFVEQHKHYLDEIIEQISEFSKRVILADANLDKVLSAYNKHRDKPIREQAENIIHLFTLTNLGAPAAFKYFDTTIDRKRYTSTKEVLDATLIHQSITGLYETRIDLSQLGGDGGPAPGSSEAAAKGGTLNIEDEYRLHETSKEPDVSLGSTWLSDFPQAWAETGGMGLAVRQAPLIIPLKATSTPVSIKQYPMSQEARLGIKPHIQRLLDQGILVPCQSPWNTPLLPVKKPGTNDYRPVQDLREVNKRVEDIHPTVPNPYNLLSGLPPSHQWYTVLDLKDAFFCLRLHPTSQPLFAFEWRDPEMGISGQLTWTRLPQGFKNSPTLFNEALHRDLAGFRIQHPDLILLQYVDDLLLAATSELDCQQGTRALLQTLGDLGYRASAKKAQICQKQVKYLGYLLKEGQRWLTEARKETVMGQPIPKTPRQLREFLGKAGFCRLFIPGFAEMAAPLYPLTKPGTLFNWGPDQQKAFQEIKQALLTAPALGLPDLTKPFELFVDEKQGYAKGVLTQKLGPWRRPVAYLSKKLDPVAAGWPPCLRMVAAIAVLTKDAGKLTMGQPLVILAPHAVEALVKQPPDRWLSNARMTHYQALLLDTDRVQFGPVVALNPATLLPLPEEGLQHDCLDILAEAHGTRSDLMDQPLPDADHTWYTDGSSFLQEGQRKAGAAVTTETEVIWARALPAGTSAQRAELIALTQALKMAEGKKLNVYTDSRYAFATAHIHGEIYRRRGWLTSEGKEIKNKDEILALLKALFLPKRLSIIHCPGHQKGNSAEARGNRMADQAAREVATRETPETSTLLAGKRTADGSEFEKRTADGSEFESPKKKAKVE

SEQ ID NO: 2356 - protein, 2093 aa, synthetic construct
MPAAKRVKLDGGDKKYSIGLDIGTNSVGWAVITDEYKVPSKKFKVLGNTDRHSIKKNLIGALLFDSGETAEATRLKRTARRRYTRRKNRICYLQEIFSNEMAKVDDSFFHRLEESFLVEEDKKHERHPIFGNIVDEVAYHEKYPTIYHLRKKLVDSTDKADLRLIYLALAHMIKFRGHFLIEGDLNPDNSDVDKLFIQLVQTYNQLFEENPINASGVDAKAILSARLSKSRRLENLIAQLPGEKKNGLFGNLIALSLGLTPNFKSNFDLAEDAKLQLSKDTYDDDLDNLLAQIGDQYADLFLAAKNLSDAILLSDILRVNTEITKAPLSASMIKRYDEHHQDLTLLKALVRQQLPEKYKEIFFDQSKNGYAGYIDGGASQEEFYKFIKPILEKMDGTEELLVKLNREDLLRKQRTFDNGSIPHQIHLGELHAILRRQEDFYPFLKDNREKIEKILTFRIPYYVGPLARGNSRFAWMTRKSEETITPWNFEEVVDKGASAQSFIERMTNFDKNLPNEKVLPKHSLLYEYFTVYNELTKVKYVTEGMRKPAFLSGEQKKAIVDLLFKTNRKVTVKQLKEDYFKKIECFDSVEISGVEDRFNASLGTYHDLLKIIKDKDFLDNEENEDILEDIVLTLTLFEDREMIEERLKTYAHLFDDKVMKQLKRRRYTGWGRLSRKLINGIRDKQSGKTILDFLKSDGFANRNFMQLIHDDSLTFKEDIQKAQVSGQGDSLHEHIANLAGSPAIKKGILQTVKVVDELVKVMGRHKPENIVIEMARENQTTQKGQKNSRERMKRIEEGIKELGSQILKEHPVENTQLQNEKLYLYYLQNGRDMYVDQELDINRLSDYDVDHIVPQSFLKDDSIDNKVLTRSDKARGKSDNVPSEEVVKKMKNYWRQLLNAKLITQRKFDNLTKAERGGLSELDKAGFIKRQLVETRQITKHVAQILDSRMNTKYDENDKLIREVKVITLKSKLVSDFRKDFQFYKVREINNYHHAHDAYLNAVVGTALIKKYPKLESEFVYGDYKVYDVRKMIAKSEQEIGKATAKYFFYSNIMNFFKTEITLANGEIRKRPLIETNGETGEIVWDKGRDFATVRKVLSMPQVNIVKKTEVQTGGFSKESILPKRNSDKLIARKKDWDPKKYGGFDSPTVAYSVLVVAKVEKGKSKKLKSVKELLGITIMERSSFEKNPIDFLEAKGYKEVKKDLIIKLPKYSLFELENGRKRMLASAGELQKGNELALPSKYVNFLYLASHYEKLKGSPEDNEQKQLFVEQHKHYLDEIIEQISEFSKRVILADANLDKVLSAYNKHRDKPIREQAENIIHLFTLTNLGAPAAFKYFDTTIDRKRYTSTKEVLDATLIHQSITGLYETRIDLSQLGGDGGPAPEAAAKGGTLNIEDEYRLHETSKEPDVSLGSTWLSDFPQAWAETGGMGLAVRQAPLIIPLKATSTPVSIKQYPMSQEARLGIKPHIQRLLDQGILVPCQSPWNTPLLPVKKPGTNDYRPVQDLREVNKRVEDIHPTVPNPYNLLSGLPPSHQWYTVLDLKDAFFCLRLHPTSQPLFAFEWRDPEMGISGQLTWTRLPQGFKNSPTLFNEALHRDLAGFRIQHPDLILLQYVDDLLLAATSELDCQQGTRALLQTLGDLGYRASAKKAQICQKQVKYLGYLLKEGQRWLTEARKETVMGQPIPKTPRQLREFLGKAGFCRLFIPGFAEMAAPLYPLTKPGTLFNWGPDQQKAFQEIKQALLTAPALGLPDLTKPFELFVDEKQGYAKGVLTQKLGPWRRPVAYLSKKLDPVAAGWPPCLRMVAAIAVLTKDAGKLTMGQPLVILAPHAVEALVKQPPDRWLSNARMTHYQALLLDTDRVQFGPVVALNPATLLPLPEEGLQHDCLDILAEAHGTRSDLMDQPLPDADHTWYTDGSSFLQEGQRKAGAAVTTETEVIWARALPAGTSAQRAELIALTQALKMAEGKKLNVYTDSRYAFATAHIHGEIYRRRGWLTSEGKEIKNKDEILALLKALFLPKRLSIIHCPGHQKGNSAEARGNRMADQAAREVATRETPETSTLLAGKRTADGSEFEKRTADGSEFESPKKKAKVE

SEQ ID NO: 2357 - protein, 2096 aa, synthetic construct
MPAAKRVKLDGGDKKYSIGLDIGTNSVGWAVITDEYKVPSKKFKVLGNTDRHSIKKNLIGALLFDSGETAEATRLKRTARRRYTRRKNRICYLQEIFSNEMAKVDDSFFHRLEESFLVEEDKKHERHPIFGNIVDEVAYHEKYPTIYHLRKKLVDSTDKADLRLIYLALAHMIKFRGHFLIEGDLNPDNSDVDKLFIQLVQTYNQLFEENPINASGVDAKAILSARLSKSRRLENLIAQLPGEKKNGLFGNLIALSLGLTPNFKSNFDLAEDAKLQLSKDTYDDDLDNLLAQIGDQYADLFLAAKNLSDAILLSDILRVNTEITKAPLSASMIKRYDEHHQDLTLLKALVRQQLPEKYKEIFFDQSKNGYAGYIDGGASQEEFYKFIKPILEKMDGTEELLVKLNREDLLRKQRTFDNGSIPHQIHLGELHAILRRQEDFYPFLKDNREKIEKILTFRIPYYVGPLARGNSRFAWMTRKSEETITPWNFEEVVDKGASAQSFIERMTNFDKNLPNEKVLPKHSLLYEYFTVYNELTKVKYVTEGMRKPAFLSGEQKKAIVDLLFKTNRKVTVKQLKEDYFKKIECFDSVEISGVEDRFNASLGTYHDLLKIIKDKDFLDNEENEDILEDIVLTLTLFEDREMIEERLKTYAHLFDDKVMKQLKRRRYTGWGRLSRKLINGIRDKQSGKTILDFLKSDGFANRNFMQLIHDDSLTFKEDIQKAQVSGQGDSLHEHIANLAGSPAIKKGILQTVKVVDELVKVMGRHKPENIVIEMARENQTTQKGQKNSRERMKRIEEGIKELGSQILKEHPVENTQLQNEKLYLYYLQNGRDMYVDQELDINRLSDYDVDHIVPQSFLKDDSIDNKVLTRSDKARGKSDNVPSEEVVKKMKNYWRQLLNAKLITQRKFDNLTKAERGGLSELDKAGFIKRQLVETRQITKHVAQILDSRMNTKYDENDKLIREVKVITLKSKLVSDFRKDFQFYKVREINNYHHAHDAYLNAVVGTALIKKYPKLESEFVYGDYKVYDVRKMIAKSEQEIGKATAKYFFYSNIMNFFKTEITLANGEIRKRPLIETNGETGEIVWDKGRDFATVRKVLSMPQVNIVKKTEVQTGGFSKESILPKRNSDKLIARKKDWDPKKYGGFDSPTVAYSVLVVAKVEKGKSKKLKSVKELLGITIMERSSFEKNPIDFLEAKGYKEVKKDLIIKLPKYSLFELENGRKRMLASAGELQKGNELALPSKYVNFLYLASHYEKLKGSPEDNEQKQLFVEQHKHYLDEIIEQISEFSKRVILADANLDKVLSAYNKHRDKPIREQAENIIHLFTLTNLGAPAAFKYFDTTIDRKRYTSTKEVLDATLIHQSITGLYETRIDLSQLGGDGGEAAAKPAPGSSGGTLNIEDEYRLHETSKEPDVSLGSTWLSDFPQAWAETGGMGLAVRQAPLIIPLKATSTPVSIKQYPMSQEARLGIKPHIQRLLDQGILVPCQSPWNTPLLPVKKPGTNDYRPVQDLREVNKRVEDIHPTVPNPYNLLSGLPPSHQWYTVLDLKDAFFCLRLHPTSQPLFAFEWRDPEMGISGQLTWTRLPQGFKNSPTLFNEALHRDLAGFRIQHPDLILLQYVDDLLLAATSELDCQQGTRALLQTLGDLGYRASAKKAQICQKQVKYLGYLLKEGQRWLTEARKETVMGQPIPKTPRQLREFLGKAGFCRLFIPGFAEMAAPLYPLTKPGTLFNWGPDQQKAFQEIKQALLTAPALGLPDLTKPFELFVDEKQGYAKGVLTQKLGPWRRPVAYLSKKLDPVAAGWPPCLRMVAAIAVLTKDAGKLTMGQPLVILAPHAVEALVKQPPDRWLSNARMTHYQALLLDTDRVQFGPVVALNPATLLPLPEEGLQHDCLDILAEAHGTRSDLMDQPLPDADHTWYTDGSSFLQEGQRKAGAAVTTETEVIWARALPAGTSAQRAELIALTQALKMAEGKKLNVYTDSRYAFATAHIHGEIYRRRGWLTSEGKEIKNKDEILALLKALFLPKRLSIIHCPGHQKGNSAEARGNRMADQAAREVATRETPETSTLLAGKRTADGSEFEKRTADGSEFESPKKKAKVE

SEQ ID NO: 2358 - protein, 2096 aa, synthetic construct
MPAAKRVKLDGGDKKYSIGLDIGTNSVGWAVITDEYKVPSKKFKVLGNTDRHSIKKNLIGALLFDSGETAEATRLKRTARRRYTRRKNRICYLQEIFSNEMAKVDDSFFHRLEESFLVEEDKKHERHPIFGNIVDEVAYHEKYPTIYHLRKKLVDSTDKADLRLIYLALAHMIKFRGHFLIEGDLNPDNSDVDKLFIQLVQTYNQLFEENPINASGVDAKAILSARLSKSRRLENLIAQLPGEKKNGLFGNLIALSLGLTPNFKSNFDLAEDAKLQLSKDTYDDDLDNLLAQIGDQYADLFLAAKNLSDAILLSDILRVNTEITKAPLSASMIKRYDEHHQDLTLLKALVRQQLPEKYKEIFFDQSKNGYAGYIDGGASQEEFYKFIKPILEKMDGTEELLVKLNREDLLRKQRTFDNGSIPHQIHLGELHAILRRQEDFYPFLKDNREKIEKILTFRIPYYVGPLARGNSRFAWMTRKSEETITPWNFEEVVDKGASAQSFIERMTNFDKNLPNEKVLPKHSLLYEYFTVYNELTKVKYVTEGMRKPAFLSGEQKKAIVDLLFKTNRKVTVKQLKEDYFKKIECFDSVEISGVEDRFNASLGTYHDLLKIIKDKDFLDNEENEDILEDIVLTLTLFEDREMIEERLKTYAHLFDDKVMKQLKRRRYTGWGRLSRKLINGIRDKQSGKTILDFLKSDGFANRNFMQLIHDDSLTFKEDIQKAQVSGQGDSLHEHIANLAGSPAIKKGILQTVKVVDELVKVMGRHKPENIVIEMARENQTTQKGQKNSRERMKRIEEGIKELGSQILKEHPVENTQLQNEKLYLYYLQNGRDMYVDQELDINRLSDYDVDHIVPQSFLKDDSIDNKVLTRSDKARGKSDNVPSEEVVKKMKNYWRQLLNAKLITQRKFDNLTKAERGGLSELDKAGFIKRQLVETRQITKHVAQILDSRMNTKYDENDKLIREVKVITLKSKLVSDFRKDFQFYKVREINNYHHAHDAYLNAVVGTALIKKYPKLESEFVYGDYKVYDVRKMIAKSEQEIGKATAKYFFYSNIMNFFKTEITLANGEIRKRPLIETNGETGEIVWDKGRDFATVRKVLSMPQVNIVKKTEVQTGGFSKESILPKRNSDKLIARKKDWDPKKYGGFDSPTVAYSVLVVAKVEKGKSKKLKSVKELLGITIMERSSFEKNPIDFLEAKGYKEVKKDLIIKLPKYSLFELENGRKRMLASAGELQKGNELALPSKYVNFLYLASHYEKLKGSPEDNEQKQLFVEQHKHYLDEIIEQISEFSKRVILADANLDKVLSAYNKHRDKPIREQAENIIHLFTLTNLGAPAAFKYFDTTIDRKRYTSTKEVLDATLIHQSITGLYETRIDLSQLGGDGGGGSEAAAKGGGGGTLNIEDEYRLHETSKEPDVSLGSTWLSDFPQAWAETGGMGLAVRQAPLIIPLKATSTPVSIKQYPMSQEARLGIKPHIQRLLDQGILVPCQSPWNTPLLPVKKPGTNDYRPVQDLREVNKRVEDIHPTVPNPYNLLSGLPPSHQWYTVLDLKDAFFCLRLHPTSQPLFAFEWRDPEMGISGQLTWTRLPQGFKNSPTLFNEALHRDLAGFRIQHPDLILLQYVDDLLLAATSELDCQQGTRALLQTLGDLGYRASAKKAQICQKQVKYLGYLLKEGQRWLTEARKETVMGQPIPKTPRQLREFLGKAGFCRLFIPGFAEMAAPLYPLTKPGTLFNWGPDQQKAFQEIKQALLTAPALGLPDLTKPFELFVDEKQGYAKGVLTQKLGPWRRPVAYLSKKLDPVAAGWPPCLRMVAAIAVLTKDAGKLTMGQPLVILAPHAVEALVKQPPDRWLSNARMTHYQALLLDTDRVQFGPVVALNPATLLPLPEEGLQHDCLDILAEAHGTRSDLMDQPLPDADHTWYTDGSSFLQEGQRKAGAAVTTETEVIWARALPAGTSAQRAELIALTQALKMAEGKKLNVYTDSRYAFATAHIHGEIYRRRGWLTSEGKEIKNKDEILALLKALFLPKRLSIIHCPGHQKGNSAEARGNRMADQAAREVATRETPETSTLLAGKRTADGSEFEKRTADGSEFESPKKKAKVE

SEQ ID NO: 2359 - protein, 2096 aa, synthetic construct
MPAAKRVKLDGGDKKYSIGLDIGTNSVGWAVITDEYKVPSKKFKVLGNTDRHSIKKNLIGALLFDSGETAEATRLKRTARRRYTRRKNRICYLQEIFSNEMAKVDDSFFHRLEESFLVEEDKKHERHPIFGNIVDEVAYHEKYPTIYHLRKKLVDSTDKADLRLIYLALAHMIKFRGHFLIEGDLNPDNSDVDKLFIQLVQTYNQLFEENPINASGVDAKAILSARLSKSRRLENLIAQLPGEKKNGLFGNLIALSLGLTPNFKSNFDLAEDAKLQLSKDTYDDDLDNLLAQIGDQYADLFLAAKNLSDAILLSDILRVNTEITKAPLSASMIKRYDEHHQDLTLLKALVRQQLPEKYKEIFFDQSKNGYAGYIDGGASQEEFYKFIKPILEKMDGTEELLVKLNREDLLRKQRTFDNGSIPHQIHLGELHAILRRQEDFYPFLKDNREKIEKILTFRIPYYVGPLARGNSRFAWMTRKSEETITPWNFEEVVDKGASAQSFIERMTNFDKNLPNEKVLPKHSLLYEYFTVYNELTKVKYVTEGMRKPAFLSGEQKKAIVDLLFKTNRKVTVKQLKEDYFKKIECFDSVEISGVEDRFNASLGTYHDLLKIIKDKDFLDNEENEDILEDIVLTLTLFEDREMIEERLKTYAHLFDDKVMKQLKRRRYTGWGRLSRKLINGIRDKQSGKTILDFLKSDGFANRNFMQLIHDDSLTFKEDIQKAQVSGQGDSLHEHIANLAGSPAIKKGILQTVKVVDELVKVMGRHKPENIVIEMARENQTTQKGQKNSRERMKRIEEGIKELGSQILKEHPVENTQLQNEKLYLYYLQNGRDMYVDQELDINRLSDYDVDHIVPQSFLKDDSIDNKVLTRSDKARGKSDNVPSEEVVKKMKNYWRQLLNAKLITQRKFDNLTKAERGGLSELDKAGFIKRQLVETRQITKHVAQILDSRMNTKYDENDKLIREVKVITLKSKLVSDFRKDFQFYKVREINNYHHAHDAYLNAVVGTALIKKYPKLESEFVYGDYKVYDVRKMIAKSEQEIGKATAKYFFYSNIMNFFKTEITLANGEIRKRPLIETNGETGEIVWDKGRDFATVRKVLSMPQVNIVKKTEVQTGGFSKESILPKRNSDKLIARKKDWDPKKYGGFDSPTVAYSVLVVAKVEKGKSKKLKSVKELLGITIMERSSFEKNPIDFLEAKGYKEVKKDLIIKLPKYSLFELENGRKRMLASAGELQKGNELALPSKYVNFLYLASHYEKLKGSPEDNEQKQLFVEQHKHYLDEIIEQISEFSKRVILADANLDKVLSAYNKHRDKPIREQAENIIHLFTLTNLGAPAAFKYFDTTIDRKRYTSTKEVLDATLIHQSITGLYETRIDLSQLGGDGGGSSEAAAKPAPGGTLNIEDEYRLHETSKEPDVSLGSTWLSDFPQAWAETGGMGLAVRQAPLIIPLKATSTPVSIKQYPMSQEARLGIKPHIQRLLDQGILVPCQSPWNTPLLPVKKPGTNDYRPVQDLREVNKRVEDIHPTVPNPYNLLSGLPPSHQWYTVLDLKDAFFCLRLHPTSQPLFAFEWRDPEMGISGQLTWTRLPQGFKNSPTLFNEALHRDLAGFRIQHPDLILLQYVDDLLLAATSELDCQQGTRALLQTLGDLGYRASAKKAQICQKQVKYLGYLLKEGQRWLTEARKETVMGQPIPKTPRQLREFLGKAGFCRLFIPGFAEMAAPLYPLTKPGTLFNWGPDQQKAFQEIKQALLTAPALGLPDLTKPFELFVDEKQGYAKGVLTQKLGPWRRPVAYLSKKLDPVAAGWPPCLRMVAAIAVLTKDAGKLTMGQPLVILAPHAVEALVKQPPDRWLSNARMTHYQALLLDTDRVQFGPVVALNPATLLPLPEEGLQHDCLDILAEAHGTRSDLMDQPLPDADHTWYTDGSSFLQEGQRKAGAAVTTETEVIWARALPAGTSAQRAELIALTQALKMAEGKKLNVYTDSRYAFATAHIHGEIYRRRGWLTSEGKEIKNKDEILALLKALFLPKRLSIIHCPGHQKGNSAEARGNRMADQAAREVATRETPETSTLLAGKRTADGSEFEKRTADGSEFESPKKKAKVE

SEQ ID NO: 2360 - protein, 2094 aa, synthetic construct
MPAAKRVKLDGGDKKYSIGLDIGTNSVGWAVITDEYKVPSKKFKVLGNTDRHSIKKNLIGALLFDSGETAEATRLKRTARRRYTRRKNRICYLQEIFSNEMAKVDDSFFHRLEESFLVEEDKKHERHPIFGNIVDEVAYHEKYPTIYHLRKKLVDSTDKADLRLIYLALAHMIKFRGHFLIEGDLNPDNSDVDKLFIQLVQTYNQLFEENPINASGVDAKAILSARLSKSRRLENLIAQLPGEKKNGLFGNLIALSLGLTPNFKSNFDLAEDAKLQLSKDTYDDDLDNLLAQIGDQYADLFLAAKNLSDAILLSDILRVNTEITKAPLSASMIKRYDEHHQDLTLLKALVRQQLPEKYKEIFFDQSKNGYAGYIDGGASQEEFYKFIKPILEKMDGTEELLVKLNREDLLRKQRTFDNGSIPHQIHLGELHAILRRQEDFYPFLKDNREKIEKILTFRIPYYVGPLARGNSRFAWMTRKSEETITPWNFEEVVDKGASAQSFIERMTNFDKNLPNEKVLPKHSLLYEYFTVYNELTKVKYVTEGMRKPAFLSGEQKKAIVDLLFKTNRKVTVKQLKEDYFKKIECFDSVEISGVEDRFNASLGTYHDLLKIIKDKDFLDNEENEDILEDIVLTLTLFEDREMIEERLKTYAHLFDDKVMKQLKRRRYTGWGRLSRKLINGIRDKQSGKTILDFLKSDGFANRNFMQLIHDDSLTFKEDIQKAQVSGQGDSLHEHIANLAGSPAIKKGILQTVKVVDELVKVMGRHKPENIVIEMARENQTTQKGQKNSRERMKRIEEGIKELGSQILKEHPVENTQLQNEKLYLYYLQNGRDMYVDQELDINRLSDYDVDHIVPQSFLKDDSIDNKVLTRSDKARGKSDNVPSEEVVKKMKNYWRQLLNAKLITQRKFDNLTKAERGGLSELDKAGFIKRQLVETRQITKHVAQILDSRMNTKYDENDKLIREVKVITLKSKLVSDFRKDFQFYKVREINNYHHAHDAYLNAVVGTALIKKYPKLESEFVYGDYKVYDVRKMIAKSEQEIGKATAKYFFYSNIMNFFKTEITLANGEIRKRPLIETNGETGEIVWDKGRDFATVRKVLSMPQVNIVKKTEVQTGGFSKESILPKRNSDKLIARKKDWDPKKYGGFDSPTVAYSVLVVAKVEKGKSKKLKSVKELLGITIMERSSFEKNPIDFLEAKGYKEVKKDLIIKLPKYSLFELENGRKRMLASAGELQKGNELALPSKYVNFLYLASHYEKLKGSPEDNEQKQLFVEQHKHYLDEIIEQISEFSKRVILADANLDKVLSAYNKHRDKPIREQAENIIHLFTLTNLGAPAAFKYFDTTIDRKRYTSTKEVLDATLIHQSITGLYETRIDLSQLGGDGGGGSGGSGGSGGTLNIEDEYRLHETSKEPDVSLGSTWLSDFPQAWAETGGMGLAVRQAPLIIPLKATSTPVSIKQYPMSQEARLGIKPHIQRLLDQGILVPCQSPWNTPLLPVKKPGTNDYRPVQDLREVNKRVEDIHPTVPNPYNLLSGLPPSHQWYTVLDLKDAFFCLRLHPTSQPLFAFEWRDPEMGISGQLTWTRLPQGFKNSPTLFNEALHRDLAGFRIQHPDLILLQYVDDLLLAATSELDCQQGTRALLQTLGDLGYRASAKKAQICQKQVKYLGYLLKEGQRWLTEARKETVMGQPIPKTPRQLREFLGKAGFCRLFIPGFAEMAAPLYPLTKPGTLFNWGPDQQKAFQEIKQALLTAPALGLPDLTKPFELFVDEKQGYAKGVLTQKLGPWRRPVAYLSKKLDPVAAGWPPCLRMVAAIAVLTKDAGKLTMGQPLVILAPHAVEALVKQPPDRWLSNARMTHYQALLLDTDRVQFGPVVALNPATLLPLPEEGLQHDCLDILAEAHGTRSDLMDQPLPDADHTWYTDGSSFLQEGQRKAGAAVTTETEVIWARALPAGTSAQRAELIALTQALKMAEGKKLNVYTDSRYAFATAHIHGEIYRRRGWLTSEGKEIKNKDEILALLKALFLPKRLSIIHCPGHQKGNSAEARGNRMADQAAREVATRETPETSTLLAGKRTADGSEFEKRTADGSEFESPKKKAKVE

SEQ ID NO: 2361 - protein, 2095 aa, synthetic construct
MPAAKRVKLDGGDKKYSIGLDIGTNSVGWAVITDEYKVPSKKFKVLGNTDRHSIKKNLIGALLFDSGETAEATRLKRTARRRYTRRKNRICYLQEIFSNEMAKVDDSFFHRLEESFLVEEDKKHERHPIFGNIVDEVAYHEKYPTIYHLRKKLVDSTDKADLRLIYLALAHMIKFRGHFLIEGDLNPDNSDVDKLFIQLVQTYNQLFEENPINASGVDAKAILSARLSKSRRLENLIAQLPGEKKNGLFGNLIALSLGLTPNFKSNFDLAEDAKLQLSKDTYDDDLDNLLAQIGDQYADLFLAAKNLSDAILLSDILRVNTEITKAPLSASMIKRYDEHHQDLTLLKALVRQQLPEKYKEIFFDQSKNGYAGYIDGGASQEEFYKFIKPILEKMDGTEELLVKLNREDLLRKQRTFDNGSIPHQIHLGELHAILRRQEDFYPFLKDNREKIEKILTFRIPYYVGPLARGNSRFAWMTRKSEETITPWNFEEVVDKGASAQSFIERMTNFDKNLPNEKVLPKHSLLYEYFTVYNELTKVKYVTEGMRKPAFLSGEQKKAIVDLLFKTNRKVTVKQLKEDYFKKIECFDSVEISGVEDRFNASLGTYHDLLKIIKDKDFLDNEENEDILEDIVLTLTLFEDREMIEERLKTYAHLFDDKVMKQLKRRRYTGWGRLSRKLINGIRDKQSGKTILDFLKSDGFANRNFMQLIHDDSLTFKEDIQKAQVSGQGDSLHEHIANLAGSPAIKKGILQTVKVVDELVKVMGRHKPENIVIEMARENQTTQKGQKNSRERMKRIEEGIKELGSQILKEHPVENTQLQNEKLYLYYLQNGRDMYVDQELDINRLSDYDVDHIVPQSFLKDDSIDNKVLTRSDKARGKSDNVPSEEVVKKMKNYWRQLLNAKLITQRKFDNLTKAERGGLSELDKAGFIKRQLVETRQITKHVAQILDSRMNTKYDENDKLIREVKVITLKSKLVSDFRKDFQFYKVREINNYHHAHDAYLNAVVGTALIKKYPKLESEFVYGDYKVYDVRKMIAKSEQEIGKATAKYFFYSNIMNFFKTEITLANGEIRKRPLIETNGETGEIVWDKGRDFATVRKVLSMPQVNIVKKTEVQTGGFSKESILPKRNSDKLIARKKDWDPKKYGGFDSPTVAYSVLVVAKVEKGKSKKLKSVKELLGITIMERSSFEKNPIDFLEAKGYKEVKKDLIIKLPKYSLFELENGRKRMLASAGELQKGNELALPSKYVNFLYLASHYEKLKGSPEDNEQKQLFVEQHKHYLDEIIEQISEFSKRVILADANLDKVLSAYNKHRDKPIREQAENIIHLFTLTNLGAPAAFKYFDTTIDRKRYTSTKEVLDATLIHQSITGLYETRIDLSQLGGDGGEAAAKEAAAKGGTLNIEDEYRLHETSKEPDVSLGSTWLSDFPQAWAETGGMGLAVRQAPLIIPLKATSTPVSIKQYPMSQEARLGIKPHIQRLLDQGILVPCQSPWNTPLLPVKKPGTNDYRPVQDLREVNKRVEDIHPTVPNPYNLLSGLPPSHQWYTVLDLKDAFFCLRLHPTSQPLFAFEWRDPEMGISGQLTWTRLPQGFKNSPTLFNEALHRDLAGFRIQHPDLILLQYVDDLLLAATSELDCQQGTRALLQTLGDLGYRASAKKAQICQKQVKYLGYLLKEGQRWLTEARKETVMGQPIPKTPRQLREFLGKAGFCRLFIPGFAEMAAPLYPLTKPGTLFNWGPDQQKAFQEIKQALLTAPALGLPDLTKPFELFVDEKQGYAKGVLTQKLGPWRRPVAYLSKKLDPVAAGWPPCLRMVAAIAVLTKDAGKLTMGQPLVILAPHAVEALVKQPPDRWLSNARMTHYQALLLDTDRVQFGPVVALNPATLLPLPEEGLQHDCLDILAEAHGTRSDLMDQPLPDADHTWYTDGSSFLQEGQRKAGAAVTTETEVIWARALPAGTSAQRAELIALTQALKMAEGKKLNVYTDSRYAFATAHIHGEIYRRRGWLTSEGKEIKNKDEILALLKALFLPKRLSIIHCPGHQKGNSAEARGNRMADQAAREVATRETPETSTLLAGKRTADGSEFEKRTADGSEFESPKKKAKVE

SEQ ID NO: 2362 - protein, 2091 aa, synthetic construct
MPAAKRVKLDGGDKKYSIGLDIGTNSVGWAVITDEYKVPSKKFKVLGNTDRHSIKKNLIGALLFDSGETAEATRLKRTARRRYTRRKNRICYLQEIFSNEMAKVDDSFFHRLEESFLVEEDKKHERHPIFGNIVDEVAYHEKYPTIYHLRKKLVDSTDKADLRLIYLALAHMIKFRGHFLIEGDLNPDNSDVDKLFIQLVQTYNQLFEENPINASGVDAKAILSARLSKSRRLENLIAQLPGEKKNGLFGNLIALSLGLTPNFKSNFDLAEDAKLQLSKDTYDDDLDNLLAQIGDQYADLFLAAKNLSDAILLSDILRVNTEITKAPLSASMIKRYDEHHQDLTLLKALVRQQLPEKYKEIFFDQSKNGYAGYIDGGASQEEFYKFIKPILEKMDGTEELLVKLNREDLLRKQRTFDNGSIPHQIHLGELHAILRRQEDFYPFLKDNREKIEKILTFRIPYYVGPLARGNSRFAWMTRKSEETITPWNFEEVVDKGASAQSFIERMTNFDKNLPNEKVLPKHSLLYEYFTVYNELTKVKYVTEGMRKPAFLSGEQKKAIVDLLFKTNRKVTVKQLKEDYFKKIECFDSVEISGVEDRFNASLGTYHDLLKIIKDKDFLDNEENEDILEDIVLTLTLFEDREMIEERLKTYAHLFDDKVMKQLKRRRYTGWGRLSRKLINGIRDKQSGKTILDFLKSDGFANRNFMQLIHDDSLTFKEDIQKAQVSGQGDSLHEHIANLAGSPAIKKGILQTVKVVDELVKVMGRHKPENIVIEMARENQTTQKGQKNSRERMKRIEEGIKELGSQILKEHPVENTQLQNEKLYLYYLQNGRDMYVDQELDINRLSDYDVDHIVPQSFLKDDSIDNKVLTRSDKARGKSDNVPSEEVVKKMKNYWRQLLNAKLITQRKFDNLTKAERGGLSELDKAGFIKRQLVETRQITKHVAQILDSRMNTKYDENDKLIREVKVITLKSKLVSDFRKDFQFYKVREINNYHHAHDAYLNAVVGTALIKKYPKLESEFVYGDYKVYDVRKMIAKSEQEIGKATAKYFFYSNIMNFFKTEITLANGEIRKRPLIETNGETGEIVWDKGRDFATVRKVLSMPQVNIVKKTEVQTGGFSKESILPKRNSDKLIARKKDWDPKKYGGFDSPTVAYSVLVVAKVEKGKSKKLKSVKELLGITIMERSSFEKNPIDFLEAKGYKEVKKDLIIKLPKYSLFELENGRKRMLASAGELQKGNELALPSKYVNFLYLASHYEKLKGSPEDNEQKQLFVEQHKHYLDEIIEQISEFSKRVILADANLDKVLSAYNKHRDKPIREQAENIIHLFTLTNLGAPAAFKYFDTTIDRKRYTSTKEVLDATLIHQSITGLYETRIDLSQLGGDGGGSSGGGGGTLNIEDEYRLHETSKEPDVSLGSTWLSDFPQAWAETGGMGLAVRQAPLIIPLKATSTPVSIKQYPMSQEARLGIKPHIQRLLDQGILVPCQSPWNTPLLPVKKPGTNDYRPVQDLREVNKRVEDIHPTVPNPYNLLSGLPPSHQWYTVLDLKDAFFCLRLHPTSQPLFAFEWRDPEMGISGQLTWTRLPQGFKNSPTLFNEALHRDLAGFRIQHPDLILLQYVDDLLLAATSELDCQQGTRALLQTLGDLGYRASAKKAQICQKQVKYLGYLLKEGQRWLTEARKETVMGQPIPKTPRQLREFLGKAGFCRLFIPGFAEMAAPLYPLTKPGTLFNWGPDQQKAFQEIKQALLTAPALGLPDLTKPFELFVDEKQGYAKGVLTQKLGPWRRPVAYLSKKLDPVAAGWPPCLRMVAAIAVLTKDAGKLTMGQPLVILAPHAVEALVKQPPDRWLSNARMTHYQALLLDTDRVQFGPVVALNPATLLPLPEEGLQHDCLDILAEAHGTRSDLMDQPLPDADHTWYTDGSSFLQEGQRKAGAAVTTETEVIWARALPAGTSAQRAELIALTQALKMAEGKKLNVYTDSRYAFATAHIHGEIYRRRGWLTSEGKEIKNKDEILALLKALFLPKRLSIIHCPGHQKGNSAEARGNRMADQAAREVATRETPETSTLLAGKRTADGSEFEKRTADGSEFESPKKKAKVE

SEQ ID NO: 2363 - protein, 2093 aa, synthetic construct
MPAAKRVKLDGGDKKYSIGLDIGTNSVGWAVITDEYKVPSKKFKVLGNTDRHSIKKNLIGALLFDSGETAEATRLKRTARRRYTRRKNRICYLQEIFSNEMAKVDDSFFHRLEESFLVEEDKKHERHPIFGNIVDEVAYHEKYPTIYHLRKKLVDSTDKADLRLIYLALAHMIKFRGHFLIEGDLNPDNSDVDKLFIQLVQTYNQLFEENPINASGVDAKAILSARLSKSRRLENLIAQLPGEKKNGLFGNLIALSLGLTPNFKSNFDLAEDAKLQLSKDTYDDDLDNLLAQIGDQYADLFLAAKNLSDAILLSDILRVNTEITKAPLSASMIKRYDEHHQDLTLLKALVRQQLPEKYKEIFFDQSKNGYAGYIDGGASQEEFYKFIKPILEKMDGTEELLVKLNREDLLRKQRTFDNGSIPHQIHLGELHAILRRQEDFYPFLKDNREKIEKILTFRIPYYVGPLARGNSRFAWMTRKSEETITPWNFEEVVDKGASAQSFIERMTNFDKNLPNEKVLPKHSLLYEYFTVYNELTKVKYVTEGMRKPAFLSGEQKKAIVDLLFKTNRKVTVKQLKEDYFKKIECFDSVEISGVEDRFNASLGTYHDLLKIIKDKDFLDNEENEDILEDIVLTLTLFEDREMIEERLKTYAHLFDDKVMKQLKRRRYTGWGRLSRKLINGIRDKQSGKTILDFLKSDGFANRNFMQLIHDDSLTFKEDIQKAQVSGQGDSLHEHIANLAGSPAIKKGILQTVKVVDELVKVMGRHKPENIVIEMARENQTTQKGQKNSRERMKRIEEGIKELGSQILKEHPVENTQLQNEKLYLYYLQNGRDMYVDQELDINRLSDYDVDHIVPQSFLKDDSIDNKVLTRSDKARGKSDNVPSEEVVKKMKNYWRQLLNAKLITQRKFDNLTKAERGGLSELDKAGFIKRQLVETRQITKHVAQILDSRMNTKYDENDKLIREVKVITLKSKLVSDFRKDFQFYKVREINNYHHAHDAYLNAVVGTALIKKYPKLESEFVYGDYKVYDVRKMIAKSEQEIGKATAKYFFYSNIMNFFKTEITLANGEIRKRPLIETNGETGEIVWDKGRDFATVRKVLSMPQVNIVKKTEVQTGGFSKESILPKRNSDKLIARKKDWDPKKYGGFDSPTVAYSVLVVAKVEKGKSKKLKSVKELLGITIMERSSFEKNPIDFLEAKGYKEVKKDLIIKLPKYSLFELENGRKRMLASAGELQKGNELALPSKYVNFLYLASHYEKLKGSPEDNEQKQLFVEQHKHYLDEIIEQISEFSKRVILADANLDKVLSAYNKHRDKPIREQAENIIHLFTLTNLGAPAAFKYFDTTIDRKRYTSTKEVLDATLIHQSITGLYETRIDLSQLGGDGGGGSEAAAKGGTLNIEDEYRLHETSKEPDVSLGSTWLSDFPQAWAETGGMGLAVRQAPLIIPLKATSTPVSIKQYPMSQEARLGIKPHIQRLLDQGILVPCQSPWNTPLLPVKKPGTNDYRPVQDLREVNKRVEDIHPTVPNPYNLLSGLPPSHQWYTVLDLKDAFFCLRLHPTSQPLFAFEWRDPEMGISGQLTWTRLPQGFKNSPTLFNEALHRDLAGFRIQHPDLILLQYVDDLLLAATSELDCQQGTRALLQTLGDLGYRASAKKAQICQKQVKYLGYLLKEGQRWLTEARKETVMGQPIPKTPRQLREFLGKAGFCRLFIPGFAEMAAPLYPLTKPGTLFNWGPDQQKAFQEIKQALLTAPALGLPDLTKPFELFVDEKQGYAKGVLTQKLGPWRRPVAYLSKKLDPVAAGWPPCLRMVAAIAVLTKDAGKLTMGQPLVILAPHAVEALVKQPPDRWLSNARMTHYQALLLDTDRVQFGPVVALNPATLLPLPEEGLQHDCLDILAEAHGTRSDLMDQPLPDADHTWYTDGSSFLQEGQRKAGAAVTTETEVIWARALPAGTSAQRAELIALTQALKMAEGKKLNVYTDSRYAFATAHIHGEIYRRRGWLTSEGKEIKNKDEILALLKALFLPKRLSIIHCPGHQKGNSAEARGNRMADQAAREVATRETPETSTLLAGKRTADGSEFEKRTADGSEFESPKKKAKVE

SEQ ID NO: 2364 - protein, 2090 aa, synthetic construct
MPAAKRVKLDGGDKKYSIGLDIGTNSVGWAVITDEYKVPSKKFKVLGNTDRHSIKKNLIGALLFDSGETAEATRLKRTARRRYTRRKNRICYLQEIFSNEMAKVDDSFFHRLEESFLVEEDKKHERHPIFGNIVDEVAYHEKYPTIYHLRKKLVDSTDKADLRLIYLALAHMIKFRGHFLIEGDLNPDNSDVDKLFIQLVQTYNQLFEENPINASGVDAKAILSARLSKSRRLENLIAQLPGEKKNGLFGNLIALSLGLTPNFKSNFDLAEDAKLQLSKDTYDDDLDNLLAQIGDQYADLFLAAKNLSDAILLSDILRVNTEITKAPLSASMIKRYDEHHQDLTLLKALVRQQLPEKYKEIFFDQSKNGYAGYIDGGASQEEFYKFIKPILEKMDGTEELLVKLNREDLLRKQRTFDNGSIPHQIHLGELHAILRRQEDFYPFLKDNREKIEKILTFRIPYYVGPLARGNSRFAWMTRKSEETITPWNFEEVVDKGASAQSFIERMTNFDKNLPNEKVLPKHSLLYEYFTVYNELTKVKYVTEGMRKPAFLSGEQKKAIVDLLFKTNRKVTVKQLKEDYFKKIECFDSVEISGVEDRFNASLGTYHDLLKIIKDKDFLDNEENEDILEDIVLTLTLFEDREMIEERLKTYAHLFDDKVMKQLKRRRYTGWGRLSRKLINGIRDKQSGKTILDFLKSDGFANRNFMQLIHDDSLTFKEDIQKAQVSGQGDSLHEHIANLAGSPAIKKGILQTVKVVDELVKVMGRHKPENIVIEMARENQTTQKGQKNSRERMKRIEEGIKELGSQILKEHPVENTQLQNEKLYLYYLQNGRDMYVDQELDINRLSDYDVDHIVPQSFLKDDSIDNKVLTRSDKARGKSDNVPSEEVVKKMKNYWRQLLNAKLITQRKFDNLTKAERGGLSELDKAGFIKRQLVETRQITKHVAQILDSRMNTKYDENDKLIREVKVITLKSKLVSDFRKDFQFYKVREINNYHHAHDAYLNAVVGTALIKKYPKLESEFVYGDYKVYDVRKMIAKSEQEIGKATAKYFFYSNIMNFFKTEITLANGEIRKRPLIETNGETGEIVWDKGRDFATVRKVLSMPQVNIVKKTEVQTGGFSKESILPKRNSDKLIARKKDWDPKKYGGFDSPTVAYSVLVVAKVEKGKSKKLKSVKELLGITIMERSSFEKNPIDFLEAKGYKEVKKDLIIKLPKYSLFELENGRKRMLASAGELQKGNELALPSKYVNFLYLASHYEKLKGSPEDNEQKQLFVEQHKHYLDEIIEQISEFSKRVILADANLDKVLSAYNKHRDKPIREQAENIIHLFTLTNLGAPAAFKYFDTTIDRKRYTSTKEVLDATLIHQSITGLYETRIDLSQLGGDGGPAPAPGGTLNIEDEYRLHETSKEPDVSLGSTWLSDFPQAWAETGGMGLAVRQAPLIIPLKATSTPVSIKQYPMSQEARLGIKPHIQRLLDQGILVPCQSPWNTPLLPVKKPGTNDYRPVQDLREVNKRVEDIHPTVPNPYNLLSGLPPSHQWYTVLDLKDAFFCLRLHPTSQPLFAFEWRDPEMGISGQLTWTRLPQGFKNSPTLFNEALHRDLAGFRIQHPDLILLQYVDDLLLAATSELDCQQGTRALLQTLGDLGYRASAKKAQICQKQVKYLGYLLKEGQRWLTEARKETVMGQPIPKTPRQLREFLGKAGFCRLFIPGFAEMAAPLYPLTKPGTLFNWGPDQQKAFQEIKQALLTAPALGLPDLTKPFELFVDEKQGYAKGVLTQKLGPWRRPVAYLSKKLDPVAAGWPPCLRMVAAIAVLTKDAGKLTMGQPLVILAPHAVEALVKQPPDRWLSNARMTHYQALLLDTDRVQFGPVVALNPATLLPLPEEGLQHDCLDILAEAHGTRSDLMDQPLPDADHTWYTDGSSFLQEGQRKAGAAVTTETEVIWARALPAGTSAQRAELIALTQALKMAEGKKLNVYTDSRYAFATAHIHGEIYRRRGWLTSEGKEIKNKDEILALLKALFLPKRLSIIHCPGHQKGNSAEARGNRMADQAAREVATRETPETSTLLAGKRTADGSEFEKRTADGSEFESPKKKAKVE

SEQ ID NO: 2365 - protein, 2094 aa, synthetic construct
MPAAKRVKLDGGDKKYSIGLDIGTNSVGWAVITDEYKVPSKKFKVLGNTDRHSIKKNLIGALLFDSGETAEATRLKRTARRRYTRRKNRICYLQEIFSNEMAKVDDSFFHRLEESFLVEEDKKHERHPIFGNIVDEVAYHEKYPTIYHLRKKLVDSTDKADLRLIYLALAHMIKFRGHFLIEGDLNPDNSDVDKLFIQLVQTYNQLFEENPINASGVDAKAILSARLSKSRRLENLIAQLPGEKKNGLFGNLIALSLGLTPNFKSNFDLAEDAKLQLSKDTYDDDLDNLLAQIGDQYADLFLAAKNLSDAILLSDILRVNTEITKAPLSASMIKRYDEHHQDLTLLKALVRQQLPEKYKEIFFDQSKNGYAGYIDGGASQEEFYKFIKPILEKMDGTEELLVKLNREDLLRKQRTFDNGSIPHQIHLGELHAILRRQEDFYPFLKDNREKIEKILTFRIPYYVGPLARGNSRFAWMTRKSEETITPWNFEEVVDKGASAQSFIERMTNFDKNLPNEKVLPKHSLLYEYFTVYNELTKVKYVTEGMRKPAFLSGEQKKAIVDLLFKTNRKVTVKQLKEDYFKKIECFDSVEISGVEDRFNASLGTYHDLLKIIKDKDFLDNEENEDILEDIVLTLTLFEDREMIEERLKTYAHLFDDKVMKQLKRRRYTGWGRLSRKLINGIRDKQSGKTILDFLKSDGFANRNFMQLIHDDSLTFKEDIQKAQVSGQGDSLHEHIANLAGSPAIKKGILQTVKVVDELVKVMGRHKPENIVIEMARENQTTQKGQKNSRERMKRIEEGIKELGSQILKEHPVENTQLQNEKLYLYYLQNGRDMYVDQELDINRLSDYDVDHIVPQSFLKDDSIDNKVLTRSDKARGKSDNVPSEEVVKKMKNYWRQLLNAKLITQRKFDNLTKAERGGLSELDKAGFIKRQLVETRQITKHVAQILDSRMNTKYDENDKLIREVKVITLKSKLVSDFRKDFQFYKVREINNYHHAHDAYLNAVVGTALIKKYPKLESEFVYGDYKVYDVRKMIAKSEQEIGKATAKYFFYSNIMNFFKTEITLANGEIRKRPLIETNGETGEIVWDKGRDFATVRKVLSMPQVNIVKKTEVQTGGFSKESILPKRNSDKLIARKKDWDPKKYGGFDSPTVAYSVLVVAKVEKGKSKKLKSVKELLGITIMERSSFEKNPIDFLEAKGYKEVKKDLIIKLPKYSLFELENGRKRMLASAGELQKGNELALPSKYVNFLYLASHYEKLKGSPEDNEQKQLFVEQHKHYLDEIIEQISEFSKRVILADANLDKVLSAYNKHRDKPIREQAENIIHLFTLTNLGAPAAFKYFDTTIDRKRYTSTKEVLDATLIHQSITGLYETRIDLSQLGGDGGGGSPAPGGGGGTLNIEDEYRLHETSKEPDVSLGSTWLSDFPQAWAETGGMGLAVRQAPLIIPLKATSTPVSIKQYPMSQEARLGIKPHIQRLLDQGILVPCQSPWNTPLLPVKKPGTNDYRPVQDLREVNKRVEDIHPTVPNPYNLLSGLPPSHQWYTVLDLKDAFFCLRLHPTSQPLFAFEWRDPEMGISGQLTWTRLPQGFKNSPTLFNEALHRDLAGFRIQHPDLILLQYVDDLLLAATSELDCQQGTRALLQTLGDLGYRASAKKAQICQKQVKYLGYLLKEGQRWLTEARKETVMGQPIPKTPRQLREFLGKAGFCRLFIPGFAEMAAPLYPLTKPGTLFNWGPDQQKAFQEIKQALLTAPALGLPDLTKPFELFVDEKQGYAKGVLTQKLGPWRRPVAYLSKKLDPVAAGWPPCLRMVAAIAVLTKDAGKLTMGQPLVILAPHAVEALVKQPPDRWLSNARMTHYQALLLDTDRVQFGPVVALNPATLLPLPEEGLQHDCLDILAEAHGTRSDLMDQPLPDADHTWYTDGSSFLQEGQRKAGAAVTTETEVIWARALPAGTSAQRAELIALTQALKMAEGKKLNVYTDSRYAFATAHIHGEIYRRRGWLTSEGKEIKNKDEILALLKALFLPKRLSIIHCPGHQKGNSAEARGNRMADQAAREVATRETPETSTLLAGKRTADGSEFEKRTADGSEFESPKKKAKVE

SEQ ID NO: 2366 - protein, 2091 aa, synthetic construct
MPAAKRVKLDGGDKKYSIGLDIGTNSVGWAVITDEYKVPSKKFKVLGNTDRHSIKKNLIGALLFDSGETAEATRLKRTARRRYTRRKNRICYLQEIFSNEMAKVDDSFFHRLEESFLVEEDKKHERHPIFGNIVDEVAYHEKYPTIYHLRKKLVDSTDKADLRLIYLALAHMIKFRGHFLIEGDLNPDNSDVDKLFIQLVQTYNQLFEENPINASGVDAKAILSARLSKSRRLENLIAQLPGEKKNGLFGNLIALSLGLTPNFKSNFDLAEDAKLQLSKDTYDDDLDNLLAQIGDQYADLFLAAKNLSDAILLSDILRVNTEITKAPLSASMIKRYDEHHQDLTLLKALVRQQLPEKYKEIFFDQSKNGYAGYIDGGASQEEFYKFIKPILEKMDGTEELLVKLNREDLLRKQRTFDNGSIPHQIHLGELHAILRRQEDFYPFLKDNREKIEKILTFRIPYYVGPLARGNSRFAWMTRKSEETITPWNFEEVVDKGASAQSFIERMTNFDKNLPNEKVLPKHSLLYEYFTVYNELTKVKYVTEGMRKPAFLSGEQKKAIVDLLFKTNRKVTVKQLKEDYFKKIECFDSVEISGVEDRFNASLGTYHDLLKIIKDKDFLDNEENEDILEDIVLTLTLFEDREMIEERLKTYAHLFDDKVMKQLKRRRYTGWGRLSRKLINGIRDKQSGKTILDFLKSDGFANRNFMQLIHDDSLTFKEDIQKAQVSGQGDSLHEHIANLAGSPAIKKGILQTVKVVDELVKVMGRHKPENIVIEMARENQTTQKGQKNSRERMKRIEEGIKELGSQILKEHPVENTQLQNEKLYLYYLQNGRDMYVDQELDINRLSDYDVDHIVPQSFLKDDSIDNKVLTRSDKARGKSDNVPSEEVVKKMKNYWRQLLNAKLITQRKFDNLTKAERGGLSELDKAGFIKRQLVETRQITKHVAQILDSRMNTKYDENDKLIREVKVITLKSKLVSDFRKDFQFYKVREINNYHHAHDAYLNAVVGTALIKKYPKLESEFVYGDYKVYDVRKMIAKSEQEIGKATAKYFFYSNIMNFFKTEITLANGEIRKRPLIETNGETGEIVWDKGRDFATVRKVLSMPQVNIVKKTEVQTGGFSKESILPKRNSDKLIARKKDWDPKKYGGFDSPTVAYSVLVVAKVEKGKSKKLKSVKELLGITIMERSSFEKNPIDFLEAKGYKEVKKDLIIKLPKYSLFELENGRKRMLASAGELQKGNELALPSKYVNFLYLASHYEKLKGSPEDNEQKQLFVEQHKHYLDEIIEQISEFSKRVILADANLDKVLSAYNKHRDKPIREQAENIIHLFTLTNLGAPAAFKYFDTTIDRKRYTSTKEVLDATLIHQSITGLYETRIDLSQLGGDGGGSSPAPGGTLNIEDEYRLHETSKEPDVSLGSTWLSDFPQAWAETGGMGLAVRQAPLIIPLKATSTPVSIKQYPMSQEARLGIKPHIQRLLDQGILVPCQSPWNTPLLPVKKPGTNDYRPVQDLREVNKRVEDIHPTVPNPYNLLSGLPPSHQWYTVLDLKDAFFCLRLHPTSQPLFAFEWRDPEMGISGQLTWTRLPQGFKNSPTLFNEALHRDLAGFRIQHPDLILLQYVDDLLLAATSELDCQQGTRALLQTLGDLGYRASAKKAQICQKQVKYLGYLLKEGQRWLTEARKETVMGQPIPKTPRQLREFLGKAGFCRLFIPGFAEMAAPLYPLTKPGTLFNWGPDQQKAFQEIKQALLTAPALGLPDLTKPFELFVDEKQGYAKGVLTQKLGPWRRPVAYLSKKLDPVAAGWPPCLRMVAAIAVLTKDAGKLTMGQPLVILAPHAVEALVKQPPDRWLSNARMTHYQALLLDTDRVQFGPVVALNPATLLPLPEEGLQHDCLDILAEAHGTRSDLMDQPLPDADHTWYTDGSSFLQEGQRKAGAAVTTETEVIWARALPAGTSAQRAELIALTQALKMAEGKKLNVYTDSRYAFATAHIHGEIYRRRGWLTSEGKEIKNKDEILALLKALFLPKRLSIIHCPGHQKGNSAEARGNRMADQAAREVATRETPETSTLLAGKRTADGSEFEKRTADGSEFESPKKKAKVE

SEQ ID NO: 2367 - protein, 2096 aa, synthetic construct
MPAAKRVKLDGGDKKYSIGLDIGTNSVGWAVITDEYKVPSKKFKVLGNTDRHSIKKNLIGALLFDSGETAEATRLKRTARRRYTRRKNRICYLQEIFSNEMAKVDDSFFHRLEESFLVEEDKKHERHPIFGNIVDEVAYHEKYPTIYHLRKKLVDSTDKADLRLIYLALAHMIKFRGHFLIEGDLNPDNSDVDKLFIQLVQTYNQLFEENPINASGVDAKAILSARLSKSRRLENLIAQLPGEKKNGLFGNLIALSLGLTPNFKSNFDLAEDAKLQLSKDTYDDDLDNLLAQIGDQYADLFLAAKNLSDAILLSDILRVNTEITKAPLSASMIKRYDEHHQDLTLLKALVRQQLPEKYKEIFFDQSKNGYAGYIDGGASQEEFYKFIKPILEKMDGTEELLVKLNREDLLRKQRTFDNGSIPHQIHLGELHAILRRQEDFYPFLKDNREKIEKILTFRIPYYVGPLARGNSRFAWMTRKSEETITPWNFEEVVDKGASAQSFIERMTNFDKNLPNEKVLPKHSLLYEYFTVYNELTKVKYVTEGMRKPAFLSGEQKKAIVDLLFKTNRKVTVKQLKEDYFKKIECFDSVEISGVEDRFNASLGTYHDLLKIIKDKDFLDNEENEDILEDIVLTLTLFEDREMIEERLKTYAHLFDDKVMKQLKRRRYTGWGRLSRKLINGIRDKQSGKTILDFLKSDGFANRNFMQLIHDDSLTFKEDIQKAQVSGQGDSLHEHIANLAGSPAIKKGILQTVKVVDELVKVMGRHKPENIVIEMARENQTTQKGQKNSRERMKRIEEGIKELGSQILKEHPVENTQLQNEKLYLYYLQNGRDMYVDQELDINRLSDYDVDHIVPQSFLKDDSIDNKVLTRSDKARGKSDNVPSEEVVKKMKNYWRQLLNAKLITQRKFDNLTKAERGGLSELDKAGFIKRQLVETRQITKHVAQILDSRMNTKYDENDKLIREVKVITLKSKLVSDFRKDFQFYKVREINNYHHAHDAYLNAVVGTALIKKYPKLESEFVYGDYKVYDVRKMIAKSEQEIGKATAKYFFYSNIMNFFKTEITLANGEIRKRPLIETNGETGEIVWDKGRDFATVRKVLSMPQVNIVKKTEVQTGGFSKESILPKRNSDKLIARKKDWDPKKYGGFDSPTVAYSVLVVAKVEKGKSKKLKSVKELLGITIMERSSFEKNPIDFLEAKGYKEVKKDLIIKLPKYSLFELENGRKRMLASAGELQKGNELALPSKYVNFLYLASHYEKLKGSPEDNEQKQLFVEQHKHYLDEIIEQISEFSKRVILADANLDKVLSAYNKHRDKPIREQAENIIHLFTLTNLGAPAAFKYFDTTIDRKRYTSTKEVLDATLIHQSITGLYETRIDLSQLGGDGGEAAAKGSSGGGGGTLNIEDEYRLHETSKEPDVSLGSTWLSDFPQAWAETGGMGLAVRQAPLIIPLKATSTPVSIKQYPMSQEARLGIKPHIQRLLDQGILVPCQSPWNTPLLPVKKPGTNDYRPVQDLREVNKRVEDIHPTVPNPYNLLSGLPPSHQWYTVLDLKDAFFCLRLHPTSQPLFAFEWRDPEMGISGQLTWTRLPQGFKNSPTLFNEALHRDLAGFRIQHPDLILLQYVDDLLLAATSELDCQQGTRALLQTLGDLGYRASAKKAQICQKQVKYLGYLLKEGQRWLTEARKETVMGQPIPKTPRQLREFLGKAGFCRLFIPGFAEMAAPLYPLTKPGTLFNWGPDQQKAFQEIKQALLTAPALGLPDLTKPFELFVDEKQGYAKGVLTQKLGPWRRPVAYLSKKLDPVAAGWPPCLRMVAAIAVLTKDAGKLTMGQPLVILAPHAVEALVKQPPDRWLSNARMTHYQALLLDTDRVQFGPVVALNPATLLPLPEEGLQHDCLDILAEAHGTRSDLMDQPLPDADHTWYTDGSSFLQEGQRKAGAAVTTETEVIWARALPAGTSAQRAELIALTQALKMAEGKKLNVYTDSRYAFATAHIHGEIYRRRGWLTSEGKEIKNKDEILALLKALFLPKRLSIIHCPGHQKGNSAEARGNRMADQAAREVATRETPETSTLLAGKRTADGSEFEKRTADGSEFESPKKKAKVE

SEQ ID NO: 2368 - protein, 2096 aa, synthetic construct
MPAAKRVKLDGGDKKYSIGLDIGTNSVGWAVITDEYKVPSKKFKVLGNTDRHSIKKNLIGALLFDSGETAEATRLKRTARRRYTRRKNRICYLQEIFSNEMAKVDDSFFHRLEESFLVEEDKKHERHPIFGNIVDEVAYHEKYPTIYHLRKKLVDSTDKADLRLIYLALAHMIKFRGHFLIEGDLNPDNSDVDKLFIQLVQTYNQLFEENPINASGVDAKAILSARLSKSRRLENLIAQLPGEKKNGLFGNLIALSLGLTPNFKSNFDLAEDAKLQLSKDTYDDDLDNLLAQIGDQYADLFLAAKNLSDAILLSDILRVNTEITKAPLSASMIKRYDEHHQDLTLLKALVRQQLPEKYKEIFFDQSKNGYAGYIDGGASQEEFYKFIKPILEKMDGTEELLVKLNREDLLRKQRTFDNGSIPHQIHLGELHAILRRQEDFYPFLKDNREKIEKILTFRIPYYVGPLARGNSRFAWMTRKSEETITPWNFEEVVDKGASAQSFIERMTNFDKNLPNEKVLPKHSLLYEYFTVYNELTKVKYVTEGMRKPAFLSGEQKKAIVDLLFKTNRKVTVKQLKEDYFKKIECFDSVEISGVEDRFNASLGTYHDLLKIIKDKDFLDNEENEDILEDIVLTLTLFEDREMIEERLKTYAHLFDDKVMKQLKRRRYTGWGRLSRKLINGIRDKQSGKTILDFLKSDGFANRNFMQLIHDDSLTFKEDIQKAQVSGQGDSLHEHIANLAGSPAIKKGILQTVKVVDELVKVMGRHKPENIVIEMARENQTTQKGQKNSRERMKRIEEGIKELGSQILKEHPVENTQLQNEKLYLYYLQNGRDMYVDQELDINRLSDYDVDHIVPQSFLKDDSIDNKVLTRSDKARGKSDNVPSEEVVKKMKNYWRQLLNAKLITQRKFDNLTKAERGGLSELDKAGFIKRQLVETRQITKHVAQILDSRMNTKYDENDKLIREVKVITLKSKLVSDFRKDFQFYKVREINNYHHAHDAYLNAVVGTALIKKYPKLESEFVYGDYKVYDVRKMIAKSEQEIGKATAKYFFYSNIMNFFKTEITLANGEIRKRPLIETNGETGEIVWDKGRDFATVRKVLSMPQVNIVKKTEVQTGGFSKESILPKRNSDKLIARKKDWDPKKYGGFDSPTVAYSVLVVAKVEKGKSKKLKSVKELLGITIMERSSFEKNPIDFLEAKGYKEVKKDLIIKLPKYSLFELENGRKRMLASAGELQKGNELALPSKYVNFLYLASHYEKLKGSPEDNEQKQLFVEQHKHYLDEIIEQISEFSKRVILADANLDKVLSAYNKHRDKPIREQAENIIHLFTLTNLGAPAAFKYFDTTIDRKRYTSTKEVLDATLIHQSITGLYETRIDLSQLGGDGGEAAAKGSSGGSGGTLNIEDEYRLHETSKEPDVSLGSTWLSDFPQAWAETGGMGLAVRQAPLIIPLKATSTPVSIKQYPMSQEARLGIKPHIQRLLDQGILVPCQSPWNTPLLPVKKPGTNDYRPVQDLREVNKRVEDIHPTVPNPYNLLSGLPPSHQWYTVLDLKDAFFCLRLHPTSQPLFAFEWRDPEMGISGQLTWTRLPQGFKNSPTLFNEALHRDLAGFRIQHPDLILLQYVDDLLLAATSELDCQQGTRALLQTLGDLGYRASAKKAQICQKQVKYLGYLLKEGQRWLTEARKETVMGQPIPKTPRQLREFLGKAGFCRLFIPGFAEMAAPLYPLTKPGTLFNWGPDQQKAFQEIKQALLTAPALGLPDLTKPFELFVDEKQGYAKGVLTQKLGPWRRPVAYLSKKLDPVAAGWPPCLRMVAAIAVLTKDAGKLTMGQPLVILAPHAVEALVKQPPDRWLSNARMTHYQALLLDTDRVQFGPVVALNPATLLPLPEEGLQHDCLDILAEAHGTRSDLMDQPLPDADHTWYTDGSSFLQEGQRKAGAAVTTETEVIWARALPAGTSAQRAELIALTQALKMAEGKKLNVYTDSRYAFATAHIHGEIYRRRGWLTSEGKEIKNKDEILALLKALFLPKRLSIIHCPGHQKGNSAEARGNRMADQAAREVATRETPETSTLLAGKRTADGSEFEKRTADGSEFESPKKKAKVE

SEQ ID NO: 2369 - protein, 2095 aa, synthetic construct
MPAAKRVKLDGGDKKYSIGLDIGTNSVGWAVITDEYKVPSKKFKVLGNTDRHSIKKNLIGALLFDSGETAEATRLKRTARRRYTRRKNRICYLQEIFSNEMAKVDDSFFHRLEESFLVEEDKKHERHPIFGNIVDEVAYHEKYPTIYHLRKKLVDSTDKADLRLIYLALAHMIKFRGHFLIEGDLNPDNSDVDKLFIQLVQTYNQLFEENPINASGVDAKAILSARLSKSRRLENLIAQLPGEKKNGLFGNLIALSLGLTPNFKSNFDLAEDAKLQLSKDTYDDDLDNLLAQIGDQYADLFLAAKNLSDAILLSDILRVNTEITKAPLSASMIKRYDEHHQDLTLLKALVRQQLPEKYKEIFFDQSKNGYAGYIDGGASQEEFYKFIKPILEKMDGTEELLVKLNREDLLRKQRTFDNGSIPHQIHLGELHAILRRQEDFYPFLKDNREKIEKILTFRIPYYVGPLARGNSRFAWMTRKSEETITPWNFEEVVDKGASAQSFIERMTNFDKNLPNEKVLPKHSLLYEYFTVYNELTKVKYVTEGMRKPAFLSGEQKKAIVDLLFKTNRKVTVKQLKEDYFKKIECFDSVEISGVEDRFNASLGTYHDLLKIIKDKDFLDNEENEDILEDIVLTLTLFEDREMIEERLKTYAHLFDDKVMKQLKRRRYTGWGRLSRKLINGIRDKQSGKTILDFLKSDGFANRNFMQLIHDDSLTFKEDIQKAQVSGQGDSLHEHIANLAGSPAIKKGILQTVKVVDELVKVMGRHKPENIVIEMARENQTTQKGQKNSRERMKRIEEGIKELGSQILKEHPVENTQLQNEKLYLYYLQNGRDMYVDQELDINRLSDYDVDHIVPQSFLKDDSIDNKVLTRSDKARGKSDNVPSEEVVKKMKNYWRQLLNAKLITQRKFDNLTKAERGGLSELDKAGFIKRQLVETRQITKHVAQILDSRMNTKYDENDKLIREVKVITLKSKLVSDFRKDFQFYKVREINNYHHAHDAYLNAVVGTALIKKYPKLESEFVYGDYKVYDVRKMIAKSEQEIGKATAKYFFYSNIMNFFKTEITLANGEIRKRPLIETNGETGEIVWDKGRDFATVRKVLSMPQVNIVKKTEVQTGGFSKESILPKRNSDKLIARKKDWDPKKYGGFDSPTVAYSVLVVAKVEKGKSKKLKSVKELLGITIMERSSFEKNPIDFLEAKGYKEVKKDLIIKLPKYSLFELENGRKRMLASAGELQKGNELALPSKYVNFLYLASHYEKLKGSPEDNEQKQLFVEQHKHYLDEIIEQISEFSKRVILADANLDKVLSAYNKHRDKPIREQAENIIHLFTLTNLGAPAAFKYFDTTIDRKRYTSTKEVLDATLIHQSITGLYETRIDLSQLGGDGGGGGGSGGGGSGGTLNIEDEYRLHETSKEPDVSLGSTWLSDFPQAWAETGGMGLAVRQAPLIIPLKATSTPVSIKQYPMSQEARLGIKPHIQRLLDQGILVPCQSPWNTPLLPVKKPGTNDYRPVQDLREVNKRVEDIHPTVPNPYNLLSGLPPSHQWYTVLDLKDAFFCLRLHPTSQPLFAFEWRDPEMGISGQLTWTRLPQGFKNSPTLFNEALHRDLAGFRIQHPDLILLQYVDDLLLAATSELDCQQGTRALLQTLGDLGYRASAKKAQICQKQVKYLGYLLKEGQRWLTEARKETVMGQPIPKTPRQLREFLGKAGFCRLFIPGFAEMAAPLYPLTKPGTLFNWGPDQQKAFQEIKQALLTAPALGLPDLTKPFELFVDEKQGYAKGVLTQKLGPWRRPVAYLSKKLDPVAAGWPPCLRMVAAIAVLTKDAGKLTMGQPLVILAPHAVEALVKQPPDRWLSNARMTHYQALLLDTDRVQFGPVVALNPATLLPLPEEGLQHDCLDILAEAHGTRSDLMDQPLPDADHTWYTDGSSFLQEGQRKAGAAVTTETEVIWARALPAGTSAQRAELIALTQALKMAEGKKLNVYTDSRYAFATAHIHGEIYRRRGWLTSEGKEIKNKDEILALLKALFLPKRLSIIHCPGHQKGNSAEARGNRMADQAAREVATRETPETSTLLAGKRTADGSEFEKRTADGSEFESPKKKAKVE

SEQ ID NO: 2370 - protein, 2096 aa, synthetic construct
MPAAKRVKLDGGDKKYSIGLDIGTNSVGWAVITDEYKVPSKKFKVLGNTDRHSIKKNLIGALLFDSGETAEATRLKRTARRRYTRRKNRICYLQEIFSNEMAKVDDSFFHRLEESFLVEEDKKHERHPIFGNIVDEVAYHEKYPTIYHLRKKLVDSTDKADLRLIYLALAHMIKFRGHFLIEGDLNPDNSDVDKLFIQLVQTYNQLFEENPINASGVDAKAILSARLSKSRRLENLIAQLPGEKKNGLFGNLIALSLGLTPNFKSNFDLAEDAKLQLSKDTYDDDLDNLLAQIGDQYADLFLAAKNLSDAILLSDILRVNTEITKAPLSASMIKRYDEHHQDLTLLKALVRQQLPEKYKEIFFDQSKNGYAGYIDGGASQEEFYKFIKPILEKMDGTEELLVKLNREDLLRKQRTFDNGSIPHQIHLGELHAILRRQEDFYPFLKDNREKIEKILTFRIPYYVGPLARGNSRFAWMTRKSEETITPWNFEEVVDKGASAQSFIERMTNFDKNLPNEKVLPKHSLLYEYFTVYNELTKVKYVTEGMRKPAFLSGEQKKAIVDLLFKTNRKVTVKQLKEDYFKKIECFDSVEISGVEDRFNASLGTYHDLLKIIKDKDFLDNEENEDILEDIVLTLTLFEDREMIEERLKTYAHLFDDKVMKQLKRRRYTGWGRLSRKLINGIRDKQSGKTILDFLKSDGFANRNFMQLIHDDSLTFKEDIQKAQVSGQGDSLHEHIANLAGSPAIKKGILQTVKVVDELVKVMGRHKPENIVIEMARENQTTQKGQKNSRERMKRIEEGIKELGSQILKEHPVENTQLQNEKLYLYYLQNGRDMYVDQELDINRLSDYDVDHIVPQSFLKDDSIDNKVLTRSDKARGKSDNVPSEEVVKKMKNYWRQLLNAKLITQRKFDNLTKAERGGLSELDKAGFIKRQLVETRQITKHVAQILDSRMNTKYDENDKLIREVKVITLKSKLVSDFRKDFQFYKVREINNYHHAHDAYLNAVVGTALIKKYPKLESEFVYGDYKVYDVRKMIAKSEQEIGKATAKYFFYSNIMNFFKTEITLANGEIRKRPLIETNGETGEIVWDKGRDFATVRKVLSMPQVNIVKKTEVQTGGFSKESILPKRNSDKLIARKKDWDPKKYGGFDSPTVAYSVLVVAKVEKGKSKKLKSVKELLGITIMERSSFEKNPIDFLEAKGYKEVKKDLIIKLPKYSLFELENGRKRMLASAGELQKGNELALPSKYVNFLYLASHYEKLKGSPEDNEQKQLFVEQHKHYLDEIIEQISEFSKRVILADANLDKVLSAYNKHRDKPIREQAENIIHLFTLTNLGAPAAFKYFDTTIDRKRYTSTKEVLDATLIHQSITGLYETRIDLSQLGGDGGEAAAKGGSGSSGGTLNIEDEYRLHETSKEPDVSLGSTWLSDFPQAWAETGGMGLAVRQAPLIIPLKATSTPVSIKQYPMSQEARLGIKPHIQRLLDQGILVPCQSPWNTPLLPVKKPGTNDYRPVQDLREVNKRVEDIHPTVPNPYNLLSGLPPSHQWYTVLDLKDAFFCLRLHPTSQPLFAFEWRDPEMGISGQLTWTRLPQGFKNSPTLFNEALHRDLAGFRIQHPDLILLQYVDDLLLAATSELDCQQGTRALLQTLGDLGYRASAKKAQICQKQVKYLGYLLKEGQRWLTEARKETVMGQPIPKTPRQLREFLGKAGFCRLFIPGFAEMAAPLYPLTKPGTLFNWGPDQQKAFQEIKQALLTAPALGLPDLTKPFELFVDEKQGYAKGVLTQKLGPWRRPVAYLSKKLDPVAAGWPPCLRMVAAIAVLTKDAGKLTMGQPLVILAPHAVEALVKQPPDRWLSNARMTHYQALLLDTDRVQFGPVVALNPATLLPLPEEGLQHDCLDILAEAHGTRSDLMDQPLPDADHTWYTDGSSFLQEGQRKAGAAVTTETEVIWARALPAGTSAQRAELIALTQALKMAEGKKLNVYTDSRYAFATAHIHGEIYRRRGWLTSEGKEIKNKDEILALLKALFLPKRLSIIHCPGHQKGNSAEARGNRMADQAAREVATRETPETSTLLAGKRTADGSEFEKRTADGSEFESPKKKAKVE

SEQ ID NO: 2371 - protein, 2094 aa, synthetic construct
MPAAKRVKLDGGDKKYSIGLDIGTNSVGWAVITDEYKVPSKKFKVLGNTDRHSIKKNLIGALLFDSGETAEATRLKRTARRRYTRRKNRICYLQEIFSNEMAKVDDSFFHRLEESFLVEEDKKHERHPIFGNIVDEVAYHEKYPTIYHLRKKLVDSTDKADLRLIYLALAHMIKFRGHFLIEGDLNPDNSDVDKLFIQLVQTYNQLFEENPINASGVDAKAILSARLSKSRRLENLIAQLPGEKKNGLFGNLIALSLGLTPNFKSNFDLAEDAKLQLSKDTYDDDLDNLLAQIGDQYADLFLAAKNLSDAILLSDILRVNTEITKAPLSASMIKRYDEHHQDLTLLKALVRQQLPEKYKEIFFDQSKNGYAGYIDGGASQEEFYKFIKPILEKMDGTEELLVKLNREDLLRKQRTFDNGSIPHQIHLGELHAILRRQEDFYPFLKDNREKIEKILTFRIPYYVGPLARGNSRFAWMTRKSEETITPWNFEEVVDKGASAQSFIERMTNFDKNLPNEKVLPKHSLLYEYFTVYNELTKVKYVTEGMRKPAFLSGEQKKAIVDLLFKTNRKVTVKQLKEDYFKKIECFDSVEISGVEDRFNASLGTYHDLLKIIKDKDFLDNEENEDILEDIVLTLTLFEDREMIEERLKTYAHLFDDKVMKQLKRRRYTGWGRLSRKLINGIRDKQSGKTILDFLKSDGFANRNFMQLIHDDSLTFKEDIQKAQVSGQGDSLHEHIANLAGSPAIKKGILQTVKVVDELVKVMGRHKPENIVIEMARENQTTQKGQKNSRERMKRIEEGIKELGSQILKEHPVENTQLQNEKLYLYYLQNGRDMYVDQELDINRLSDYDVDHIVPQSFLKDDSIDNKVLTRSDKARGKSDNVPSEEVVKKMKNYWRQLLNAKLITQRKFDNLTKAERGGLSELDKAGFIKRQLVETRQITKHVAQILDSRMNTKYDENDKLIREVKVITLKSKLVSDFRKDFQFYKVREINNYHHAHDAYLNAVVGTALIKKYPKLESEFVYGDYKVYDVRKMIAKSEQEIGKATAKYFFYSNIMNFFKTEITLANGEIRKRPLIETNGETGEIVWDKGRDFATVRKVLSMPQVNIVKKTEVQTGGFSKESILPKRNSDKLIARKKDWDPKKYGGFDSPTVAYSVLVVAKVEKGKSKKLKSVKELLGITIMERSSFEKNPIDFLEAKGYKEVKKDLIIKLPKYSLFELENGRKRMLASAGELQKGNELALPSKYVNFLYLASHYEKLKGSPEDNEQKQLFVEQHKHYLDEIIEQISEFSKRVILADANLDKVLSAYNKHRDKPIREQAENIIHLFTLTNLGAPAAFKYFDTTIDRKRYTSTKEVLDATLIHQSITGLYETRIDLSQLGGDGGGGSGGGGSSGGTLNIEDEYRLHETSKEPDVSLGSTWLSDFPQAWAETGGMGLAVRQAPLIIPLKATSTPVSIKQYPMSQEARLGIKPHIQRLLDQGILVPCQSPWNTPLLPVKKPGTNDYRPVQDLREVNKRVEDIHPTVPNPYNLLSGLPPSHQWYTVLDLKDAFFCLRLHPTSQPLFAFEWRDPEMGISGQLTWTRLPQGFKNSPTLFNEALHRDLAGFRIQHPDLILLQYVDDLLLAATSELDCQQGTRALLQTLGDLGYRASAKKAQICQKQVKYLGYLLKEGQRWLTEARKETVMGQPIPKTPRQLREFLGKAGFCRLFIPGFAEMAAPLYPLTKPGTLFNWGPDQQKAFQEIKQALLTAPALGLPDLTKPFELFVDEKQGYAKGVLTQKLGPWRRPVAYLSKKLDPVAAGWPPCLRMVAAIAVLTKDAGKLTMGQPLVILAPHAVEALVKQPPDRWLSNARMTHYQALLLDTDRVQFGPVVALNPATLLPLPEEGLQHDCLDILAEAHGTRSDLMDQPLPDADHTWYTDGSSFLQEGQRKAGAAVTTETEVIWARALPAGTSAQRAELIALTQALKMAEGKKLNVYTDSRYAFATAHIHGEIYRRRGWLTSEGKEIKNKDEILALLKALFLPKRLSIIHCPGHQKGNSAEARGNRMADQAAREVATRETPETSTLLAGKRTADGSEFEKRTADGSEFESPKKKAKVE

SEQ ID NO: 2372 - protein, 2096 aa, synthetic construct
MPAAKRVKLDGGDKKYSIGLDIGTNSVGWAVITDEYKVPSKKFKVLGNTDRHSIKKNLIGALLFDSGETAEATRLKRTARRRYTRRKNRICYLQEIFSNEMAKVDDSFFHRLEESFLVEEDKKHERHPIFGNIVDEVAYHEKYPTIYHLRKKLVDSTDKADLRLIYLALAHMIKFRGHFLIEGDLNPDNSDVDKLFIQLVQTYNQLFEENPINASGVDAKAILSARLSKSRRLENLIAQLPGEKKNGLFGNLIALSLGLTPNFKSNFDLAEDAKLQLSKDTYDDDLDNLLAQIGDQYADLFLAAKNLSDAILLSDILRVNTEITKAPLSASMIKRYDEHHQDLTLLKALVRQQLPEKYKEIFFDQSKNGYAGYIDGGASQEEFYKFIKPILEKMDGTEELLVKLNREDLLRKQRTFDNGSIPHQIHLGELHAILRRQEDFYPFLKDNREKIEKILTFRIPYYVGPLARGNSRFAWMTRKSEETITPWNFEEVVDKGASAQSFIERMTNFDKNLPNEKVLPKHSLLYEYFTVYNELTKVKYVTEGMRKPAFLSGEQKKAIVDLLFKTNRKVTVKQLKEDYFKKIECFDSVEISGVEDRFNASLGTYHDLLKIIKDKDFLDNEENEDILEDIVLTLTLFEDREMIEERLKTYAHLFDDKVMKQLKRRRYTGWGRLSRKLINGIRDKQSGKTILDFLKSDGFANRNFMQLIHDDSLTFKEDIQKAQVSGQGDSLHEHIANLAGSPAIKKGILQTVKVVDELVKVMGRHKPENIVIEMARENQTTQKGQKNSRERMKRIEEGIKELGSQILKEHPVENTQLQNEKLYLYYLQNGRDMYVDQELDINRLSDYDVDHIVPQSFLKDDSIDNKVLTRSDKARGKSDNVPSEEVVKKMKNYWRQLLNAKLITQRKFDNLTKAERGGLSELDKAGFIKRQLVETRQITKHVAQILDSRMNTKYDENDKLIREVKVITLKSKLVSDFRKDFQFYKVREINNYHHAHDAYLNAVVGTALIKKYPKLESEFVYGDYKVYDVRKMIAKSEQEIGKATAKYFFYSNIMNFFKTEITLANGEIRKRPLIETNGETGEIVWDKGRDFATVRKVLSMPQVNIVKKTEVQTGGFSKESILPKRNSDKLIARKKDWDPKKYGGFDSPTVAYSVLVVAKVEKGKSKKLKSVKELLGITIMERSSFEKNPIDFLEAKGYKEVKKDLIIKLPKYSLFELENGRKRMLASAGELQKGNELALPSKYVNFLYLASHYEKLKGSPEDNEQKQLFVEQHKHYLDEIIEQISEFSKRVILADANLDKVLSAYNKHRDKPIREQAENIIHLFTLTNLGAPAAFKYFDTTIDRKRYTSTKEVLDATLIHQSITGLYETRIDLSQLGGDGGEAAAKGGSPAPGGTLNIEDEYRLHETSKEPDVSLGSTWLSDFPQAWAETGGMGLAVRQAPLIIPLKATSTPVSIKQYPMSQEARLGIKPHIQRLLDQGILVPCQSPWNTPLLPVKKPGTNDYRPVQDLREVNKRVEDIHPTVPNPYNLLSGLPPSHQWYTVLDLKDAFFCLRLHPTSQPLFAFEWRDPEMGISGQLTWTRLPQGFKNSPTLFNEALHRDLAGFRIQHPDLILLQYVDDLLLAATSELDCQQGTRALLQTLGDLGYRASAKKAQICQKQVKYLGYLLKEGQRWLTEARKETVMGQPIPKTPRQLREFLGKAGFCRLFIPGFAEMAAPLYPLTKPGTLFNWGPDQQKAFQEIKQALLTAPALGLPDLTKPFELFVDEKQGYAKGVLTQKLGPWRRPVAYLSKKLDPVAAGWPPCLRMVAAIAVLTKDAGKLTMGQPLVILAPHAVEALVKQPPDRWLSNARMTHYQALLLDTDRVQFGPVVALNPATLLPLPEEGLQHDCLDILAEAHGTRSDLMDQPLPDADHTWYTDGSSFLQEGQRKAGAAVTTETEVIWARALPAGTSAQRAELIALTQALKMAEGKKLNVYTDSRYAFATAHIHGEIYRRRGWLTSEGKEIKNKDEILALLKALFLPKRLSIIHCPGHQKGNSAEARGNRMADQAAREVATRETPETSTLLAGKRTADGSEFEKRTADGSEFESPKKKAKVE

SEQ ID NO: 2373 - protein, 2100 aa, synthetic construct
MPAAKRVKLDGGDKKYSIGLDIGTNSVGWAVITDEYKVPSKKFKVLGNTDRHSIKKNLIGALLFDSGETAEATRLKRTARRRYTRRKNRICYLQEIFSNEMAKVDDSFFHRLEESFLVEEDKKHERHPIFGNIVDEVAYHEKYPTIYHLRKKLVDSTDKADLRLIYLALAHMIKFRGHFLIEGDLNPDNSDVDKLFIQLVQTYNQLFEENPINASGVDAKAILSARLSKSRRLENLIAQLPGEKKNGLFGNLIALSLGLTPNFKSNFDLAEDAKLQLSKDTYDDDLDNLLAQIGDQYADLFLAAKNLSDAILLSDILRVNTEITKAPLSASMIKRYDEHHQDLTLLKALVRQQLPEKYKEIFFDQSKNGYAGYIDGGASQEEFYKFIKPILEKMDGTEELLVKLNREDLLRKQRTFDNGSIPHQIHLGELHAILRRQEDFYPFLKDNREKIEKILTFRIPYYVGPLARGNSRFAWMTRKSEETITPWNFEEVVDKGASAQSFIERMTNFDKNLPNEKVLPKHSLLYEYFTVYNELTKVKYVTEGMRKPAFLSGEQKKAIVDLLFKTNRKVTVKQLKEDYFKKIECFDSVEISGVEDRFNASLGTYHDLLKIIKDKDFLDNEENEDILEDIVLTLTLFEDREMIEERLKTYAHLFDDKVMKQLKRRRYTGWGRLSRKLINGIRDKQSGKTILDFLKSDGFANRNFMQLIHDDSLTFKEDIQKAQVSGQGDSLHEHIANLAGSPAIKKGILQTVKVVDELVKVMGRHKPENIVIEMARENQTTQKGQKNSRERMKRIEEGIKELGSQILKEHPVENTQLQNEKLYLYYLQNGRDMYVDQELDINRLSDYDVDHIVPQSFLKDDSIDNKVLTRSDKARGKSDNVPSEEVVKKMKNYWRQLLNAKLITQRKFDNLTKAERGGLSELDKAGFIKRQLVETRQITKHVAQILDSRMNTKYDENDKLIREVKVITLKSKLVSDFRKDFQFYKVREINNYHHAHDAYLNAVVGTALIKKYPKLESEFVYGDYKVYDVRKMIAKSEQEIGKATAKYFFYSNIMNFFKTEITLANGEIRKRPLIETNGETGEIVWDKGRDFATVRKVLSMPQVNIVKKTEVQTGGFSKESILPKRNSDKLIARKKDWDPKKYGGFDSPTVAYSVLVVAKVEKGKSKKLKSVKELLGITIMERSSFEKNPIDFLEAKGYKEVKKDLIIKLPKYSLFELENGRKRMLASAGELQKGNELALPSKYVNFLYLASHYEKLKGSPEDNEQKQLFVEQHKHYLDEIIEQISEFSKRVILADANLDKVLSAYNKHRDKPIREQAENIIHLFTLTNLGAPAAFKYFDTTIDRKRYTSTKEVLDATLIHQSITGLYETRIDLSQLGGDGGEAAAKEAAAKEAAAKGGTLNIEDEYRLHETSKEPDVSLGSTWLSDFPQAWAETGGMGLAVRQAPLIIPLKATSTPVSIKQYPMSQEARLGIKPHIQRLLDQGILVPCQSPWNTPLLPVKKPGTNDYRPVQDLREVNKRVEDIHPTVPNPYNLLSGLPPSHQWYTVLDLKDAFFCLRLHPTSQPLFAFEWRDPEMGISGQLTWTRLPQGFKNSPTLFNEALHRDLAGFRIQHPDLILLQYVDDLLLAATSELDCQQGTRALLQTLGDLGYRASAKKAQICQKQVKYLGYLLKEGQRWLTEARKETVMGQPIPKTPRQLREFLGKAGFCRLFIPGFAEMAAPLYPLTKPGTLFNWGPDQQKAFQEIKQALLTAPALGLPDLTKPFELFVDEKQGYAKGVLTQKLGPWRRPVAYLSKKLDPVAAGWPPCLRMVAAIAVLTKDAGKLTMGQPLVILAPHAVEALVKQPPDRWLSNARMTHYQALLLDTDRVQFGPVVALNPATLLPLPEEGLQHDCLDILAEAHGTRSDLMDQPLPDADHTWYTDGSSFLQEGQRKAGAAVTTETEVIWARALPAGTSAQRAELIALTQALKMAEGKKLNVYTDSRYAFATAHIHGEIYRRRGWLTSEGKEIKNKDEILALLKALFLPKRLSIIHCPGHQKGNSAEARGNRMADQAAREVATRETPETSTLLAGKRTADGSEFEKRTADGSEFESPKKKAKVE

SEQ ID NO: 2374 - protein, 2100 aa, synthetic construct
MPAAKRVKLDGGDKKYSIGLDIGTNSVGWAVITDEYKVPSKKFKVLGNTDRHSIKKNLIGALLFDSGETAEATRLKRTARRRYTRRKNRICYLQEIFSNEMAKVDDSFFHRLEESFLVEEDKKHERHPIFGNIVDEVAYHEKYPTIYHLRKKLVDSTDKADLRLIYLALAHMIKFRGHFLIEGDLNPDNSDVDKLFIQLVQTYNQLFEENPINASGVDAKAILSARLSKSRRLENLIAQLPGEKKNGLFGNLIALSLGLTPNFKSNFDLAEDAKLQLSKDTYDDDLDNLLAQIGDQYADLFLAAKNLSDAILLSDILRVNTEITKAPLSASMIKRYDEHHQDLTLLKALVRQQLPEKYKEIFFDQSKNGYAGYIDGGASQEEFYKFIKPILEKMDGTEELLVKLNREDLLRKQRTFDNGSIPHQIHLGELHAILRRQEDFYPFLKDNREKIEKILTFRIPYYVGPLARGNSRFAWMTRKSEETITPWNFEEVVDKGASAQSFIERMTNFDKNLPNEKVLPKHSLLYEYFTVYNELTKVKYVTEGMRKPAFLSGEQKKAIVDLLFKTNRKVTVKQLKEDYFKKIECFDSVEISGVEDRFNASLGTYHDLLKIIKDKDFLDNEENEDILEDIVLTLTLFEDREMIEERLKTYAHLFDDKVMKQLKRRRYTGWGRLSRKLINGIRDKQSGKTILDFLKSDGFANRNFMQLIHDDSLTFKEDIQKAQVSGQGDSLHEHIANLAGSPAIKKGILQTVKVVDELVKVMGRHKPENIVIEMARENQTTQKGQKNSRERMKRIEEGIKELGSQILKEHPVENTQLQNEKLYLYYLQNGRDMYVDQELDINRLSDYDVDHIVPQSFLKDDSIDNKVLTRSDKARGKSDNVPSEEVVKKMKNYWRQLLNAKLITQRKFDNLTKAERGGLSELDKAGFIKRQLVETRQITKHVAQILDSRMNTKYDENDKLIREVKVITLKSKLVSDFRKDFQFYKVREINNYHHAHDAYLNAVVGTALIKKYPKLESEFVYGDYKVYDVRKMIAKSEQEIGKATAKYFFYSNIMNFFKTEITLANGEIRKRPLIETNGETGEIVWDKGRDFATVRKVLSMPQVNIVKKTEVQTGGFSKESILPKRNSDKLIARKKDWDPKKYGGFDSPTVAYSVLVVAKVEKGKSKKLKSVKELLGITIMERSSFEKNPIDFLEAKGYKEVKKDLIIKLPKYSLFELENGRKRMLASAGELQKGNELALPSKYVNFLYLASHYEKLKGSPEDNEQKQLFVEQHKHYLDEIIEQISEFSKRVILADANLDKVLSAYNKHRDKPIREQAENIIHLFTLTNLGAPAAFKYFDTTIDRKRYTSTKEVLDATLIHQSITGLYETRIDLSQLGGDGGGGGGSEAAAKGGGGSGGTLNIEDEYRLHETSKEPDVSLGSTWLSDFPQAWAETGGMGLAVRQAPLIIPLKATSTPVSIKQYPMSQEARLGIKPHIQRLLDQGILVPCQSPWNTPLLPVKKPGTNDYRPVQDLREVNKRVEDIHPTVPNPYNLLSGLPPSHQWYTVLDLKDAFFCLRLHPTSQPLFAFEWRDPEMGISGQLTWTRLPQGFKNSPTLFNEALHRDLAGFRIQHPDLILLQYVDDLLLAATSELDCQQGTRALLQTLGDLGYRASAKKAQICQKQVKYLGYLLKEGQRWLTEARKETVMGQPIPKTPRQLREFLGKAGFCRLFIPGFAEMAAPLYPLTKPGTLFNWGPDQQKAFQEIKQALLTAPALGLPDLTKPFELFVDEKQGYAKGVLTQKLGPWRRPVAYLSKKLDPVAAGWPPCLRMVAAIAVLTKDAGKLTMGQPLVILAPHAVEALVKQPPDRWLSNARMTHYQALLLDTDRVQFGPVVALNPATLLPLPEEGLQHDCLDILAEAHGTRSDLMDQPLPDADHTWYTDGSSFLQEGQRKAGAAVTTETEVIWARALPAGTSAQRAELIALTQALKMAEGKKLNVYTDSRYAFATAHIHGEIYRRRGWLTSEGKEIKNKDEILALLKALFLPKRLSIIHCPGHQKGNSAEARGNRMADQAAREVATRETPETSTLLAGKRTADGSEFEKRTADGSEFESPKKKAKVE

SEQ ID NO: 2375 - protein, 2088 aa, synthetic construct
MPAAKRVKLDGGDKKYSIGLDIGTNSVGWAVITDEYKVPSKKFKVLGNTDRHSIKKNLIGALLFDSGETAEATRLKRTARRRYTRRKNRICYLQEIFSNEMAKVDDSFFHRLEESFLVEEDKKHERHPIFGNIVDEVAYHEKYPTIYHLRKKLVDSTDKADLRLIYLALAHMIKFRGHFLIEGDLNPDNSDVDKLFIQLVQTYNQLFEENPINASGVDAKAILSARLSKSRRLENLIAQLPGEKKNGLFGNLIALSLGLTPNFKSNFDLAEDAKLQLSKDTYDDDLDNLLAQIGDQYADLFLAAKNLSDAILLSDILRVNTEITKAPLSASMIKRYDEHHQDLTLLKALVRQQLPEKYKEIFFDQSKNGYAGYIDGGASQEEFYKFIKPILEKMDGTEELLVKLNREDLLRKQRTFDNGSIPHQIHLGELHAILRRQEDFYPFLKDNREKIEKILTFRIPYYVGPLARGNSRFAWMTRKSEETITPWNFEEVVDKGASAQSFIERMTNFDKNLPNEKVLPKHSLLYEYFTVYNELTKVKYVTEGMRKPAFLSGEQKKAIVDLLFKTNRKVTVKQLKEDYFKKIECFDSVEISGVEDRFNASLGTYHDLLKIIKDKDFLDNEENEDILEDIVLTLTLFEDREMIEERLKTYAHLFDDKVMKQLKRRRYTGWGRLSRKLINGIRDKQSGKTILDFLKSDGFANRNFMQLIHDDSLTFKEDIQKAQVSGQGDSLHEHIANLAGSPAIKKGILQTVKVVDELVKVMGRHKPENIVIEMARENQTTQKGQKNSRERMKRIEEGIKELGSQILKEHPVENTQLQNEKLYLYYLQNGRDMYVDQELDINRLSDYDVDHIVPQSFLKDDSIDNKVLTRSDKARGKSDNVPSEEVVKKMKNYWRQLLNAKLITQRKFDNLTKAERGGLSELDKAGFIKRQLVETRQITKHVAQILDSRMNTKYDENDKLIREVKVITLKSKLVSDFRKDFQFYKVREINNYHHAHDAYLNAVVGTALIKKYPKLESEFVYGDYKVYDVRKMIAKSEQEIGKATAKYFFYSNIMNFFKTEITLANGEIRKRPLIETNGETGEIVWDKGRDFATVRKVLSMPQVNIVKKTEVQTGGFSKESILPKRNSDKLIARKKDWDPKKYGGFDSPTVAYSVLVVAKVEKGKSKKLKSVKELLGITIMERSSFEKNPIDFLEAKGYKEVKKDLIIKLPKYSLFELENGRKRMLASAGELQKGNELALPSKYVNFLYLASHYEKLKGSPEDNEQKQLFVEQHKHYLDEIIEQISEFSKRVILADANLDKVLSAYNKHRDKPIREQAENIIHLFTLTNLGAPAAFKYFDTTIDRKRYTSTKEVLDATLIHQSITGLYETRIDLSQLGGDGGGGGGGTLNIEDEYRLHETSKEPDVSLGSTWLSDFPQAWAETGGMGLAVRQAPLIIPLKATSTPVSIKQYPMSQEARLGIKPHIQRLLDQGILVPCQSPWNTPLLPVKKPGTNDYRPVQDLREVNKRVEDIHPTVPNPYNLLSGLPPSHQWYTVLDLKDAFFCLRLHPTSQPLFAFEWRDPEMGISGQLTWTRLPQGFKNSPTLFNEALHRDLAGFRIQHPDLILLQYVDDLLLAATSELDCQQGTRALLQTLGDLGYRASAKKAQICQKQVKYLGYLLKEGQRWLTEARKETVMGQPIPKTPRQLREFLGKAGFCRLFIPGFAEMAAPLYPLTKPGTLFNWGPDQQKAFQEIKQALLTAPALGLPDLTKPFELFVDEKQGYAKGVLTQKLGPWRRPVAYLSKKLDPVAAGWPPCLRMVAAIAVLTKDAGKLTMGQPLVILAPHAVEALVKQPPDRWLSNARMTHYQALLLDTDRVQFGPVVALNPATLLPLPEEGLQHDCLDILAEAHGTRSDLMDQPLPDADHTWYTDGSSFLQEGQRKAGAAVTTETEVIWARALPAGTSAQRAELIALTQALKMAEGKKLNVYTDSRYAFATAHIHGEIYRRRGWLTSEGKEIKNKDEILALLKALFLPKRLSIIHCPGHQKGNSAEARGNRMADQAAREVATRETPETSTLLAGKRTADGSEFEKRTADGSEFESPKKKAKVE

SEQ ID NO: 2376 - protein, 2118 aa, synthetic construct
MPAAKRVKLDGGDKKYSIGLDIGTNSVGWAVITDEYKVPSKKFKVLGNTDRHSIKKNLIGALLFDSGETAEATRLKRTARRRYTRRKNRICYLQEIFSNEMAKVDDSFFHRLEESFLVEEDKKHERHPIFGNIVDEVAYHEKYPTIYHLRKKLVDSTDKADLRLIYLALAHMIKFRGHFLIEGDLNPDNSDVDKLFIQLVQTYNQLFEENPINASGVDAKAILSARLSKSRRLENLIAQLPGEKKNGLFGNLIALSLGLTPNFKSNFDLAEDAKLQLSKDTYDDDLDNLLAQIGDQYADLFLAAKNLSDAILLSDILRVNTEITKAPLSASMIKRYDEHHQDLTLLKALVRQQLPEKYKEIFFDQSKNGYAGYIDGGASQEEFYKFIKPILEKMDGTEELLVKLNREDLLRKQRTFDNGSIPHQIHLGELHAILRRQEDFYPFLKDNREKIEKILTFRIPYYVGPLARGNSRFAWMTRKSEETITPWNFEEVVDKGASAQSFIERMTNFDKNLPNEKVLPKHSLLYEYFTVYNELTKVKYVTEGMRKPAFLSGEQKKAIVDLLFKTNRKVTVKQLKEDYFKKIECFDSVEISGVEDRFNASLGTYHDLLKIIKDKDFLDNEENEDILEDIVLTLTLFEDREMIEERLKTYAHLFDDKVMKQLKRRRYTGWGRLSRKLINGIRDKQSGKTILDFLKSDGFANRNFMQLIHDDSLTFKEDIQKAQVSGQGDSLHEHIANLAGSPAIKKGILQTVKVVDELVKVMGRHKPENIVIEMARENQTTQKGQKNSRERMKRIEEGIKELGSQILKEHPVENTQLQNEKLYLYYLQNGRDMYVDQELDINRLSDYDVDHIVPQSFLKDDSIDNKVLTRSDKARGKSDNVPSEEVVKKMKNYWRQLLNAKLITQRKFDNLTKAERGGLSELDKAGFIKRQLVETRQITKHVAQILDSRMNTKYDENDKLIREVKVITLKSKLVSDFRKDFQFYKVREINNYHHAHDAYLNAVVGTALIKKYPKLESEFVYGDYKVYDVRKMIAKSEQEIGKATAKYFFYSNIMNFFKTEITLANGEIRKRPLIETNGETGEIVWDKGRDFATVRKVLSMPQVNIVKKTEVQTGGFSKESILPKRNSDKLIARKKDWDPKKYGGFDSPTVAYSVLVVAKVEKGKSKKLKSVKELLGITIMERSSFEKNPIDFLEAKGYKEVKKDLIIKLPKYSLFELENGRKRMLASAGELQKGNELALPSKYVNFLYLASHYEKLKGSPEDNEQKQLFVEQHKHYLDEIIEQISEFSKRVILADANLDKVLSAYNKHRDKPIREQAENIIHLFTLTNLGAPAAFKYFDTTIDRKRYTSTKEVLDATLIHQSITGLYETRIDLSQLGGDGGSGGSSGGSSGSETPGTSESATPESSGGSSGGSSGGTLNIEDEYRLHETSKEPDVSLGSTWLSDFPQAWAETGGMGLAVRQAPLIIPLKATSTPVSIKQYPMSQEARLGIKPHIQRLLDQGILVPCQSPWNTPLLPVKKPGTNDYRPVQDLREVNKRVEDIHPTVPNPYNLLSGLPPSHQWYTVLDLKDAFFCLRLHPTSQPLFAFEWRDPEMGISGQLTWTRLPQGFKNSPTLFNEALHRDLAGFRIQHPDLILLQYVDDLLLAATSELDCQQGTRALLQTLGDLGYRASAKKAQICQKQVKYLGYLLKEGQRWLTEARKETVMGQPIPKTPRQLREFLGKAGFCRLFIPGFAEMAAPLYPLTKPGTLFNWGPDQQKAFQEIKQALLTAPALGLPDLTKPFELFVDEKQGYAKGVLTQKLGPWRRPVAYLSKKLDPVAAGWPPCLRMVAAIAVLTKDAGKLTMGQPLVILAPHAVEALVKQPPDRWLSNARMTHYQALLLDTDRVQFGPVVALNPATLLPLPEEGLQHDCLDILAEAHGTRSDLMDQPLPDADHTWYTDGSSFLQEGQRKAGAAVTTETEVIWARALPAGTSAQRAELIALTQALKMAEGKKLNVYTDSRYAFATAHIHGEIYRRRGWLTSEGKEIKNKDEILALLKALFLPKRLSIIHCPGHQKGNSAEARGNRMADQAAREVATRETPETSTLLAGKRTADGSEFEKRTADGSEFESPKKKAKVE

SEQ ID NO: 2377 - protein, 2096 aa, synthetic construct
MPAAKRVKLDGGDKKYSIGLDIGTNSVGWAVITDEYKVPSKKFKVLGNTDRHSIKKNLIGALLFDSGETAEATRLKRTARRRYTRRKNRICYLQEIFSNEMAKVDDSFFHRLEESFLVEEDKKHERHPIFGNIVDEVAYHEKYPTIYHLRKKLVDSTDKADLRLIYLALAHMIKFRGHFLIEGDLNPDNSDVDKLFIQLVQTYNQLFEENPINASGVDAKAILSARLSKSRRLENLIAQLPGEKKNGLFGNLIALSLGLTPNFKSNFDLAEDAKLQLSKDTYDDDLDNLLAQIGDQYADLFLAAKNLSDAILLSDILRVNTEITKAPLSASMIKRYDEHHQDLTLLKALVRQQLPEKYKEIFFDQSKNGYAGYIDGGASQEEFYKFIKPILEKMDGTEELLVKLNREDLLRKQRTFDNGSIPHQIHLGELHAILRRQEDFYPFLKDNREKIEKILTFRIPYYVGPLARGNSRFAWMTRKSEETITPWNFEEVVDKGASAQSFIERMTNFDKNLPNEKVLPKHSLLYEYFTVYNELTKVKYVTEGMRKPAFLSGEQKKAIVDLLFKTNRKVTVKQLKEDYFKKIECFDSVEISGVEDRFNASLGTYHDLLKIIKDKDFLDNEENEDILEDIVLTLTLFEDREMIEERLKTYAHLFDDKVMKQLKRRRYTGWGRLSRKLINGIRDKQSGKTILDFLKSDGFANRNFMQLIHDDSLTFKEDIQKAQVSGQGDSLHEHIANLAGSPAIKKGILQTVKVVDELVKVMGRHKPENIVIEMARENQTTQKGQKNSRERMKRIEEGIKELGSQILKEHPVENTQLQNEKLYLYYLQNGRDMYVDQELDINRLSDYDVDHIVPQSFLKDDSIDNKVLTRSDKARGKSDNVPSEEVVKKMKNYWRQLLNAKLITQRKFDNLTKAERGGLSELDKAGFIKRQLVETRQITKHVAQILDSRMNTKYDENDKLIREVKVITLKSKLVSDFRKDFQFYKVREINNYHHAHDAYLNAVVGTALIKKYPKLESEFVYGDYKVYDVRKMIAKSEQEIGKATAKYFFYSNIMNFFKTEITLANGEIRKRPLIETNGETGEIVWDKGRDFATVRKVLSMPQVNIVKKTEVQTGGFSKESILPKRNSDKLIARKKDWDPKKYGGFDSPTVAYSVLVVAKVEKGKSKKLKSVKELLGITIMERSSFEKNPIDFLEAKGYKEVKKDLIIKLPKYSLFELENGRKRMLASAGELQKGNELALPSKYVNFLYLASHYEKLKGSPEDNEQKQLFVEQHKHYLDEIIEQISEFSKRVILADANLDKVLSAYNKHRDKPIREQAENIIHLFTLTNLGAPAAFKYFDTTIDRKRYTSTKEVLDATLIHQSITGLYETRIDLSQLGGDGGPAPGGGEAAAKGGTLNIEDEYRLHETSKEPDVSLGSTWLSDFPQAWAETGGMGLAVRQAPLIIPLKATSTPVSIKQYPMSQEARLGIKPHIQRLLDQGILVPCQSPWNTPLLPVKKPGTNDYRPVQDLREVNKRVEDIHPTVPNPYNLLSGLPPSHQWYTVLDLKDAFFCLRLHPTSQPLFAFEWRDPEMGISGQLTWTRLPQGFKNSPTLFNEALHRDLAGFRIQHPDLILLQYVDDLLLAATSELDCQQGTRALLQTLGDLGYRASAKKAQICQKQVKYLGYLLKEGQRWLTEARKETVMGQPIPKTPRQLREFLGKAGFCRLFIPGFAEMAAPLYPLTKPGTLFNWGPDQQKAFQEIKQALLTAPALGLPDLTKPFELFVDEKQGYAKGVLTQKLGPWRRPVAYLSKKLDPVAAGWPPCLRMVAAIAVLTKDAGKLTMGQPLVILAPHAVEALVKQPPDRWLSNARMTHYQALLLDTDRVQFGPVVALNPATLLPLPEEGLQHDCLDILAEAHGTRSDLMDQPLPDADHTWYTDGSSFLQEGQRKAGAAVTTETEVIWARALPAGTSAQRAELIALTQALKMAEGKKLNVYTDSRYAFATAHIHGEIYRRRGWLTSEGKEIKNKDEILALLKALFLPKRLSIIHCPGHQKGNSAEARGNRMADQAAREVATRETPETSTLLAGKRTADGSEFEKRTADGSEFESPKKKAKVE

SEQ ID NO: 2378 - protein, 2090 aa, synthetic construct
MPAAKRVKLDGGDKKYSIGLDIGTNSVGWAVITDEYKVPSKKFKVLGNTDRHSIKKNLIGALLFDSGETAEATRLKRTARRRYTRRKNRICYLQEIFSNEMAKVDDSFFHRLEESFLVEEDKKHERHPIFGNIVDEVAYHEKYPTIYHLRKKLVDSTDKADLRLIYLALAHMIKFRGHFLIEGDLNPDNSDVDKLFIQLVQTYNQLFEENPINASGVDAKAILSARLSKSRRLENLIAQLPGEKKNGLFGNLIALSLGLTPNFKSNFDLAEDAKLQLSKDTYDDDLDNLLAQIGDQYADLFLAAKNLSDAILLSDILRVNTEITKAPLSASMIKRYDEHHQDLTLLKALVRQQLPEKYKEIFFDQSKNGYAGYIDGGASQEEFYKFIKPILEKMDGTEELLVKLNREDLLRKQRTFDNGSIPHQIHLGELHAILRRQEDFYPFLKDNREKIEKILTFRIPYYVGPLARGNSRFAWMTRKSEETITPWNFEEVVDKGASAQSFIERMTNFDKNLPNEKVLPKHSLLYEYFTVYNELTKVKYVTEGMRKPAFLSGEQKKAIVDLLFKTNRKVTVKQLKEDYFKKIECFDSVEISGVEDRFNASLGTYHDLLKIIKDKDFLDNEENEDILEDIVLTLTLFEDREMIEERLKTYAHLFDDKVMKQLKRRRYTGWGRLSRKLINGIRDKQSGKTILDFLKSDGFANRNFMQLIHDDSLTFKEDIQKAQVSGQGDSLHEHIANLAGSPAIKKGILQTVKVVDELVKVMGRHKPENIVIEMARENQTTQKGQKNSRERMKRIEEGIKELGSQILKEHPVENTQLQNEKLYLYYLQNGRDMYVDQELDINRLSDYDVDHIVPQSFLKDDSIDNKVLTRSDKARGKSDNVPSEEVVKKMKNYWRQLLNAKLITQRKFDNLTKAERGGLSELDKAGFIKRQLVETRQITKHVAQILDSRMNTKYDENDKLIREVKVITLKSKLVSDFRKDFQFYKVREINNYHHAHDAYLNAVVGTALIKKYPKLESEFVYGDYKVYDVRKMIAKSEQEIGKATAKYFFYSNIMNFFKTEITLANGEIRKRPLIETNGETGEIVWDKGRDFATVRKVLSMPQVNIVKKTEVQTGGFSKESILPKRNSDKLIARKKDWDPKKYGGFDSPTVAYSVLVVAKVEKGKSKKLKSVKELLGITIMERSSFEKNPIDFLEAKGYKEVKKDLIIKLPKYSLFELENGRKRMLASAGELQKGNELALPSKYVNFLYLASHYEKLKGSPEDNEQKQLFVEQHKHYLDEIIEQISEFSKRVILADANLDKVLSAYNKHRDKPIREQAENIIHLFTLTNLGAPAAFKYFDTTIDRKRYTSTKEVLDATLIHQSITGLYETRIDLSQLGGDGGGGGGGGGTLNIEDEYRLHETSKEPDVSLGSTWLSDFPQAWAETGGMGLAVRQAPLIIPLKATSTPVSIKQYPMSQEARLGIKPHIQRLLDQGILVPCQSPWNTPLLPVKKPGTNDYRPVQDLREVNKRVEDIHPTVPNPYNLLSGLPPSHQWYTVLDLKDAFFCLRLHPTSQPLFAFEWRDPEMGISGQLTWTRLPQGFKNSPTLFNEALHRDLAGFRIQHPDLILLQYVDDLLLAATSELDCQQGTRALLQTLGDLGYRASAKKAQICQKQVKYLGYLLKEGQRWLTEARKETVMGQPIPKTPRQLREFLGKAGFCRLFIPGFAEMAAPLYPLTKPGTLFNWGPDQQKAFQEIKQALLTAPALGLPDLTKPFELFVDEKQGYAKGVLTQKLGPWRRPVAYLSKKLDPVAAGWPPCLRMVAAIAVLTKDAGKLTMGQPLVILAPHAVEALVKQPPDRWLSNARMTHYQALLLDTDRVQFGPVVALNPATLLPLPEEGLQHDCLDILAEAHGTRSDLMDQPLPDADHTWYTDGSSFLQEGQRKAGAAVTTETEVIWARALPAGTSAQRAELIALTQALKMAEGKKLNVYTDSRYAFATAHIHGEIYRRRGWLTSEGKEIKNKDEILALLKALFLPKRLSIIHCPGHQKGNSAEARGNRMADQAAREVATRETPETSTLLAGKRTADGSEFEKRTADGSEFESPKKKAKVE

SEQ ID NO: 2379 - protein, 2094 aa, synthetic construct
MPAAKRVKLDGGDKKYSIGLDIGTNSVGWAVITDEYKVPSKKFKVLGNTDRHSIKKNLIGALLFDSGETAEATRLKRTARRRYTRRKNRICYLQEIFSNEMAKVDDSFFHRLEESFLVEEDKKHERHPIFGNIVDEVAYHEKYPTIYHLRKKLVDSTDKADLRLIYLALAHMIKFRGHFLIEGDLNPDNSDVDKLFIQLVQTYNQLFEENPINASGVDAKAILSARLSKSRRLENLIAQLPGEKKNGLFGNLIALSLGLTPNFKSNFDLAEDAKLQLSKDTYDDDLDNLLAQIGDQYADLFLAAKNLSDAILLSDILRVNTEITKAPLSASMIKRYDEHHQDLTLLKALVRQQLPEKYKEIFFDQSKNGYAGYIDGGASQEEFYKFIKPILEKMDGTEELLVKLNREDLLRKQRTFDNGSIPHQIHLGELHAILRRQEDFYPFLKDNREKIEKILTFRIPYYVGPLARGNSRFAWMTRKSEETITPWNFEEVVDKGASAQSFIERMTNFDKNLPNEKVLPKHSLLYEYFTVYNELTKVKYVTEGMRKPAFLSGEQKKAIVDLLFKTNRKVTVKQLKEDYFKKIECFDSVEISGVEDRFNASLGTYHDLLKIIKDKDFLDNEENEDILEDIVLTLTLFEDREMIEERLKTYAHLFDDKVMKQLKRRRYTGWGRLSRKLINGIRDKQSGKTILDFLKSDGFANRNFMQLIHDDSLTFKEDIQKAQVSGQGDSLHEHIANLAGSPAIKKGILQTVKVVDELVKVMGRHKPENIVIEMARENQTTQKGQKNSRERMKRIEEGIKELGSQILKEHPVENTQLQNEKLYLYYLQNGRDMYVDQELDINRLSDYDVDHIVPQSFLKDDSIDNKVLTRSDKARGKSDNVPSEEVVKKMKNYWRQLLNAKLITQRKFDNLTKAERGGLSELDKAGFIKRQLVETRQITKHVAQILDSRMNTKYDENDKLIREVKVITLKSKLVSDFRKDFQFYKVREINNYHHAHDAYLNAVVGTALIKKYPKLESEFVYGDYKVYDVRKMIAKSEQEIGKATAKYFFYSNIMNFFKTEITLANGEIRKRPLIETNGETGEIVWDKGRDFATVRKVLSMPQVNIVKKTEVQTGGFSKESILPKRNSDKLIARKKDWDPKKYGGFDSPTVAYSVLVVAKVEKGKSKKLKSVKELLGITIMERSSFEKNPIDFLEAKGYKEVKKDLIIKLPKYSLFELENGRKRMLASAGELQKGNELALPSKYVNFLYLASHYEKLKGSPEDNEQKQLFVEQHKHYLDEIIEQISEFSKRVILADANLDKVLSAYNKHRDKPIREQAENIIHLFTLTNLGAPAAFKYFDTTIDRKRYTSTKEVLDATLIHQSITGLYETRIDLSQLGGDGGGSSGGSGGGGGTLNIEDEYRLHETSKEPDVSLGSTWLSDFPQAWAETGGMGLAVRQAPLIIPLKATSTPVSIKQYPMSQEARLGIKPHIQRLLDQGILVPCQSPWNTPLLPVKKPGTNDYRPVQDLREVNKRVEDIHPTVPNPYNLLSGLPPSHQWYTVLDLKDAFFCLRLHPTSQPLFAFEWRDPEMGISGQLTWTRLPQGFKNSPTLFNEALHRDLAGFRIQHPDLILLQYVDDLLLAATSELDCQQGTRALLQTLGDLGYRASAKKAQICQKQVKYLGYLLKEGQRWLTEARKETVMGQPIPKTPRQLREFLGKAGFCRLFIPGFAEMAAPLYPLTKPGTLFNWGPDQQKAFQEIKQALLTAPALGLPDLTKPFELFVDEKQGYAKGVLTQKLGPWRRPVAYLSKKLDPVAAGWPPCLRMVAAIAVLTKDAGKLTMGQPLVILAPHAVEALVKQPPDRWLSNARMTHYQALLLDTDRVQFGPVVALNPATLLPLPEEGLQHDCLDILAEAHGTRSDLMDQPLPDADHTWYTDGSSFLQEGQRKAGAAVTTETEVIWARALPAGTSAQRAELIALTQALKMAEGKKLNVYTDSRYAFATAHIHGEIYRRRGWLTSEGKEIKNKDEILALLKALFLPKRLSIIHCPGHQKGNSAEARGNRMADQAAREVATRETPETSTLLAGKRTADGSEFEKRTADGSEFESPKKKAKVE

SEQ ID NO: 2380 - protein, 2094 aa, synthetic construct
MPAAKRVKLDGGDKKYSIGLDIGTNSVGWAVITDEYKVPSKKFKVLGNTDRHSIKKNLIGALLFDSGETAEATRLKRTARRRYTRRKNRICYLQEIFSNEMAKVDDSFFHRLEESFLVEEDKKHERHPIFGNIVDEVAYHEKYPTIYHLRKKLVDSTDKADLRLIYLALAHMIKFRGHFLIEGDLNPDNSDVDKLFIQLVQTYNQLFEENPINASGVDAKAILSARLSKSRRLENLIAQLPGEKKNGLFGNLIALSLGLTPNFKSNFDLAEDAKLQLSKDTYDDDLDNLLAQIGDQYADLFLAAKNLSDAILLSDILRVNTEITKAPLSASMIKRYDEHHQDLTLLKALVRQQLPEKYKEIFFDQSKNGYAGYIDGGASQEEFYKFIKPILEKMDGTEELLVKLNREDLLRKQRTFDNGSIPHQIHLGELHAILRRQEDFYPFLKDNREKIEKILTFRIPYYVGPLARGNSRFAWMTRKSEETITPWNFEEVVDKGASAQSFIERMTNFDKNLPNEKVLPKHSLLYEYFTVYNELTKVKYVTEGMRKPAFLSGEQKKAIVDLLFKTNRKVTVKQLKEDYFKKIECFDSVEISGVEDRFNASLGTYHDLLKIIKDKDFLDNEENEDILEDIVLTLTLFEDREMIEERLKTYAHLFDDKVMKQLKRRRYTGWGRLSRKLINGIRDKQSGKTILDFLKSDGFANRNFMQLIHDDSLTFKEDIQKAQVSGQGDSLHEHIANLAGSPAIKKGILQTVKVVDELVKVMGRHKPENIVIEMARENQTTQKGQKNSRERMKRIEEGIKELGSQILKEHPVENTQLQNEKLYLYYLQNGRDMYVDQELDINRLSDYDVDHIVPQSFLKDDSIDNKVLTRSDKARGKSDNVPSEEVVKKMKNYWRQLLNAKLITQRKFDNLTKAERGGLSELDKAGFIKRQLVETRQITKHVAQILDSRMNTKYDENDKLIREVKVITLKSKLVSDFRKDFQFYKVREINNYHHAHDAYLNAVVGTALIKKYPKLESEFVYGDYKVYDVRKMIAKSEQEIGKATAKYFFYSNIMNFFKTEITLANGEIRKRPLIETNGETGEIVWDKGRDFATVRKVLSMPQVNIVKKTEVQTGGFSKESILPKRNSDKLIARKKDWDPKKYGGFDSPTVAYSVLVVAKVEKGKSKKLKSVKELLGITIMERSSFEKNPIDFLEAKGYKEVKKDLIIKLPKYSLFELENGRKRMLASAGELQKGNELALPSKYVNFLYLASHYEKLKGSPEDNEQKQLFVEQHKHYLDEIIEQISEFSKRVILADANLDKVLSAYNKHRDKPIREQAENIIHLFTLTNLGAPAAFKYFDTTIDRKRYTSTKEVLDATLIHQSITGLYETRIDLSQLGGDGGPAPGSSGGSGGTLNIEDEYRLHETSKEPDVSLGSTWLSDFPQAWAETGGMGLAVRQAPLIIPLKATSTPVSIKQYPMSQEARLGIKPHIQRLLDQGILVPCQSPWNTPLLPVKKPGTNDYRPVQDLREVNKRVEDIHPTVPNPYNLLSGLPPSHQWYTVLDLKDAFFCLRLHPTSQPLFAFEWRDPEMGISGQLTWTRLPQGFKNSPTLFNEALHRDLAGFRIQHPDLILLQYVDDLLLAATSELDCQQGTRALLQTLGDLGYRASAKKAQICQKQVKYLGYLLKEGQRWLTEARKETVMGQPIPKTPRQLREFLGKAGFCRLFIPGFAEMAAPLYPLTKPGTLFNWGPDQQKAFQEIKQALLTAPALGLPDLTKPFELFVDEKQGYAKGVLTQKLGPWRRPVAYLSKKLDPVAAGWPPCLRMVAAIAVLTKDAGKLTMGQPLVILAPHAVEALVKQPPDRWLSNARMTHYQALLLDTDRVQFGPVVALNPATLLPLPEEGLQHDCLDILAEAHGTRSDLMDQPLPDADHTWYTDGSSFLQEGQRKAGAAVTTETEVIWARALPAGTSAQRAELIALTQALKMAEGKKLNVYTDSRYAFATAHIHGEIYRRRGWLTSEGKEIKNKDEILALLKALFLPKRLSIIHCPGHQKGNSAEARGNRMADQAAREVATRETPETSTLLAGKRTADGSEFEKRTADGSEFESPKKKAKVE

SEQ ID NO: 2381 - protein, 2090 aa, synthetic construct
MPAAKRVKLDGGDKKYSIGLDIGTNSVGWAVITDEYKVPSKKFKVLGNTDRHSIKKNLIGALLFDSGETAEATRLKRTARRRYTRRKNRICYLQEIFSNEMAKVDDSFFHRLEESFLVEEDKKHERHPIFGNIVDEVAYHEKYPTIYHLRKKLVDSTDKADLRLIYLALAHMIKFRGHFLIEGDLNPDNSDVDKLFIQLVQTYNQLFEENPINASGVDAKAILSARLSKSRRLENLIAQLPGEKKNGLFGNLIALSLGLTPNFKSNFDLAEDAKLQLSKDTYDDDLDNLLAQIGDQYADLFLAAKNLSDAILLSDILRVNTEITKAPLSASMIKRYDEHHQDLTLLKALVRQQLPEKYKEIFFDQSKNGYAGYIDGGASQEEFYKFIKPILEKMDGTEELLVKLNREDLLRKQRTFDNGSIPHQIHLGELHAILRRQEDFYPFLKDNREKIEKILTFRIPYYVGPLARGNSRFAWMTRKSEETITPWNFEEVVDKGASAQSFIERMTNFDKNLPNEKVLPKHSLLYEYFTVYNELTKVKYVTEGMRKPAFLSGEQKKAIVDLLFKTNRKVTVKQLKEDYFKKIECFDSVEISGVEDRFNASLGTYHDLLKIIKDKDFLDNEENEDILEDIVLTLTLFEDREMIEERLKTYAHLFDDKVMKQLKRRRYTGWGRLSRKLINGIRDKQSGKTILDFLKSDGFANRNFMQLIHDDSLTFKEDIQKAQVSGQGDSLHEHIANLAGSPAIKKGILQTVKVVDELVKVMGRHKPENIVIEMARENQTTQKGQKNSRERMKRIEEGIKELGSQILKEHPVENTQLQNEKLYLYYLQNGRDMYVDQELDINRLSDYDVDHIVPQSFLKDDSIDNKVLTRSDKARGKSDNVPSEEVVKKMKNYWRQLLNAKLITQRKFDNLTKAERGGLSELDKAGFIKRQLVETRQITKHVAQILDSRMNTKYDENDKLIREVKVITLKSKLVSDFRKDFQFYKVREINNYHHAHDAYLNAVVGTALIKKYPKLESEFVYGDYKVYDVRKMIAKSEQEIGKATAKYFFYSNIMNFFKTEITLANGEIRKRPLIETNGETGEIVWDKGRDFATVRKVLSMPQVNIVKKTEVQTGGFSKESILPKRNSDKLIARKKDWDPKKYGGFDSPTVAYSVLVVAKVEKGKSKKLKSVKELLGITIMERSSFEKNPIDFLEAKGYKEVKKDLIIKLPKYSLFELENGRKRMLASAGELQKGNELALPSKYVNFLYLASHYEKLKGSPEDNEQKQLFVEQHKHYLDEIIEQISEFSKRVILADANLDKVLSAYNKHRDKPIREQAENIIHLFTLTNLGAPAAFKYFDTTIDRKRYTSTKEVLDATLIHQSITGLYETRIDLSQLGGDGGGGGGSGGTLNIEDEYRLHETSKEPDVSLGSTWLSDFPQAWAETGGMGLAVRQAPLIIPLKATSTPVSIKQYPMSQEARLGIKPHIQRLLDQGILVPCQSPWNTPLLPVKKPGTNDYRPVQDLREVNKRVEDIHPTVPNPYNLLSGLPPSHQWYTVLDLKDAFFCLRLHPTSQPLFAFEWRDPEMGISGQLTWTRLPQGFKNSPTLFNEALHRDLAGFRIQHPDLILLQYVDDLLLAATSELDCQQGTRALLQTLGDLGYRASAKKAQICQKQVKYLGYLLKEGQRWLTEARKETVMGQPIPKTPRQLREFLGKAGFCRLFIPGFAEMAAPLYPLTKPGTLFNWGPDQQKAFQEIKQALLTAPALGLPDLTKPFELFVDEKQGYAKGVLTQKLGPWRRPVAYLSKKLDPVAAGWPPCLRMVAAIAVLTKDAGKLTMGQPLVILAPHAVEALVKQPPDRWLSNARMTHYQALLLDTDRVQFGPVVALNPATLLPLPEEGLQHDCLDILAEAHGTRSDLMDQPLPDADHTWYTDGSSFLQEGQRKAGAAVTTETEVIWARALPAGTSAQRAELIALTQALKMAEGKKLNVYTDSRYAFATAHIHGEIYRRRGWLTSEGKEIKNKDEILALLKALFLPKRLSIIHCPGHQKGNSAEARGNRMADQAAREVATRETPETSTLLAGKRTADGSEFEKRTADGSEFESPKKKAKVE

SEQ ID NO: 2382 - protein, 2093 aa, synthetic construct
MPAAKRVKLDGGDKKYSIGLDIGTNSVGWAVITDEYKVPSKKFKVLGNTDRHSIKKNLIGALLFDSGETAEATRLKRTARRRYTRRKNRICYLQEIFSNEMAKVDDSFFHRLEESFLVEEDKKHERHPIFGNIVDEVAYHEKYPTIYHLRKKLVDSTDKADLRLIYLALAHMIKFRGHFLIEGDLNPDNSDVDKLFIQLVQTYNQLFEENPINASGVDAKAILSARLSKSRRLENLIAQLPGEKKNGLFGNLIALSLGLTPNFKSNFDLAEDAKLQLSKDTYDDDLDNLLAQIGDQYADLFLAAKNLSDAILLSDILRVNTEITKAPLSASMIKRYDEHHQDLTLLKALVRQQLPEKYKEIFFDQSKNGYAGYIDGGASQEEFYKFIKPILEKMDGTEELLVKLNREDLLRKQRTFDNGSIPHQIHLGELHAILRRQEDFYPFLKDNREKIEKILTFRIPYYVGPLARGNSRFAWMTRKSEETITPWNFEEVVDKGASAQSFIERMTNFDKNLPNEKVLPKHSLLYEYFTVYNELTKVKYVTEGMRKPAFLSGEQKKAIVDLLFKTNRKVTVKQLKEDYFKKIECFDSVEISGVEDRFNASLGTYHDLLKIIKDKDFLDNEENEDILEDIVLTLTLFEDREMIEERLKTYAHLFDDKVMKQLKRRRYTGWGRLSRKLINGIRDKQSGKTILDFLKSDGFANRNFMQLIHDDSLTFKEDIQKAQVSGQGDSLHEHIANLAGSPAIKKGILQTVKVVDELVKVMGRHKPENIVIEMARENQTTQKGQKNSRERMKRIEEGIKELGSQILKEHPVENTQLQNEKLYLYYLQNGRDMYVDQELDINRLSDYDVDHIVPQSFLKDDSIDNKVLTRSDKARGKSDNVPSEEVVKKMKNYWRQLLNAKLITQRKFDNLTKAERGGLSELDKAGFIKRQLVETRQITKHVAQILDSRMNTKYDENDKLIREVKVITLKSKLVSDFRKDFQFYKVREINNYHHAHDAYLNAVVGTALIKKYPKLESEFVYGDYKVYDVRKMIAKSEQEIGKATAKYFFYSNIMNFFKTEITLANGEIRKRPLIETNGETGEIVWDKGRDFATVRKVLSMPQVNIVKKTEVQTGGFSKESILPKRNSDKLIARKKDWDPKKYGGFDSPTVAYSVLVVAKVEKGKSKKLKSVKELLGITIMERSSFEKNPIDFLEAKGYKEVKKDLIIKLPKYSLFELENGRKRMLASAGELQKGNELALPSKYVNFLYLASHYEKLKGSPEDNEQKQLFVEQHKHYLDEIIEQISEFSKRVILADANLDKVLSAYNKHRDKPIREQAENIIHLFTLTNLGAPAAFKYFDTTIDRKRYTSTKEVLDATLIHQSITGLYETRIDLSQLGGDGGGSSEAAAKGGTLNIEDEYRLHETSKEPDVSLGSTWLSDFPQAWAETGGMGLAVRQAPLIIPLKATSTPVSIKQYPMSQEARLGIKPHIQRLLDQGILVPCQSPWNTPLLPVKKPGTNDYRPVQDLREVNKRVEDIHPTVPNPYNLLSGLPPSHQWYTVLDLKDAFFCLRLHPTSQPLFAFEWRDPEMGISGQLTWTRLPQGFKNSPTLFNEALHRDLAGFRIQHPDLILLQYVDDLLLAATSELDCQQGTRALLQTLGDLGYRASAKKAQICQKQVKYLGYLLKEGQRWLTEARKETVMGQPIPKTPRQLREFLGKAGFCRLFIPGFAEMAAPLYPLTKPGTLFNWGPDQQKAFQEIKQALLTAPALGLPDLTKPFELFVDEKQGYAKGVLTQKLGPWRRPVAYLSKKLDPVAAGWPPCLRMVAAIAVLTKDAGKLTMGQPLVILAPHAVEALVKQPPDRWLSNARMTHYQALLLDTDRVQFGPVVALNPATLLPLPEEGLQHDCLDILAEAHGTRSDLMDQPLPDADHTWYTDGSSFLQEGQRKAGAAVTTETEVIWARALPAGTSAQRAELIALTQALKMAEGKKLNVYTDSRYAFATAHIHGEIYRRRGWLTSEGKEIKNKDEILALLKALFLPKRLSIIHCPGHQKGNSAEARGNRMADQAAREVATRETPETSTLLAGKRTADGSEFEKRTADGSEFESPKKKAKVE

SEQ ID NO: 2383 - protein, 2091 aa, synthetic construct
MPAAKRVKLDGGDKKYSIGLDIGTNSVGWAVITDEYKVPSKKFKVLGNTDRHSIKKNLIGALLFDSGETAEATRLKRTARRRYTRRKNRICYLQEIFSNEMAKVDDSFFHRLEESFLVEEDKKHERHPIFGNIVDEVAYHEKYPTIYHLRKKLVDSTDKADLRLIYLALAHMIKFRGHFLIEGDLNPDNSDVDKLFIQLVQTYNQLFEENPINASGVDAKAILSARLSKSRRLENLIAQLPGEKKNGLFGNLIALSLGLTPNFKSNFDLAEDAKLQLSKDTYDDDLDNLLAQIGDQYADLFLAAKNLSDAILLSDILRVNTEITKAPLSASMIKRYDEHHQDLTLLKALVRQQLPEKYKEIFFDQSKNGYAGYIDGGASQEEFYKFIKPILEKMDGTEELLVKLNREDLLRKQRTFDNGSIPHQIHLGELHAILRRQEDFYPFLKDNREKIEKILTFRIPYYVGPLARGNSRFAWMTRKSEETITPWNFEEVVDKGASAQSFIERMTNFDKNLPNEKVLPKHSLLYEYFTVYNELTKVKYVTEGMRKPAFLSGEQKKAIVDLLFKTNRKVTVKQLKEDYFKKIECFDSVEISGVEDRFNASLGTYHDLLKIIKDKDFLDNEENEDILEDIVLTLTLFEDREMIEERLKTYAHLFDDKVMKQLKRRRYTGWGRLSRKLINGIRDKQSGKTILDFLKSDGFANRNFMQLIHDDSLTFKEDIQKAQVSGQGDSLHEHIANLAGSPAIKKGILQTVKVVDELVKVMGRHKPENIVIEMARENQTTQKGQKNSRERMKRIEEGIKELGSQILKEHPVENTQLQNEKLYLYYLQNGRDMYVDQELDINRLSDYDVDHIVPQSFLKDDSIDNKVLTRSDKARGKSDNVPSEEVVKKMKNYWRQLLNAKLITQRKFDNLTKAERGGLSELDKAGFIKRQLVETRQITKHVAQILDSRMNTKYDENDKLIREVKVITLKSKLVSDFRKDFQFYKVREINNYHHAHDAYLNAVVGTALIKKYPKLESEFVYGDYKVYDVRKMIAKSEQEIGKATAKYFFYSNIMNFFKTEITLANGEIRKRPLIETNGETGEIVWDKGRDFATVRKVLSMPQVNIVKKTEVQTGGFSKESILPKRNSDKLIARKKDWDPKKYGGFDSPTVAYSVLVVAKVEKGKSKKLKSVKELLGITIMERSSFEKNPIDFLEAKGYKEVKKDLIIKLPKYSLFELENGRKRMLASAGELQKGNELALPSKYVNFLYLASHYEKLKGSPEDNEQKQLFVEQHKHYLDEIIEQISEFSKRVILADANLDKVLSAYNKHRDKPIREQAENIIHLFTLTNLGAPAAFKYFDTTIDRKRYTSTKEVLDATLIHQSITGLYETRIDLSQLGGDGGGGGGSSGGTLNIEDEYRLHETSKEPDVSLGSTWLSDFPQAWAETGGMGLAVRQAPLIIPLKATSTPVSIKQYPMSQEARLGIKPHIQRLLDQGILVPCQSPWNTPLLPVKKPGTNDYRPVQDLREVNKRVEDIHPTVPNPYNLLSGLPPSHQWYTVLDLKDAFFCLRLHPTSQPLFAFEWRDPEMGISGQLTWTRLPQGFKNSPTLFNEALHRDLAGFRIQHPDLILLQYVDDLLLAATSELDCQQGTRALLQTLGDLGYRASAKKAQICQKQVKYLGYLLKEGQRWLTEARKETVMGQPIPKTPRQLREFLGKAGFCRLFIPGFAEMAAPLYPLTKPGTLFNWGPDQQKAFQEIKQALLTAPALGLPDLTKPFELFVDEKQGYAKGVLTQKLGPWRRPVAYLSKKLDPVAAGWPPCLRMVAAIAVLTKDAGKLTMGQPLVILAPHAVEALVKQPPDRWLSNARMTHYQALLLDTDRVQFGPVVALNPATLLPLPEEGLQHDCLDILAEAHGTRSDLMDQPLPDADHTWYTDGSSFLQEGQRKAGAAVTTETEVIWARALPAGTSAQRAELIALTQALKMAEGKKLNVYTDSRYAFATAHIHGEIYRRRGWLTSEGKEIKNKDEILALLKALFLPKRLSIIHCPGHQKGNSAEARGNRMADQAAREVATRETPETSTLLAGKRTADGSEFEKRTADGSEFESPKKKAKVE

SEQ ID NO: 2384 - protein, 2096 aa, synthetic construct
MPAAKRVKLDGGDKKYSIGLDIGTNSVGWAVITDEYKVPSKKFKVLGNTDRHSIKKNLIGALLFDSGETAEATRLKRTARRRYTRRKNRICYLQEIFSNEMAKVDDSFFHRLEESFLVEEDKKHERHPIFGNIVDEVAYHEKYPTIYHLRKKLVDSTDKADLRLIYLALAHMIKFRGHFLIEGDLNPDNSDVDKLFIQLVQTYNQLFEENPINASGVDAKAILSARLSKSRRLENLIAQLPGEKKNGLFGNLIALSLGLTPNFKSNFDLAEDAKLQLSKDTYDDDLDNLLAQIGDQYADLFLAAKNLSDAILLSDILRVNTEITKAPLSASMIKRYDEHHQDLTLLKALVRQQLPEKYKEIFFDQSKNGYAGYIDGGASQEEFYKFIKPILEKMDGTEELLVKLNREDLLRKQRTFDNGSIPHQIHLGELHAILRRQEDFYPFLKDNREKIEKILTFRIPYYVGPLARGNSRFAWMTRKSEETITPWNFEEVVDKGASAQSFIERMTNFDKNLPNEKVLPKHSLLYEYFTVYNELTKVKYVTEGMRKPAFLSGEQKKAIVDLLFKTNRKVTVKQLKEDYFKKIECFDSVEISGVEDRFNASLGTYHDLLKIIKDKDFLDNEENEDILEDIVLTLTLFEDREMIEERLKTYAHLFDDKVMKQLKRRRYTGWGRLSRKLINGIRDKQSGKTILDFLKSDGFANRNFMQLIHDDSLTFKEDIQKAQVSGQGDSLHEHIANLAGSPAIKKGILQTVKVVDELVKVMGRHKPENIVIEMARENQTTQKGQKNSRERMKRIEEGIKELGSQILKEHPVENTQLQNEKLYLYYLQNGRDMYVDQELDINRLSDYDVDHIVPQSFLKDDSIDNKVLTRSDKARGKSDNVPSEEVVKKMKNYWRQLLNAKLITQRKFDNLTKAERGGLSELDKAGFIKRQLVETRQITKHVAQILDSRMNTKYDENDKLIREVKVITLKSKLVSDFRKDFQFYKVREINNYHHAHDAYLNAVVGTALIKKYPKLESEFVYGDYKVYDVRKMIAKSEQEIGKATAKYFFYSNIMNFFKTEITLANGEIRKRPLIETNGETGEIVWDKGRDFATVRKVLSMPQVNIVKKTEVQTGGFSKESILPKRNSDKLIARKKDWDPKKYGGFDSPTVAYSVLVVAKVEKGKSKKLKSVKELLGITIMERSSFEKNPIDFLEAKGYKEVKKDLIIKLPKYSLFELENGRKRMLASAGELQKGNELALPSKYVNFLYLASHYEKLKGSPEDNEQKQLFVEQHKHYLDEIIEQISEFSKRVILADANLDKVLSAYNKHRDKPIREQAENIIHLFTLTNLGAPAAFKYFDTTIDRKRYTSTKEVLDATLIHQSITGLYETRIDLSQLGGDGGGSSEAAAKGGGGGTLNIEDEYRLHETSKEPDVSLGSTWLSDFPQAWAETGGMGLAVRQAPLIIPLKATSTPVSIKQYPMSQEARLGIKPHIQRLLDQGILVPCQSPWNTPLLPVKKPGTNDYRPVQDLREVNKRVEDIHPTVPNPYNLLSGLPPSHQWYTVLDLKDAFFCLRLHPTSQPLFAFEWRDPEMGISGQLTWTRLPQGFKNSPTLFNEALHRDLAGFRIQHPDLILLQYVDDLLLAATSELDCQQGTRALLQTLGDLGYRASAKKAQICQKQVKYLGYLLKEGQRWLTEARKETVMGQPIPKTPRQLREFLGKAGFCRLFIPGFAEMAAPLYPLTKPGTLFNWGPDQQKAFQEIKQALLTAPALGLPDLTKPFELFVDEKQGYAKGVLTQKLGPWRRPVAYLSKKLDPVAAGWPPCLRMVAAIAVLTKDAGKLTMGQPLVILAPHAVEALVKQPPDRWLSNARMTHYQALLLDTDRVQFGPVVALNPATLLPLPEEGLQHDCLDILAEAHGTRSDLMDQPLPDADHTWYTDGSSFLQEGQRKAGAAVTTETEVIWARALPAGTSAQRAELIALTQALKMAEGKKLNVYTDSRYAFATAHIHGEIYRRRGWLTSEGKEIKNKDEILALLKALFLPKRLSIIHCPGHQKGNSAEARGNRMADQAAREVATRETPETSTLLAGKRTADGSEFEKRTADGSEFESPKKKAKVE

SEQ ID NO: 2385 - protein, 2096 aa, synthetic construct
MPAAKRVKLDGGDKKYSIGLDIGTNSVGWAVITDEYKVPSKKFKVLGNTDRHSIKKNLIGALLFDSGETAEATRLKRTARRRYTRRKNRICYLQEIFSNEMAKVDDSFFHRLEESFLVEEDKKHERHPIFGNIVDEVAYHEKYPTIYHLRKKLVDSTDKADLRLIYLALAHMIKFRGHFLIEGDLNPDNSDVDKLFIQLVQTYNQLFEENPINASGVDAKAILSARLSKSRRLENLIAQLPGEKKNGLFGNLIALSLGLTPNFKSNFDLAEDAKLQLSKDTYDDDLDNLLAQIGDQYADLFLAAKNLSDAILLSDILRVNTEITKAPLSASMIKRYDEHHQDLTLLKALVRQQLPEKYKEIFFDQSKNGYAGYIDGGASQEEFYKFIKPILEKMDGTEELLVKLNREDLLRKQRTFDNGSIPHQIHLGELHAILRRQEDFYPFLKDNREKIEKILTFRIPYYVGPLARGNSRFAWMTRKSEETITPWNFEEVVDKGASAQSFIERMTNFDKNLPNEKVLPKHSLLYEYFTVYNELTKVKYVTEGMRKPAFLSGEQKKAIVDLLFKTNRKVTVKQLKEDYFKKIECFDSVEISGVEDRFNASLGTYHDLLKIIKDKDFLDNEENEDILEDIVLTLTLFEDREMIEERLKTYAHLFDDKVMKQLKRRRYTGWGRLSRKLINGIRDKQSGKTILDFLKSDGFANRNFMQLIHDDSLTFKEDIQKAQVSGQGDSLHEHIANLAGSPAIKKGILQTVKVVDELVKVMGRHKPENIVIEMARENQTTQKGQKNSRERMKRIEEGIKELGSQILKEHPVENTQLQNEKLYLYYLQNGRDMYVDQELDINRLSDYDVDHIVPQSFLKDDSIDNKVLTRSDKARGKSDNVPSEEVVKKMKNYWRQLLNAKLITQRKFDNLTKAERGGLSELDKAGFIKRQLVETRQITKHVAQILDSRMNTKYDENDKLIREVKVITLKSKLVSDFRKDFQFYKVREINNYHHAHDAYLNAVVGTALIKKYPKLESEFVYGDYKVYDVRKMIAKSEQEIGKATAKYFFYSNIMNFFKTEITLANGEIRKRPLIETNGETGEIVWDKGRDFATVRKVLSMPQVNIVKKTEVQTGGFSKESILPKRNSDKLIARKKDWDPKKYGGFDSPTVAYSVLVVAKVEKGKSKKLKSVKELLGITIMERSSFEKNPIDFLEAKGYKEVKKDLIIKLPKYSLFELENGRKRMLASAGELQKGNELALPSKYVNFLYLASHYEKLKGSPEDNEQKQLFVEQHKHYLDEIIEQISEFSKRVILADANLDKVLSAYNKHRDKPIREQAENIIHLFTLTNLGAPAAFKYFDTTIDRKRYTSTKEVLDATLIHQSITGLYETRIDLSQLGGDGGGGGEAAAKPAPGGTLNIEDEYRLHETSKEPDVSLGSTWLSDFPQAWAETGGMGLAVRQAPLIIPLKATSTPVSIKQYPMSQEARLGIKPHIQRLLDQGILVPCQSPWNTPLLPVKKPGTNDYRPVQDLREVNKRVEDIHPTVPNPYNLLSGLPPSHQWYTVLDLKDAFFCLRLHPTSQPLFAFEWRDPEMGISGQLTWTRLPQGFKNSPTLFNEALHRDLAGFRIQHPDLILLQYVDDLLLAATSELDCQQGTRALLQTLGDLGYRASAKKAQICQKQVKYLGYLLKEGQRWLTEARKETVMGQPIPKTPRQLREFLGKAGFCRLFIPGFAEMAAPLYPLTKPGTLFNWGPDQQKAFQEIKQALLTAPALGLPDLTKPFELFVDEKQGYAKGVLTQKLGPWRRPVAYLSKKLDPVAAGWPPCLRMVAAIAVLTKDAGKLTMGQPLVILAPHAVEALVKQPPDRWLSNARMTHYQALLLDTDRVQFGPVVALNPATLLPLPEEGLQHDCLDILAEAHGTRSDLMDQPLPDADHTWYTDGSSFLQEGQRKAGAAVTTETEVIWARALPAGTSAQRAELIALTQALKMAEGKKLNVYTDSRYAFATAHIHGEIYRRRGWLTSEGKEIKNKDEILALLKALFLPKRLSIIHCPGHQKGNSAEARGNRMADQAAREVATRETPETSTLLAGKRTADGSEFEKRTADGSEFESPKKKAKVE

SEQ ID NO: 2386 - protein, 2096 aa, synthetic construct
MPAAKRVKLDGGDKKYSIGLDIGTNSVGWAVITDEYKVPSKKFKVLGNTDRHSIKKNLIGALLFDSGETAEATRLKRTARRRYTRRKNRICYLQEIFSNEMAKVDDSFFHRLEESFLVEEDKKHERHPIFGNIVDEVAYHEKYPTIYHLRKKLVDSTDKADLRLIYLALAHMIKFRGHFLIEGDLNPDNSDVDKLFIQLVQTYNQLFEENPINASGVDAKAILSARLSKSRRLENLIAQLPGEKKNGLFGNLIALSLGLTPNFKSNFDLAEDAKLQLSKDTYDDDLDNLLAQIGDQYADLFLAAKNLSDAILLSDILRVNTEITKAPLSASMIKRYDEHHQDLTLLKALVRQQLPEKYKEIFFDQSKNGYAGYIDGGASQEEFYKFIKPILEKMDGTEELLVKLNREDLLRKQRTFDNGSIPHQIHLGELHAILRRQEDFYPFLKDNREKIEKILTFRIPYYVGPLARGNSRFAWMTRKSEETITPWNFEEVVDKGASAQSFIERMTNFDKNLPNEKVLPKHSLLYEYFTVYNELTKVKYVTEGMRKPAFLSGEQKKAIVDLLFKTNRKVTVKQLKEDYFKKIECFDSVEISGVEDRFNASLGTYHDLLKIIKDKDFLDNEENEDILEDIVLTLTLFEDREMIEERLKTYAHLFDDKVMKQLKRRRYTGWGRLSRKLINGIRDKQSGKTILDFLKSDGFANRNFMQLIHDDSLTFKEDIQKAQVSGQGDSLHEHIANLAGSPAIKKGILQTVKVVDELVKVMGRHKPENIVIEMARENQTTQKGQKNSRERMKRIEEGIKELGSQILKEHPVENTQLQNEKLYLYYLQNGRDMYVDQELDINRLSDYDVDHIVPQSFLKDDSIDNKVLTRSDKARGKSDNVPSEEVVKKMKNYWRQLLNAKLITQRKFDNLTKAERGGLSELDKAGFIKRQLVETRQITKHVAQILDSRMNTKYDENDKLIREVKVITLKSKLVSDFRKDFQFYKVREINNYHHAHDAYLNAVVGTALIKKYPKLESEFVYGDYKVYDVRKMIAKSEQEIGKATAKYFFYSNIMNFFKTEITLANGEIRKRPLIETNGETGEIVWDKGRDFATVRKVLSMPQVNIVKKTEVQTGGFSKESILPKRNSDKLIARKKDWDPKKYGGFDSPTVAYSVLVVAKVEKGKSKKLKSVKELLGITIMERSSFEKNPIDFLEAKGYKEVKKDLIIKLPKYSLFELENGRKRMLASAGELQKGNELALPSKYVNFLYLASHYEKLKGSPEDNEQKQLFVEQHKHYLDEIIEQISEFSKRVILADANLDKVLSAYNKHRDKPIREQAENIIHLFTLTNLGAPAAFKYFDTTIDRKRYTSTKEVLDATLIHQSITGLYETRIDLSQLGGDGGGSSGGSEAAAKGGTLNIEDEYRLHETSKEPDVSLGSTWLSDFPQAWAETGGMGLAVRQAPLIIPLKATSTPVSIKQYPMSQEARLGIKPHIQRLLDQGILVPCQSPWNTPLLPVKKPGTNDYRPVQDLREVNKRVEDIHPTVPNPYNLLSGLPPSHQWYTVLDLKDAFFCLRLHPTSQPLFAFEWRDPEMGISGQLTWTRLPQGFKNSPTLFNEALHRDLAGFRIQHPDLILLQYVDDLLLAATSELDCQQGTRALLQTLGDLGYRASAKKAQICQKQVKYLGYLLKEGQRWLTEARKETVMGQPIPKTPRQLREFLGKAGFCRLFIPGFAEMAAPLYPLTKPGTLFNWGPDQQKAFQEIKQALLTAPALGLPDLTKPFELFVDEKQGYAKGVLTQKLGPWRRPVAYLSKKLDPVAAGWPPCLRMVAAIAVLTKDAGKLTMGQPLVILAPHAVEALVKQPPDRWLSNARMTHYQALLLDTDRVQFGPVVALNPATLLPLPEEGLQHDCLDILAEAHGTRSDLMDQPLPDADHTWYTDGSSFLQEGQRKAGAAVTTETEVIWARALPAGTSAQRAELIALTQALKMAEGKKLNVYTDSRYAFATAHIHGEIYRRRGWLTSEGKEIKNKDEILALLKALFLPKRLSIIHCPGHQKGNSAEARGNRMADQAAREVATRETPETSTLLAGKRTADGSEFEKRTADGSEFESPKKKAKVE

SEQ ID NO: 2387 - protein, 2094 aa, synthetic construct
MPAAKRVKLDGGDKKYSIGLDIGTNSVGWAVITDEYKVPSKKFKVLGNTDRHSIKKNLIGALLFDSGETAEATRLKRTARRRYTRRKNRICYLQEIFSNEMAKVDDSFFHRLEESFLVEEDKKHERHPIFGNIVDEVAYHEKYPTIYHLRKKLVDSTDKADLRLIYLALAHMIKFRGHFLIEGDLNPDNSDVDKLFIQLVQTYNQLFEENPINASGVDAKAILSARLSKSRRLENLIAQLPGEKKNGLFGNLIALSLGLTPNFKSNFDLAEDAKLQLSKDTYDDDLDNLLAQIGDQYADLFLAAKNLSDAILLSDILRVNTEITKAPLSASMIKRYDEHHQDLTLLKALVRQQLPEKYKEIFFDQSKNGYAGYIDGGASQEEFYKFIKPILEKMDGTEELLVKLNREDLLRKQRTFDNGSIPHQIHLGELHAILRRQEDFYPFLKDNREKIEKILTFRIPYYVGPLARGNSRFAWMTRKSEETITPWNFEEVVDKGASAQSFIERMTNFDKNLPNEKVLPKHSLLYEYFTVYNELTKVKYVTEGMRKPAFLSGEQKKAIVDLLFKTNRKVTVKQLKEDYFKKIECFDSVEISGVEDRFNASLGTYHDLLKIIKDKDFLDNEENEDILEDIVLTLTLFEDREMIEERLKTYAHLFDDKVMKQLKRRRYTGWGRLSRKLINGIRDKQSGKTILDFLKSDGFANRNFMQLIHDDSLTFKEDIQKAQVSGQGDSLHEHIANLAGSPAIKKGILQTVKVVDELVKVMGRHKPENIVIEMARENQTTQKGQKNSRERMKRIEEGIKELGSQILKEHPVENTQLQNEKLYLYYLQNGRDMYVDQELDINRLSDYDVDHIVPQSFLKDDSIDNKVLTRSDKARGKSDNVPSEEVVKKMKNYWRQLLNAKLITQRKFDNLTKAERGGLSELDKAGFIKRQLVETRQITKHVAQILDSRMNTKYDENDKLIREVKVITLKSKLVSDFRKDFQFYKVREINNYHHAHDAYLNAVVGTALIKKYPKLESEFVYGDYKVYDVRKMIAKSEQEIGKATAKYFFYSNIMNFFKTEITLANGEIRKRPLIETNGETGEIVWDKGRDFATVRKVLSMPQVNIVKKTEVQTGGFSKESILPKRNSDKLIARKKDWDPKKYGGFDSPTVAYSVLVVAKVEKGKSKKLKSVKELLGITIMERSSFEKNPIDFLEAKGYKEVKKDLIIKLPKYSLFELENGRKRMLASAGELQKGNELALPSKYVNFLYLASHYEKLKGSPEDNEQKQLFVEQHKHYLDEIIEQISEFSKRVILADANLDKVLSAYNKHRDKPIREQAENIIHLFTLTNLGAPAAFKYFDTTIDRKRYTSTKEVLDATLIHQSITGLYETRIDLSQLGGDGGGGSPAPGSSGGTLNIEDEYRLHETSKEPDVSLGSTWLSDFPQAWAETGGMGLAVRQAPLIIPLKATSTPVSIKQYPMSQEARLGIKPHIQRLLDQGILVPCQSPWNTPLLPVKKPGTNDYRPVQDLREVNKRVEDIHPTVPNPYNLLSGLPPSHQWYTVLDLKDAFFCLRLHPTSQPLFAFEWRDPEMGISGQLTWTRLPQGFKNSPTLFNEALHRDLAGFRIQHPDLILLQYVDDLLLAATSELDCQQGTRALLQTLGDLGYRASAKKAQICQKQVKYLGYLLKEGQRWLTEARKETVMGQPIPKTPRQLREFLGKAGFCRLFIPGFAEMAAPLYPLTKPGTLFNWGPDQQKAFQEIKQALLTAPALGLPDLTKPFELFVDEKQGYAKGVLTQKLGPWRRPVAYLSKKLDPVAAGWPPCLRMVAAIAVLTKDAGKLTMGQPLVILAPHAVEALVKQPPDRWLSNARMTHYQALLLDTDRVQFGPVVALNPATLLPLPEEGLQHDCLDILAEAHGTRSDLMDQPLPDADHTWYTDGSSFLQEGQRKAGAAVTTETEVIWARALPAGTSAQRAELIALTQALKMAEGKKLNVYTDSRYAFATAHIHGEIYRRRGWLTSEGKEIKNKDEILALLKALFLPKRLSIIHCPGHQKGNSAEARGNRMADQAAREVATRETPETSTLLAGKRTADGSEFEKRTADGSEFESPKKKAKVE

SEQ ID NO: 2388 - protein, 2101 aa, synthetic construct
MPAAKRVKLDGGDKKYSIGLDIGTNSVGWAVITDEYKVPSKKFKVLGNTDRHSIKKNLIGALLFDSGETAEATRLKRTARRRYTRRKNRICYLQEIFSNEMAKVDDSFFHRLEESFLVEEDKKHERHPIFGNIVDEVAYHEKYPTIYHLRKKLVDSTDKADLRLIYLALAHMIKFRGHFLIEGDLNPDNSDVDKLFIQLVQTYNQLFEENPINASGVDAKAILSARLSKSRRLENLIAQLPGEKKNGLFGNLIALSLGLTPNFKSNFDLAEDAKLQLSKDTYDDDLDNLLAQIGDQYADLFLAAKNLSDAILLSDILRVNTEITKAPLSASMIKRYDEHHQDLTLLKALVRQQLPEKYKEIFFDQSKNGYAGYIDGGASQEEFYKFIKPILEKMDGTEELLVKLNREDLLRKQRTFDNGSIPHQIHLGELHAILRRQEDFYPFLKDNREKIEKILTFRIPYYVGPLARGNSRFAWMTRKSEETITPWNFEEVVDKGASAQSFIERMTNFDKNLPNEKVLPKHSLLYEYFTVYNELTKVKYVTEGMRKPAFLSGEQKKAIVDLLFKTNRKVTVKQLKEDYFKKIECFDSVEISGVEDRFNASLGTYHDLLKIIKDKDFLDNEENEDILEDIVLTLTLFEDREMIEERLKTYAHLFDDKVMKQLKRRRYTGWGRLSRKLINGIRDKQSGKTILDFLKSDGFANRNFMQLIHDDSLTFKEDIQKAQVSGQGDSLHEHIANLAGSPAIKKGILQTVKVVDELVKVMGRHKPENIVIEMARENQTTQKGQKNSRERMKRIEEGIKELGSQILKEHPVENTQLQNEKLYLYYLQNGRDMYVDQELDINRLSDYDVDHIVPQSFLKDDSIDNKVLTRSDKARGKSDNVPSEEVVKKMKNYWRQLLNAKLITQRKFDNLTKAERGGLSELDKAGFIKRQLVETRQITKHVAQILDSRMNTKYDENDKLIREVKVITLKSKLVSDFRKDFQFYKVREINNYHHAHDAYLNAVVGTALIKKYPKLESEFVYGDYKVYDVRKMIAKSEQEIGKATAKYFFYSNIMNFFKTEITLANGEIRKRPLIETNGETGEIVWDKGRDFATVRKVLSMPQVNIVKKTEVQTGGFSKESILPKRNSDKLIARKKDWDPKKYGGFDSPTVAYSVLVVAKVEKGKSKKLKSVKELLGITIMERSSFEKNPIDFLEAKGYKEVKKDLIIKLPKYSLFELENGRKRMLASAGELQKGNELALPSKYVNFLYLASHYEKLKGSPEDNEQKQLFVEQHKHYLDEIIEQISEFSKRVILADANLDKVLSAYNKHRDKPIREQAENIIHLFTLTNLGAPAAFKYFDTTIDRKRYTSTKEVLDATLIHQSITGLYETRIDLSQLGGDGGSGSETPGTSESATPESGGTLNIEDEYRLHETSKEPDVSLGSTWLSDFPQAWAETGGMGLAVRQAPLIIPLKATSTPVSIKQYPMSQEARLGIKPHIQRLLDQGILVPCQSPWNTPLLPVKKPGTNDYRPVQDLREVNKRVEDIHPTVPNPYNLLSGLPPSHQWYTVLDLKDAFFCLRLHPTSQPLFAFEWRDPEMGISGQLTWTRLPQGFKNSPTLFNEALHRDLAGFRIQHPDLILLQYVDDLLLAATSELDCQQGTRALLQTLGDLGYRASAKKAQICQKQVKYLGYLLKEGQRWLTEARKETVMGQPIPKTPRQLREFLGKAGFCRLFIPGFAEMAAPLYPLTKPGTLFNWGPDQQKAFQEIKQALLTAPALGLPDLTKPFELFVDEKQGYAKGVLTQKLGPWRRPVAYLSKKLDPVAAGWPPCLRMVAAIAVLTKDAGKLTMGQPLVILAPHAVEALVKQPPDRWLSNARMTHYQALLLDTDRVQFGPVVALNPATLLPLPEEGLQHDCLDILAEAHGTRSDLMDQPLPDADHTWYTDGSSFLQEGQRKAGAAVTTETEVIWARALPAGTSAQRAELIALTQALKMAEGKKLNVYTDSRYAFATAHIHGEIYRRRGWLTSEGKEIKNKDEILALLKALFLPKRLSIIHCPGHQKGNSAEARGNRMADQAAREVATRETPETSTLLAGKRTADGSEFEKRTADGSEFESPKKKAKVE

SEQ ID NO: 2389 - protein, 2091 aa, synthetic construct
MPAAKRVKLDGGDKKYSIGLDIGTNSVGWAVITDEYKVPSKKFKVLGNTDRHSIKKNLIGALLFDSGETAEATRLKRTARRRYTRRKNRICYLQEIFSNEMAKVDDSFFHRLEESFLVEEDKKHERHPIFGNIVDEVAYHEKYPTIYHLRKKLVDSTDKADLRLIYLALAHMIKFRGHFLIEGDLNPDNSDVDKLFIQLVQTYNQLFEENPINASGVDAKAILSARLSKSRRLENLIAQLPGEKKNGLFGNLIALSLGLTPNFKSNFDLAEDAKLQLSKDTYDDDLDNLLAQIGDQYADLFLAAKNLSDAILLSDILRVNTEITKAPLSASMIKRYDEHHQDLTLLKALVRQQLPEKYKEIFFDQSKNGYAGYIDGGASQEEFYKFIKPILEKMDGTEELLVKLNREDLLRKQRTFDNGSIPHQIHLGELHAILRRQEDFYPFLKDNREKIEKILTFRIPYYVGPLARGNSRFAWMTRKSEETITPWNFEEVVDKGASAQSFIERMTNFDKNLPNEKVLPKHSLLYEYFTVYNELTKVKYVTEGMRKPAFLSGEQKKAIVDLLFKTNRKVTVKQLKEDYFKKIECFDSVEISGVEDRFNASLGTYHDLLKIIKDKDFLDNEENEDILEDIVLTLTLFEDREMIEERLKTYAHLFDDKVMKQLKRRRYTGWGRLSRKLINGIRDKQSGKTILDFLKSDGFANRNFMQLIHDDSLTFKEDIQKAQVSGQGDSLHEHIANLAGSPAIKKGILQTVKVVDELVKVMGRHKPENIVIEMARENQTTQKGQKNSRERMKRIEEGIKELGSQILKEHPVENTQLQNEKLYLYYLQNGRDMYVDQELDINRLSDYDVDHIVPQSFLKDDSIDNKVLTRSDKARGKSDNVPSEEVVKKMKNYWRQLLNAKLITQRKFDNLTKAERGGLSELDKAGFIKRQLVETRQITKHVAQILDSRMNTKYDENDKLIREVKVITLKSKLVSDFRKDFQFYKVREINNYHHAHDAYLNAVVGTALIKKYPKLESEFVYGDYKVYDVRKMIAKSEQEIGKATAKYFFYSNIMNFFKTEITLANGEIRKRPLIETNGETGEIVWDKGRDFATVRKVLSMPQVNIVKKTEVQTGGFSKESILPKRNSDKLIARKKDWDPKKYGGFDSPTVAYSVLVVAKVEKGKSKKLKSVKELLGITIMERSSFEKNPIDFLEAKGYKEVKKDLIIKLPKYSLFELENGRKRMLASAGELQKGNELALPSKYVNFLYLASHYEKLKGSPEDNEQKQLFVEQHKHYLDEIIEQISEFSKRVILADANLDKVLSAYNKHRDKPIREQAENIIHLFTLTNLGAPAAFKYFDTTIDRKRYTSTKEVLDATLIHQSITGLYETRIDLSQLGGDGGGGSPAPGGTLNIEDEYRLHETSKEPDVSLGSTWLSDFPQAWAETGGMGLAVRQAPLIIPLKATSTPVSIKQYPMSQEARLGIKPHIQRLLDQGILVPCQSPWNTPLLPVKKPGTNDYRPVQDLREVNKRVEDIHPTVPNPYNLLSGLPPSHQWYTVLDLKDAFFCLRLHPTSQPLFAFEWRDPEMGISGQLTWTRLPQGFKNSPTLFNEALHRDLAGFRIQHPDLILLQYVDDLLLAATSELDCQQGTRALLQTLGDLGYRASAKKAQICQKQVKYLGYLLKEGQRWLTEARKETVMGQPIPKTPRQLREFLGKAGFCRLFIPGFAEMAAPLYPLTKPGTLFNWGPDQQKAFQEIKQALLTAPALGLPDLTKPFELFVDEKQGYAKGVLTQKLGPWRRPVAYLSKKLDPVAAGWPPCLRMVAAIAVLTKDAGKLTMGQPLVILAPHAVEALVKQPPDRWLSNARMTHYQALLLDTDRVQFGPVVALNPATLLPLPEEGLQHDCLDILAEAHGTRSDLMDQPLPDADHTWYTDGSSFLQEGQRKAGAAVTTETEVIWARALPAGTSAQRAELIALTQALKMAEGKKLNVYTDSRYAFATAHIHGEIYRRRGWLTSEGKEIKNKDEILALLKALFLPKRLSIIHCPGHQKGNSAEARGNRMADQAAREVATRETPETSTLLAGKRTADGSEFEKRTADGSEFESPKKKAKVE

SEQ ID NO: 2390 - protein, 2096 aa, synthetic construct
MPAAKRVKLDGGDKKYSIGLDIGTNSVGWAVITDEYKVPSKKFKVLGNTDRHSIKKNLIGALLFDSGETAEATRLKRTARRRYTRRKNRICYLQEIFSNEMAKVDDSFFHRLEESFLVEEDKKHERHPIFGNIVDEVAYHEKYPTIYHLRKKLVDSTDKADLRLIYLALAHMIKFRGHFLIEGDLNPDNSDVDKLFIQLVQTYNQLFEENPINASGVDAKAILSARLSKSRRLENLIAQLPGEKKNGLFGNLIALSLGLTPNFKSNFDLAEDAKLQLSKDTYDDDLDNLLAQIGDQYADLFLAAKNLSDAILLSDILRVNTEITKAPLSASMIKRYDEHHQDLTLLKALVRQQLPEKYKEIFFDQSKNGYAGYIDGGASQEEFYKFIKPILEKMDGTEELLVKLNREDLLRKQRTFDNGSIPHQIHLGELHAILRRQEDFYPFLKDNREKIEKILTFRIPYYVGPLARGNSRFAWMTRKSEETITPWNFEEVVDKGASAQSFIERMTNFDKNLPNEKVLPKHSLLYEYFTVYNELTKVKYVTEGMRKPAFLSGEQKKAIVDLLFKTNRKVTVKQLKEDYFKKIECFDSVEISGVEDRFNASLGTYHDLLKIIKDKDFLDNEENEDILEDIVLTLTLFEDREMIEERLKTYAHLFDDKVMKQLKRRRYTGWGRLSRKLINGIRDKQSGKTILDFLKSDGFANRNFMQLIHDDSLTFKEDIQKAQVSGQGDSLHEHIANLAGSPAIKKGILQTVKVVDELVKVMGRHKPENIVIEMARENQTTQKGQKNSRERMKRIEEGIKELGSQILKEHPVENTQLQNEKLYLYYLQNGRDMYVDQELDINRLSDYDVDHIVPQSFLKDDSIDNKVLTRSDKARGKSDNVPSEEVVKKMKNYWRQLLNAKLITQRKFDNLTKAERGGLSELDKAGFIKRQLVETRQITKHVAQILDSRMNTKYDENDKLIREVKVITLKSKLVSDFRKDFQFYKVREINNYHHAHDAYLNAVVGTALIKKYPKLESEFVYGDYKVYDVRKMIAKSEQEIGKATAKYFFYSNIMNFFKTEITLANGEIRKRPLIETNGETGEIVWDKGRDFATVRKVLSMPQVNIVKKTEVQTGGFSKESILPKRNSDKLIARKKDWDPKKYGGFDSPTVAYSVLVVAKVEKGKSKKLKSVKELLGITIMERSSFEKNPIDFLEAKGYKEVKKDLIIKLPKYSLFELENGRKRMLASAGELQKGNELALPSKYVNFLYLASHYEKLKGSPEDNEQKQLFVEQHKHYLDEIIEQISEFSKRVILADANLDKVLSAYNKHRDKPIREQAENIIHLFTLTNLGAPAAFKYFDTTIDRKRYTSTKEVLDATLIHQSITGLYETRIDLSQLGGDGGGSSGGGEAAAKGGTLNIEDEYRLHETSKEPDVSLGSTWLSDFPQAWAETGGMGLAVRQAPLIIPLKATSTPVSIKQYPMSQEARLGIKPHIQRLLDQGILVPCQSPWNTPLLPVKKPGTNDYRPVQDLREVNKRVEDIHPTVPNPYNLLSGLPPSHQWYTVLDLKDAFFCLRLHPTSQPLFAFEWRDPEMGISGQLTWTRLPQGFKNSPTLFNEALHRDLAGFRIQHPDLILLQYVDDLLLAATSELDCQQGTRALLQTLGDLGYRASAKKAQICQKQVKYLGYLLKEGQRWLTEARKETVMGQPIPKTPRQLREFLGKAGFCRLFIPGFAEMAAPLYPLTKPGTLFNWGPDQQKAFQEIKQALLTAPALGLPDLTKPFELFVDEKQGYAKGVLTQKLGPWRRPVAYLSKKLDPVAAGWPPCLRMVAAIAVLTKDAGKLTMGQPLVILAPHAVEALVKQPPDRWLSNARMTHYQALLLDTDRVQFGPVVALNPATLLPLPEEGLQHDCLDILAEAHGTRSDLMDQPLPDADHTWYTDGSSFLQEGQRKAGAAVTTETEVIWARALPAGTSAQRAELIALTQALKMAEGKKLNVYTDSRYAFATAHIHGEIYRRRGWLTSEGKEIKNKDEILALLKALFLPKRLSIIHCPGHQKGNSAEARGNRMADQAAREVATRETPETSTLLAGKRTADGSEFEKRTADGSEFESPKKKAKVE

SEQ ID NO: 2391 - protein, 2096 aa, synthetic construct
MPAAKRVKLDGGDKKYSIGLDIGTNSVGWAVITDEYKVPSKKFKVLGNTDRHSIKKNLIGALLFDSGETAEATRLKRTARRRYTRRKNRICYLQEIFSNEMAKVDDSFFHRLEESFLVEEDKKHERHPIFGNIVDEVAYHEKYPTIYHLRKKLVDSTDKADLRLIYLALAHMIKFRGHFLIEGDLNPDNSDVDKLFIQLVQTYNQLFEENPINASGVDAKAILSARLSKSRRLENLIAQLPGEKKNGLFGNLIALSLGLTPNFKSNFDLAEDAKLQLSKDTYDDDLDNLLAQIGDQYADLFLAAKNLSDAILLSDILRVNTEITKAPLSASMIKRYDEHHQDLTLLKALVRQQLPEKYKEIFFDQSKNGYAGYIDGGASQEEFYKFIKPILEKMDGTEELLVKLNREDLLRKQRTFDNGSIPHQIHLGELHAILRRQEDFYPFLKDNREKIEKILTFRIPYYVGPLARGNSRFAWMTRKSEETITPWNFEEVVDKGASAQSFIERMTNFDKNLPNEKVLPKHSLLYEYFTVYNELTKVKYVTEGMRKPAFLSGEQKKAIVDLLFKTNRKVTVKQLKEDYFKKIECFDSVEISGVEDRFNASLGTYHDLLKIIKDKDFLDNEENEDILEDIVLTLTLFEDREMIEERLKTYAHLFDDKVMKQLKRRRYTGWGRLSRKLINGIRDKQSGKTILDFLKSDGFANRNFMQLIHDDSLTFKEDIQKAQVSGQGDSLHEHIANLAGSPAIKKGILQTVKVVDELVKVMGRHKPENIVIEMARENQTTQKGQKNSRERMKRIEEGIKELGSQILKEHPVENTQLQNEKLYLYYLQNGRDMYVDQELDINRLSDYDVDHIVPQSFLKDDSIDNKVLTRSDKARGKSDNVPSEEVVKKMKNYWRQLLNAKLITQRKFDNLTKAERGGLSELDKAGFIKRQLVETRQITKHVAQILDSRMNTKYDENDKLIREVKVITLKSKLVSDFRKDFQFYKVREINNYHHAHDAYLNAVVGTALIKKYPKLESEFVYGDYKVYDVRKMIAKSEQEIGKATAKYFFYSNIMNFFKTEITLANGEIRKRPLIETNGETGEIVWDKGRDFATVRKVLSMPQVNIVKKTEVQTGGFSKESILPKRNSDKLIARKKDWDPKKYGGFDSPTVAYSVLVVAKVEKGKSKKLKSVKELLGITIMERSSFEKNPIDFLEAKGYKEVKKDLIIKLPKYSLFELENGRKRMLASAGELQKGNELALPSKYVNFLYLASHYEKLKGSPEDNEQKQLFVEQHKHYLDEIIEQISEFSKRVILADANLDKVLSAYNKHRDKPIREQAENIIHLFTLTNLGAPAAFKYFDTTIDRKRYTSTKEVLDATLIHQSITGLYETRIDLSQLGGDGGEAAAKGGGPAPGGTLNIEDEYRLHETSKEPDVSLGSTWLSDFPQAWAETGGMGLAVRQAPLIIPLKATSTPVSIKQYPMSQEARLGIKPHIQRLLDQGILVPCQSPWNTPLLPVKKPGTNDYRPVQDLREVNKRVEDIHPTVPNPYNLLSGLPPSHQWYTVLDLKDAFFCLRLHPTSQPLFAFEWRDPEMGISGQLTWTRLPQGFKNSPTLFNEALHRDLAGFRIQHPDLILLQYVDDLLLAATSELDCQQGTRALLQTLGDLGYRASAKKAQICQKQVKYLGYLLKEGQRWLTEARKETVMGQPIPKTPRQLREFLGKAGFCRLFIPGFAEMAAPLYPLTKPGTLFNWGPDQQKAFQEIKQALLTAPALGLPDLTKPFELFVDEKQGYAKGVLTQKLGPWRRPVAYLSKKLDPVAAGWPPCLRMVAAIAVLTKDAGKLTMGQPLVILAPHAVEALVKQPPDRWLSNARMTHYQALLLDTDRVQFGPVVALNPATLLPLPEEGLQHDCLDILAEAHGTRSDLMDQPLPDADHTWYTDGSSFLQEGQRKAGAAVTTETEVIWARALPAGTSAQRAELIALTQALKMAEGKKLNVYTDSRYAFATAHIHGEIYRRRGWLTSEGKEIKNKDEILALLKALFLPKRLSIIHCPGHQKGNSAEARGNRMADQAAREVATRETPETSTLLAGKRTADGSEFEKRTADGSEFESPKKKAKVE

SEQ ID NO: 2392 - protein, 2096 aa, synthetic construct
MPAAKRVKLDGGDKKYSIGLDIGTNSVGWAVITDEYKVPSKKFKVLGNTDRHSIKKNLIGALLFDSGETAEATRLKRTARRRYTRRKNRICYLQEIFSNEMAKVDDSFFHRLEESFLVEEDKKHERHPIFGNIVDEVAYHEKYPTIYHLRKKLVDSTDKADLRLIYLALAHMIKFRGHFLIEGDLNPDNSDVDKLFIQLVQTYNQLFEENPINASGVDAKAILSARLSKSRRLENLIAQLPGEKKNGLFGNLIALSLGLTPNFKSNFDLAEDAKLQLSKDTYDDDLDNLLAQIGDQYADLFLAAKNLSDAILLSDILRVNTEITKAPLSASMIKRYDEHHQDLTLLKALVRQQLPEKYKEIFFDQSKNGYAGYIDGGASQEEFYKFIKPILEKMDGTEELLVKLNREDLLRKQRTFDNGSIPHQIHLGELHAILRRQEDFYPFLKDNREKIEKILTFRIPYYVGPLARGNSRFAWMTRKSEETITPWNFEEVVDKGASAQSFIERMTNFDKNLPNEKVLPKHSLLYEYFTVYNELTKVKYVTEGMRKPAFLSGEQKKAIVDLLFKTNRKVTVKQLKEDYFKKIECFDSVEISGVEDRFNASLGTYHDLLKIIKDKDFLDNEENEDILEDIVLTLTLFEDREMIEERLKTYAHLFDDKVMKQLKRRRYTGWGRLSRKLINGIRDKQSGKTILDFLKSDGFANRNFMQLIHDDSLTFKEDIQKAQVSGQGDSLHEHIANLAGSPAIKKGILQTVKVVDELVKVMGRHKPENIVIEMARENQTTQKGQKNSRERMKRIEEGIKELGSQILKEHPVENTQLQNEKLYLYYLQNGRDMYVDQELDINRLSDYDVDHIVPQSFLKDDSIDNKVLTRSDKARGKSDNVPSEEVVKKMKNYWRQLLNAKLITQRKFDNLTKAERGGLSELDKAGFIKRQLVETRQITKHVAQILDSRMNTKYDENDKLIREVKVITLKSKLVSDFRKDFQFYKVREINNYHHAHDAYLNAVVGTALIKKYPKLESEFVYGDYKVYDVRKMIAKSEQEIGKATAKYFFYSNIMNFFKTEITLANGEIRKRPLIETNGETGEIVWDKGRDFATVRKVLSMPQVNIVKKTEVQTGGFSKESILPKRNSDKLIARKKDWDPKKYGGFDSPTVAYSVLVVAKVEKGKSKKLKSVKELLGITIMERSSFEKNPIDFLEAKGYKEVKKDLIIKLPKYSLFELENGRKRMLASAGELQKGNELALPSKYVNFLYLASHYEKLKGSPEDNEQKQLFVEQHKHYLDEIIEQISEFSKRVILADANLDKVLSAYNKHRDKPIREQAENIIHLFTLTNLGAPAAFKYFDTTIDRKRYTSTKEVLDATLIHQSITGLYETRIDLSQLGGDGGGGGPAPEAAAKGGTLNIEDEYRLHETSKEPDVSLGSTWLSDFPQAWAETGGMGLAVRQAPLIIPLKATSTPVSIKQYPMSQEARLGIKPHIQRLLDQGILVPCQSPWNTPLLPVKKPGTNDYRPVQDLREVNKRVEDIHPTVPNPYNLLSGLPPSHQWYTVLDLKDAFFCLRLHPTSQPLFAFEWRDPEMGISGQLTWTRLPQGFKNSPTLFNEALHRDLAGFRIQHPDLILLQYVDDLLLAATSELDCQQGTRALLQTLGDLGYRASAKKAQICQKQVKYLGYLLKEGQRWLTEARKETVMGQPIPKTPRQLREFLGKAGFCRLFIPGFAEMAAPLYPLTKPGTLFNWGPDQQKAFQEIKQALLTAPALGLPDLTKPFELFVDEKQGYAKGVLTQKLGPWRRPVAYLSKKLDPVAAGWPPCLRMVAAIAVLTKDAGKLTMGQPLVILAPHAVEALVKQPPDRWLSNARMTHYQALLLDTDRVQFGPVVALNPATLLPLPEEGLQHDCLDILAEAHGTRSDLMDQPLPDADHTWYTDGSSFLQEGQRKAGAAVTTETEVIWARALPAGTSAQRAELIALTQALKMAEGKKLNVYTDSRYAFATAHIHGEIYRRRGWLTSEGKEIKNKDEILALLKALFLPKRLSIIHCPGHQKGNSAEARGNRMADQAAREVATRETPETSTLLAGKRTADGSEFEKRTADGSEFESPKKKAKVE

SEQ ID NO: 2393 - protein, 2094 aa, synthetic construct
MPAAKRVKLDGGDKKYSIGLDIGTNSVGWAVITDEYKVPSKKFKVLGNTDRHSIKKNLIGALLFDSGETAEATRLKRTARRRYTRRKNRICYLQEIFSNEMAKVDDSFFHRLEESFLVEEDKKHERHPIFGNIVDEVAYHEKYPTIYHLRKKLVDSTDKADLRLIYLALAHMIKFRGHFLIEGDLNPDNSDVDKLFIQLVQTYNQLFEENPINASGVDAKAILSARLSKSRRLENLIAQLPGEKKNGLFGNLIALSLGLTPNFKSNFDLAEDAKLQLSKDTYDDDLDNLLAQIGDQYADLFLAAKNLSDAILLSDILRVNTEITKAPLSASMIKRYDEHHQDLTLLKALVRQQLPEKYKEIFFDQSKNGYAGYIDGGASQEEFYKFIKPILEKMDGTEELLVKLNREDLLRKQRTFDNGSIPHQIHLGELHAILRRQEDFYPFLKDNREKIEKILTFRIPYYVGPLARGNSRFAWMTRKSEETITPWNFEEVVDKGASAQSFIERMTNFDKNLPNEKVLPKHSLLYEYFTVYNELTKVKYVTEGMRKPAFLSGEQKKAIVDLLFKTNRKVTVKQLKEDYFKKIECFDSVEISGVEDRFNASLGTYHDLLKIIKDKDFLDNEENEDILEDIVLTLTLFEDREMIEERLKTYAHLFDDKVMKQLKRRRYTGWGRLSRKLINGIRDKQSGKTILDFLKSDGFANRNFMQLIHDDSLTFKEDIQKAQVSGQGDSLHEHIANLAGSPAIKKGILQTVKVVDELVKVMGRHKPENIVIEMARENQTTQKGQKNSRERMKRIEEGIKELGSQILKEHPVENTQLQNEKLYLYYLQNGRDMYVDQELDINRLSDYDVDHIVPQSFLKDDSIDNKVLTRSDKARGKSDNVPSEEVVKKMKNYWRQLLNAKLITQRKFDNLTKAERGGLSELDKAGFIKRQLVETRQITKHVAQILDSRMNTKYDENDKLIREVKVITLKSKLVSDFRKDFQFYKVREINNYHHAHDAYLNAVVGTALIKKYPKLESEFVYGDYKVYDVRKMIAKSEQEIGKATAKYFFYSNIMNFFKTEITLANGEIRKRPLIETNGETGEIVWDKGRDFATVRKVLSMPQVNIVKKTEVQTGGFSKESILPKRNSDKLIARKKDWDPKKYGGFDSPTVAYSVLVVAKVEKGKSKKLKSVKELLGITIMERSSFEKNPIDFLEAKGYKEVKKDLIIKLPKYSLFELENGRKRMLASAGELQKGNELALPSKYVNFLYLASHYEKLKGSPEDNEQKQLFVEQHKHYLDEIIEQISEFSKRVILADANLDKVLSAYNKHRDKPIREQAENIIHLFTLTNLGAPAAFKYFDTTIDRKRYTSTKEVLDATLIHQSITGLYETRIDLSQLGGDGGGSSGSSGSSGGTLNIEDEYRLHETSKEPDVSLGSTWLSDFPQAWAETGGMGLAVRQAPLIIPLKATSTPVSIKQYPMSQEARLGIKPHIQRLLDQGILVPCQSPWNTPLLPVKKPGTNDYRPVQDLREVNKRVEDIHPTVPNPYNLLSGLPPSHQWYTVLDLKDAFFCLRLHPTSQPLFAFEWRDPEMGISGQLTWTRLPQGFKNSPTLFNEALHRDLAGFRIQHPDLILLQYVDDLLLAATSELDCQQGTRALLQTLGDLGYRASAKKAQICQKQVKYLGYLLKEGQRWLTEARKETVMGQPIPKTPRQLREFLGKAGFCRLFIPGFAEMAAPLYPLTKPGTLFNWGPDQQKAFQEIKQALLTAPALGLPDLTKPFELFVDEKQGYAKGVLTQKLGPWRRPVAYLSKKLDPVAAGWPPCLRMVAAIAVLTKDAGKLTMGQPLVILAPHAVEALVKQPPDRWLSNARMTHYQALLLDTDRVQFGPVVALNPATLLPLPEEGLQHDCLDILAEAHGTRSDLMDQPLPDADHTWYTDGSSFLQEGQRKAGAAVTTETEVIWARALPAGTSAQRAELIALTQALKMAEGKKLNVYTDSRYAFATAHIHGEIYRRRGWLTSEGKEIKNKDEILALLKALFLPKRLSIIHCPGHQKGNSAEARGNRMADQAAREVATRETPETSTLLAGKRTADGSEFEKRTADGSEFESPKKKAKVE

SEQ ID NO: 2394 - protein, 2092 aa, synthetic construct
MPAAKRVKLDGGDKKYSIGLDIGTNSVGWAVITDEYKVPSKKFKVLGNTDRHSIKKNLIGALLFDSGETAEATRLKRTARRRYTRRKNRICYLQEIFSNEMAKVDDSFFHRLEESFLVEEDKKHERHPIFGNIVDEVAYHEKYPTIYHLRKKLVDSTDKADLRLIYLALAHMIKFRGHFLIEGDLNPDNSDVDKLFIQLVQTYNQLFEENPINASGVDAKAILSARLSKSRRLENLIAQLPGEKKNGLFGNLIALSLGLTPNFKSNFDLAEDAKLQLSKDTYDDDLDNLLAQIGDQYADLFLAAKNLSDAILLSDILRVNTEITKAPLSASMIKRYDEHHQDLTLLKALVRQQLPEKYKEIFFDQSKNGYAGYIDGGASQEEFYKFIKPILEKMDGTEELLVKLNREDLLRKQRTFDNGSIPHQIHLGELHAILRRQEDFYPFLKDNREKIEKILTFRIPYYVGPLARGNSRFAWMTRKSEETITPWNFEEVVDKGASAQSFIERMTNFDKNLPNEKVLPKHSLLYEYFTVYNELTKVKYVTEGMRKPAFLSGEQKKAIVDLLFKTNRKVTVKQLKEDYFKKIECFDSVEISGVEDRFNASLGTYHDLLKIIKDKDFLDNEENEDILEDIVLTLTLFEDREMIEERLKTYAHLFDDKVMKQLKRRRYTGWGRLSRKLINGIRDKQSGKTILDFLKSDGFANRNFMQLIHDDSLTFKEDIQKAQVSGQGDSLHEHIANLAGSPAIKKGILQTVKVVDELVKVMGRHKPENIVIEMARENQTTQKGQKNSRERMKRIEEGIKELGSQILKEHPVENTQLQNEKLYLYYLQNGRDMYVDQELDINRLSDYDVDHIVPQSFLKDDSIDNKVLTRSDKARGKSDNVPSEEVVKKMKNYWRQLLNAKLITQRKFDNLTKAERGGLSELDKAGFIKRQLVETRQITKHVAQILDSRMNTKYDENDKLIREVKVITLKSKLVSDFRKDFQFYKVREINNYHHAHDAYLNAVVGTALIKKYPKLESEFVYGDYKVYDVRKMIAKSEQEIGKATAKYFFYSNIMNFFKTEITLANGEIRKRPLIETNGETGEIVWDKGRDFATVRKVLSMPQVNIVKKTEVQTGGFSKESILPKRNSDKLIARKKDWDPKKYGGFDSPTVAYSVLVVAKVEKGKSKKLKSVKELLGITIMERSSFEKNPIDFLEAKGYKEVKKDLIIKLPKYSLFELENGRKRMLASAGELQKGNELALPSKYVNFLYLASHYEKLKGSPEDNEQKQLFVEQHKHYLDEIIEQISEFSKRVILADANLDKVLSAYNKHRDKPIREQAENIIHLFTLTNLGAPAAFKYFDTTIDRKRYTSTKEVLDATLIHQSITGLYETRIDLSQLGGDGGPAPAPAPGGTLNIEDEYRLHETSKEPDVSLGSTWLSDFPQAWAETGGMGLAVRQAPLIIPLKATSTPVSIKQYPMSQEARLGIKPHIQRLLDQGILVPCQSPWNTPLLPVKKPGTNDYRPVQDLREVNKRVEDIHPTVPNPYNLLSGLPPSHQWYTVLDLKDAFFCLRLHPTSQPLFAFEWRDPEMGISGQLTWTRLPQGFKNSPTLFNEALHRDLAGFRIQHPDLILLQYVDDLLLAATSELDCQQGTRALLQTLGDLGYRASAKKAQICQKQVKYLGYLLKEGQRWLTEARKETVMGQPIPKTPRQLREFLGKAGFCRLFIPGFAEMAAPLYPLTKPGTLFNWGPDQQKAFQEIKQALLTAPALGLPDLTKPFELFVDEKQGYAKGVLTQKLGPWRRPVAYLSKKLDPVAAGWPPCLRMVAAIAVLTKDAGKLTMGQPLVILAPHAVEALVKQPPDRWLSNARMTHYQALLLDTDRVQFGPVVALNPATLLPLPEEGLQHDCLDILAEAHGTRSDLMDQPLPDADHTWYTDGSSFLQEGQRKAGAAVTTETEVIWARALPAGTSAQRAELIALTQALKMAEGKKLNVYTDSRYAFATAHIHGEIYRRRGWLTSEGKEIKNKDEILALLKALFLPKRLSIIHCPGHQKGNSAEARGNRMADQAAREVATRETPETSTLLAGKRTADGSEFEKRTADGSEFESPKKKAKVE

SEQ ID NO: 2395 - protein, 2091 aa, synthetic construct
MPAAKRVKLDGGDKKYSIGLDIGTNSVGWAVITDEYKVPSKKFKVLGNTDRHSIKKNLIGALLFDSGETAEATRLKRTARRRYTRRKNRICYLQEIFSNEMAKVDDSFFHRLEESFLVEEDKKHERHPIFGNIVDEVAYHEKYPTIYHLRKKLVDSTDKADLRLIYLALAHMIKFRGHFLIEGDLNPDNSDVDKLFIQLVQTYNQLFEENPINASGVDAKAILSARLSKSRRLENLIAQLPGEKKNGLFGNLIALSLGLTPNFKSNFDLAEDAKLQLSKDTYDDDLDNLLAQIGDQYADLFLAAKNLSDAILLSDILRVNTEITKAPLSASMIKRYDEHHQDLTLLKALVRQQLPEKYKEIFFDQSKNGYAGYIDGGASQEEFYKFIKPILEKMDGTEELLVKLNREDLLRKQRTFDNGSIPHQIHLGELHAILRRQEDFYPFLKDNREKIEKILTFRIPYYVGPLARGNSRFAWMTRKSEETITPWNFEEVVDKGASAQSFIERMTNFDKNLPNEKVLPKHSLLYEYFTVYNELTKVKYVTEGMRKPAFLSGEQKKAIVDLLFKTNRKVTVKQLKEDYFKKIECFDSVEISGVEDRFNASLGTYHDLLKIIKDKDFLDNEENEDILEDIVLTLTLFEDREMIEERLKTYAHLFDDKVMKQLKRRRYTGWGRLSRKLINGIRDKQSGKTILDFLKSDGFANRNFMQLIHDDSLTFKEDIQKAQVSGQGDSLHEHIANLAGSPAIKKGILQTVKVVDELVKVMGRHKPENIVIEMARENQTTQKGQKNSRERMKRIEEGIKELGSQILKEHPVENTQLQNEKLYLYYLQNGRDMYVDQELDINRLSDYDVDHIVPQSFLKDDSIDNKVLTRSDKARGKSDNVPSEEVVKKMKNYWRQLLNAKLITQRKFDNLTKAERGGLSELDKAGFIKRQLVETRQITKHVAQILDSRMNTKYDENDKLIREVKVITLKSKLVSDFRKDFQFYKVREINNYHHAHDAYLNAVVGTALIKKYPKLESEFVYGDYKVYDVRKMIAKSEQEIGKATAKYFFYSNIMNFFKTEITLANGEIRKRPLIETNGETGEIVWDKGRDFATVRKVLSMPQVNIVKKTEVQTGGFSKESILPKRNSDKLIARKKDWDPKKYGGFDSPTVAYSVLVVAKVEKGKSKKLKSVKELLGITIMERSSFEKNPIDFLEAKGYKEVKKDLIIKLPKYSLFELENGRKRMLASAGELQKGNELALPSKYVNFLYLASHYEKLKGSPEDNEQKQLFVEQHKHYLDEIIEQISEFSKRVILADANLDKVLSAYNKHRDKPIREQAENIIHLFTLTNLGAPAAFKYFDTTIDRKRYTSTKEVLDATLIHQSITGLYETRIDLSQLGGDGGPAPGGGGGTLNIEDEYRLHETSKEPDVSLGSTWLSDFPQAWAETGGMGLAVRQAPLIIPLKATSTPVSIKQYPMSQEARLGIKPHIQRLLDQGILVPCQSPWNTPLLPVKKPGTNDYRPVQDLREVNKRVEDIHPTVPNPYNLLSGLPPSHQWYTVLDLKDAFFCLRLHPTSQPLFAFEWRDPEMGISGQLTWTRLPQGFKNSPTLFNEALHRDLAGFRIQHPDLILLQYVDDLLLAATSELDCQQGTRALLQTLGDLGYRASAKKAQICQKQVKYLGYLLKEGQRWLTEARKETVMGQPIPKTPRQLREFLGKAGFCRLFIPGFAEMAAPLYPLTKPGTLFNWGPDQQKAFQEIKQALLTAPALGLPDLTKPFELFVDEKQGYAKGVLTQKLGPWRRPVAYLSKKLDPVAAGWPPCLRMVAAIAVLTKDAGKLTMGQPLVILAPHAVEALVKQPPDRWLSNARMTHYQALLLDTDRVQFGPVVALNPATLLPLPEEGLQHDCLDILAEAHGTRSDLMDQPLPDADHTWYTDGSSFLQEGQRKAGAAVTTETEVIWARALPAGTSAQRAELIALTQALKMAEGKKLNVYTDSRYAFATAHIHGEIYRRRGWLTSEGKEIKNKDEILALLKALFLPKRLSIIHCPGHQKGNSAEARGNRMADQAAREVATRETPETSTLLAGKRTADGSEFEKRTADGSEFESPKKKAKVE

SEQ ID NO: 2396 - protein, 2097 aa, synthetic construct
MPAAKRVKLDGGDKKYSIGLDIGTNSVGWAVITDEYKVPSKKFKVLGNTDRHSIKKNLIGALLFDSGETAEATRLKRTARRRYTRRKNRICYLQEIFSNEMAKVDDSFFHRLEESFLVEEDKKHERHPIFGNIVDEVAYHEKYPTIYHLRKKLVDSTDKADLRLIYLALAHMIKFRGHFLIEGDLNPDNSDVDKLFIQLVQTYNQLFEENPINASGVDAKAILSARLSKSRRLENLIAQLPGEKKNGLFGNLIALSLGLTPNFKSNFDLAEDAKLQLSKDTYDDDLDNLLAQIGDQYADLFLAAKNLSDAILLSDILRVNTEITKAPLSASMIKRYDEHHQDLTLLKALVRQQLPEKYKEIFFDQSKNGYAGYIDGGASQEEFYKFIKPILEKMDGTEELLVKLNREDLLRKQRTFDNGSIPHQIHLGELHAILRRQEDFYPFLKDNREKIEKILTFRIPYYVGPLARGNSRFAWMTRKSEETITPWNFEEVVDKGASAQSFIERMTNFDKNLPNEKVLPKHSLLYEYFTVYNELTKVKYVTEGMRKPAFLSGEQKKAIVDLLFKTNRKVTVKQLKEDYFKKIECFDSVEISGVEDRFNASLGTYHDLLKIIKDKDFLDNEENEDILEDIVLTLTLFEDREMIEERLKTYAHLFDDKVMKQLKRRRYTGWGRLSRKLINGIRDKQSGKTILDFLKSDGFANRNFMQLIHDDSLTFKEDIQKAQVSGQGDSLHEHIANLAGSPAIKKGILQTVKVVDELVKVMGRHKPENIVIEMARENQTTQKGQKNSRERMKRIEEGIKELGSQILKEHPVENTQLQNEKLYLYYLQNGRDMYVDQELDINRLSDYDVDHIVPQSFLKDDSIDNKVLTRSDKARGKSDNVPSEEVVKKMKNYWRQLLNAKLITQRKFDNLTKAERGGLSELDKAGFIKRQLVETRQITKHVAQILDSRMNTKYDENDKLIREVKVITLKSKLVSDFRKDFQFYKVREINNYHHAHDAYLNAVVGTALIKKYPKLESEFVYGDYKVYDVRKMIAKSEQEIGKATAKYFFYSNIMNFFKTEITLANGEIRKRPLIETNGETGEIVWDKGRDFATVRKVLSMPQVNIVKKTEVQTGGFSKESILPKRNSDKLIARKKDWDPKKYGGFDSPTVAYSVLVVAKVEKGKSKKLKSVKELLGITIMERSSFEKNPIDFLEAKGYKEVKKDLIIKLPKYSLFELENGRKRMLASAGELQKGNELALPSKYVNFLYLASHYEKLKGSPEDNEQKQLFVEQHKHYLDEIIEQISEFSKRVILADANLDKVLSAYNKHRDKPIREQAENIIHLFTLTNLGAPAAFKYFDTTIDRKRYTSTKEVLDATLIHQSITGLYETRIDLSQLGGDGGGSSGSSGSSGSSGGTLNIEDEYRLHETSKEPDVSLGSTWLSDFPQAWAETGGMGLAVRQAPLIIPLKATSTPVSIKQYPMSQEARLGIKPHIQRLLDQGILVPCQSPWNTPLLPVKKPGTNDYRPVQDLREVNKRVEDIHPTVPNPYNLLSGLPPSHQWYTVLDLKDAFFCLRLHPTSQPLFAFEWRDPEMGISGQLTWTRLPQGFKNSPTLFNEALHRDLAGFRIQHPDLILLQYVDDLLLAATSELDCQQGTRALLQTLGDLGYRASAKKAQICQKQVKYLGYLLKEGQRWLTEARKETVMGQPIPKTPRQLREFLGKAGFCRLFIPGFAEMAAPLYPLTKPGTLFNWGPDQQKAFQEIKQALLTAPALGLPDLTKPFELFVDEKQGYAKGVLTQKLGPWRRPVAYLSKKLDPVAAGWPPCLRMVAAIAVLTKDAGKLTMGQPLVILAPHAVEALVKQPPDRWLSNARMTHYQALLLDTDRVQFGPVVALNPATLLPLPEEGLQHDCLDILAEAHGTRSDLMDQPLPDADHTWYTDGSSFLQEGQRKAGAAVTTETEVIWARALPAGTSAQRAELIALTQALKMAEGKKLNVYTDSRYAFATAHIHGEIYRRRGWLTSEGKEIKNKDEILALLKALFLPKRLSIIHCPGHQKGNSAEARGNRMADQAAREVATRETPETSTLLAGKRTADGSEFEKRTADGSEFESPKKKAKVE

SEQ ID NO: 2397 - protein, 2091 aa, synthetic construct
MPAAKRVKLDGGDKKYSIGLDIGTNSVGWAVITDEYKVPSKKFKVLGNTDRHSIKKNLIGALLFDSGETAEATRLKRTARRRYTRRKNRICYLQEIFSNEMAKVDDSFFHRLEESFLVEEDKKHERHPIFGNIVDEVAYHEKYPTIYHLRKKLVDSTDKADLRLIYLALAHMIKFRGHFLIEGDLNPDNSDVDKLFIQLVQTYNQLFEENPINASGVDAKAILSARLSKSRRLENLIAQLPGEKKNGLFGNLIALSLGLTPNFKSNFDLAEDAKLQLSKDTYDDDLDNLLAQIGDQYADLFLAAKNLSDAILLSDILRVNTEITKAPLSASMIKRYDEHHQDLTLLKALVRQQLPEKYKEIFFDQSKNGYAGYIDGGASQEEFYKFIKPILEKMDGTEELLVKLNREDLLRKQRTFDNGSIPHQIHLGELHAILRRQEDFYPFLKDNREKIEKILTFRIPYYVGPLARGNSRFAWMTRKSEETITPWNFEEVVDKGASAQSFIERMTNFDKNLPNEKVLPKHSLLYEYFTVYNELTKVKYVTEGMRKPAFLSGEQKKAIVDLLFKTNRKVTVKQLKEDYFKKIECFDSVEISGVEDRFNASLGTYHDLLKIIKDKDFLDNEENEDILEDIVLTLTLFEDREMIEERLKTYAHLFDDKVMKQLKRRRYTGWGRLSRKLINGIRDKQSGKTILDFLKSDGFANRNFMQLIHDDSLTFKEDIQKAQVSGQGDSLHEHIANLAGSPAIKKGILQTVKVVDELVKVMGRHKPENIVIEMARENQTTQKGQKNSRERMKRIEEGIKELGSQILKEHPVENTQLQNEKLYLYYLQNGRDMYVDQELDINRLSDYDVDHIVPQSFLKDDSIDNKVLTRSDKARGKSDNVPSEEVVKKMKNYWRQLLNAKLITQRKFDNLTKAERGGLSELDKAGFIKRQLVETRQITKHVAQILDSRMNTKYDENDKLIREVKVITLKSKLVSDFRKDFQFYKVREINNYHHAHDAYLNAVVGTALIKKYPKLESEFVYGDYKVYDVRKMIAKSEQEIGKATAKYFFYSNIMNFFKTEITLANGEIRKRPLIETNGETGEIVWDKGRDFATVRKVLSMPQVNIVKKTEVQTGGFSKESILPKRNSDKLIARKKDWDPKKYGGFDSPTVAYSVLVVAKVEKGKSKKLKSVKELLGITIMERSSFEKNPIDFLEAKGYKEVKKDLIIKLPKYSLFELENGRKRMLASAGELQKGNELALPSKYVNFLYLASHYEKLKGSPEDNEQKQLFVEQHKHYLDEIIEQISEFSKRVILADANLDKVLSAYNKHRDKPIREQAENIIHLFTLTNLGAPAAFKYFDTTIDRKRYTSTKEVLDATLIHQSITGLYETRIDLSQLGGDGGGGGGGSGGTLNIEDEYRLHETSKEPDVSLGSTWLSDFPQAWAETGGMGLAVRQAPLIIPLKATSTPVSIKQYPMSQEARLGIKPHIQRLLDQGILVPCQSPWNTPLLPVKKPGTNDYRPVQDLREVNKRVEDIHPTVPNPYNLLSGLPPSHQWYTVLDLKDAFFCLRLHPTSQPLFAFEWRDPEMGISGQLTWTRLPQGFKNSPTLFNEALHRDLAGFRIQHPDLILLQYVDDLLLAATSELDCQQGTRALLQTLGDLGYRASAKKAQICQKQVKYLGYLLKEGQRWLTEARKETVMGQPIPKTPRQLREFLGKAGFCRLFIPGFAEMAAPLYPLTKPGTLFNWGPDQQKAFQEIKQALLTAPALGLPDLTKPFELFVDEKQGYAKGVLTQKLGPWRRPVAYLSKKLDPVAAGWPPCLRMVAAIAVLTKDAGKLTMGQPLVILAPHAVEALVKQPPDRWLSNARMTHYQALLLDTDRVQFGPVVALNPATLLPLPEEGLQHDCLDILAEAHGTRSDLMDQPLPDADHTWYTDGSSFLQEGQRKAGAAVTTETEVIWARALPAGTSAQRAELIALTQALKMAEGKKLNVYTDSRYAFATAHIHGEIYRRRGWLTSEGKEIKNKDEILALLKALFLPKRLSIIHCPGHQKGNSAEARGNRMADQAAREVATRETPETSTLLAGKRTADGSEFEKRTADGSEFESPKKKAKVE

SEQ ID NO: 2398 - protein, 2091 aa, synthetic construct
MPAAKRVKLDGGDKKYSIGLDIGTNSVGWAVITDEYKVPSKKFKVLGNTDRHSIKKNLIGALLFDSGETAEATRLKRTARRRYTRRKNRICYLQEIFSNEMAKVDDSFFHRLEESFLVEEDKKHERHPIFGNIVDEVAYHEKYPTIYHLRKKLVDSTDKADLRLIYLALAHMIKFRGHFLIEGDLNPDNSDVDKLFIQLVQTYNQLFEENPINASGVDAKAILSARLSKSRRLENLIAQLPGEKKNGLFGNLIALSLGLTPNFKSNFDLAEDAKLQLSKDTYDDDLDNLLAQIGDQYADLFLAAKNLSDAILLSDILRVNTEITKAPLSASMIKRYDEHHQDLTLLKALVRQQLPEKYKEIFFDQSKNGYAGYIDGGASQEEFYKFIKPILEKMDGTEELLVKLNREDLLRKQRTFDNGSIPHQIHLGELHAILRRQEDFYPFLKDNREKIEKILTFRIPYYVGPLARGNSRFAWMTRKSEETITPWNFEEVVDKGASAQSFIERMTNFDKNLPNEKVLPKHSLLYEYFTVYNELTKVKYVTEGMRKPAFLSGEQKKAIVDLLFKTNRKVTVKQLKEDYFKKIECFDSVEISGVEDRFNASLGTYHDLLKIIKDKDFLDNEENEDILEDIVLTLTLFEDREMIEERLKTYAHLFDDKVMKQLKRRRYTGWGRLSRKLINGIRDKQSGKTILDFLKSDGFANRNFMQLIHDDSLTFKEDIQKAQVSGQGDSLHEHIANLAGSPAIKKGILQTVKVVDELVKVMGRHKPENIVIEMARENQTTQKGQKNSRERMKRIEEGIKELGSQILKEHPVENTQLQNEKLYLYYLQNGRDMYVDQELDINRLSDYDVDHIVPQSFLKDDSIDNKVLTRSDKARGKSDNVPSEEVVKKMKNYWRQLLNAKLITQRKFDNLTKAERGGLSELDKAGFIKRQLVETRQITKHVAQILDSRMNTKYDENDKLIREVKVITLKSKLVSDFRKDFQFYKVREINNYHHAHDAYLNAVVGTALIKKYPKLESEFVYGDYKVYDVRKMIAKSEQEIGKATAKYFFYSNIMNFFKTEITLANGEIRKRPLIETNGETGEIVWDKGRDFATVRKVLSMPQVNIVKKTEVQTGGFSKESILPKRNSDKLIARKKDWDPKKYGGFDSPTVAYSVLVVAKVEKGKSKKLKSVKELLGITIMERSSFEKNPIDFLEAKGYKEVKKDLIIKLPKYSLFELENGRKRMLASAGELQKGNELALPSKYVNFLYLASHYEKLKGSPEDNEQKQLFVEQHKHYLDEIIEQISEFSKRVILADANLDKVLSAYNKHRDKPIREQAENIIHLFTLTNLGAPAAFKYFDTTIDRKRYTSTKEVLDATLIHQSITGLYETRIDLSQLGGDGGGGSGGSGGTLNIEDEYRLHETSKEPDVSLGSTWLSDFPQAWAETGGMGLAVRQAPLIIPLKATSTPVSIKQYPMSQEARLGIKPHIQRLLDQGILVPCQSPWNTPLLPVKKPGTNDYRPVQDLREVNKRVEDIHPTVPNPYNLLSGLPPSHQWYTVLDLKDAFFCLRLHPTSQPLFAFEWRDPEMGISGQLTWTRLPQGFKNSPTLFNEALHRDLAGFRIQHPDLILLQYVDDLLLAATSELDCQQGTRALLQTLGDLGYRASAKKAQICQKQVKYLGYLLKEGQRWLTEARKETVMGQPIPKTPRQLREFLGKAGFCRLFIPGFAEMAAPLYPLTKPGTLFNWGPDQQKAFQEIKQALLTAPALGLPDLTKPFELFVDEKQGYAKGVLTQKLGPWRRPVAYLSKKLDPVAAGWPPCLRMVAAIAVLTKDAGKLTMGQPLVILAPHAVEALVKQPPDRWLSNARMTHYQALLLDTDRVQFGPVVALNPATLLPLPEEGLQHDCLDILAEAHGTRSDLMDQPLPDADHTWYTDGSSFLQEGQRKAGAAVTTETEVIWARALPAGTSAQRAELIALTQALKMAEGKKLNVYTDSRYAFATAHIHGEIYRRRGWLTSEGKEIKNKDEILALLKALFLPKRLSIIHCPGHQKGNSAEARGNRMADQAAREVATRETPETSTLLAGKRTADGSEFEKRTADGSEFESPKKKAKVE

SEQ ID NO: 2399 - protein, 2094 aa, synthetic construct
MPAAKRVKLDGGDKKYSIGLDIGTNSVGWAVITDEYKVPSKKFKVLGNTDRHSIKKNLIGALLFDSGETAEATRLKRTARRRYTRRKNRICYLQEIFSNEMAKVDDSFFHRLEESFLVEEDKKHERHPIFGNIVDEVAYHEKYPTIYHLRKKLVDSTDKADLRLIYLALAHMIKFRGHFLIEGDLNPDNSDVDKLFIQLVQTYNQLFEENPINASGVDAKAILSARLSKSRRLENLIAQLPGEKKNGLFGNLIALSLGLTPNFKSNFDLAEDAKLQLSKDTYDDDLDNLLAQIGDQYADLFLAAKNLSDAILLSDILRVNTEITKAPLSASMIKRYDEHHQDLTLLKALVRQQLPEKYKEIFFDQSKNGYAGYIDGGASQEEFYKFIKPILEKMDGTEELLVKLNREDLLRKQRTFDNGSIPHQIHLGELHAILRRQEDFYPFLKDNREKIEKILTFRIPYYVGPLARGNSRFAWMTRKSEETITPWNFEEVVDKGASAQSFIERMTNFDKNLPNEKVLPKHSLLYEYFTVYNELTKVKYVTEGMRKPAFLSGEQKKAIVDLLFKTNRKVTVKQLKEDYFKKIECFDSVEISGVEDRFNASLGTYHDLLKIIKDKDFLDNEENEDILEDIVLTLTLFEDREMIEERLKTYAHLFDDKVMKQLKRRRYTGWGRLSRKLINGIRDKQSGKTILDFLKSDGFANRNFMQLIHDDSLTFKEDIQKAQVSGQGDSLHEHIANLAGSPAIKKGILQTVKVVDELVKVMGRHKPENIVIEMARENQTTQKGQKNSRERMKRIEEGIKELGSQILKEHPVENTQLQNEKLYLYYLQNGRDMYVDQELDINRLSDYDVDHIVPQSFLKDDSIDNKVLTRSDKARGKSDNVPSEEVVKKMKNYWRQLLNAKLITQRKFDNLTKAERGGLSELDKAGFIKRQLVETRQITKHVAQILDSRMNTKYDENDKLIREVKVITLKSKLVSDFRKDFQFYKVREINNYHHAHDAYLNAVVGTALIKKYPKLESEFVYGDYKVYDVRKMIAKSEQEIGKATAKYFFYSNIMNFFKTEITLANGEIRKRPLIETNGETGEIVWDKGRDFATVRKVLSMPQVNIVKKTEVQTGGFSKESILPKRNSDKLIARKKDWDPKKYGGFDSPTVAYSVLVVAKVEKGKSKKLKSVKELLGITIMERSSFEKNPIDFLEAKGYKEVKKDLIIKLPKYSLFELENGRKRMLASAGELQKGNELALPSKYVNFLYLASHYEKLKGSPEDNEQKQLFVEQHKHYLDEIIEQISEFSKRVILADANLDKVLSAYNKHRDKPIREQAENIIHLFTLTNLGAPAAFKYFDTTIDRKRYTSTKEVLDATLIHQSITGLYETRIDLSQLGGDGGGSSGGSPAPGGTLNIEDEYRLHETSKEPDVSLGSTWLSDFPQAWAETGGMGLAVRQAPLIIPLKATSTPVSIKQYPMSQEARLGIKPHIQRLLDQGILVPCQSPWNTPLLPVKKPGTNDYRPVQDLREVNKRVEDIHPTVPNPYNLLSGLPPSHQWYTVLDLKDAFFCLRLHPTSQPLFAFEWRDPEMGISGQLTWTRLPQGFKNSPTLFNEALHRDLAGFRIQHPDLILLQYVDDLLLAATSELDCQQGTRALLQTLGDLGYRASAKKAQICQKQVKYLGYLLKEGQRWLTEARKETVMGQPIPKTPRQLREFLGKAGFCRLFIPGFAEMAAPLYPLTKPGTLFNWGPDQQKAFQEIKQALLTAPALGLPDLTKPFELFVDEKQGYAKGVLTQKLGPWRRPVAYLSKKLDPVAAGWPPCLRMVAAIAVLTKDAGKLTMGQPLVILAPHAVEALVKQPPDRWLSNARMTHYQALLLDTDRVQFGPVVALNPATLLPLPEEGLQHDCLDILAEAHGTRSDLMDQPLPDADHTWYTDGSSFLQEGQRKAGAAVTTETEVIWARALPAGTSAQRAELIALTQALKMAEGKKLNVYTDSRYAFATAHIHGEIYRRRGWLTSEGKEIKNKDEILALLKALFLPKRLSIIHCPGHQKGNSAEARGNRMADQAAREVATRETPETSTLLAGKRTADGSEFEKRTADGSEFESPKKKAKVE

SEQ ID NO: 2400 - protein, 2096 aa, synthetic construct
MPAAKRVKLDGGDKKYSIGLDIGTNSVGWAVITDEYKVPSKKFKVLGNTDRHSIKKNLIGALLFDSGETAEATRLKRTARRRYTRRKNRICYLQEIFSNEMAKVDDSFFHRLEESFLVEEDKKHERHPIFGNIVDEVAYHEKYPTIYHLRKKLVDSTDKADLRLIYLALAHMIKFRGHFLIEGDLNPDNSDVDKLFIQLVQTYNQLFEENPINASGVDAKAILSARLSKSRRLENLIAQLPGEKKNGLFGNLIALSLGLTPNFKSNFDLAEDAKLQLSKDTYDDDLDNLLAQIGDQYADLFLAAKNLSDAILLSDILRVNTEITKAPLSASMIKRYDEHHQDLTLLKALVRQQLPEKYKEIFFDQSKNGYAGYIDGGASQEEFYKFIKPILEKMDGTEELLVKLNREDLLRKQRTFDNGSIPHQIHLGELHAILRRQEDFYPFLKDNREKIEKILTFRIPYYVGPLARGNSRFAWMTRKSEETITPWNFEEVVDKGASAQSFIERMTNFDKNLPNEKVLPKHSLLYEYFTVYNELTKVKYVTEGMRKPAFLSGEQKKAIVDLLFKTNRKVTVKQLKEDYFKKIECFDSVEISGVEDRFNASLGTYHDLLKIIKDKDFLDNEENEDILEDIVLTLTLFEDREMIEERLKTYAHLFDDKVMKQLKRRRYTGWGRLSRKLINGIRDKQSGKTILDFLKSDGFANRNFMQLIHDDSLTFKEDIQKAQVSGQGDSLHEHIANLAGSPAIKKGILQTVKVVDELVKVMGRHKPENIVIEMARENQTTQKGQKNSRERMKRIEEGIKELGSQILKEHPVENTQLQNEKLYLYYLQNGRDMYVDQELDINRLSDYDVDHIVPQSFLKDDSIDNKVLTRSDKARGKSDNVPSEEVVKKMKNYWRQLLNAKLITQRKFDNLTKAERGGLSELDKAGFIKRQLVETRQITKHVAQILDSRMNTKYDENDKLIREVKVITLKSKLVSDFRKDFQFYKVREINNYHHAHDAYLNAVVGTALIKKYPKLESEFVYGDYKVYDVRKMIAKSEQEIGKATAKYFFYSNIMNFFKTEITLANGEIRKRPLIETNGETGEIVWDKGRDFATVRKVLSMPQVNIVKKTEVQTGGFSKESILPKRNSDKLIARKKDWDPKKYGGFDSPTVAYSVLVVAKVEKGKSKKLKSVKELLGITIMERSSFEKNPIDFLEAKGYKEVKKDLIIKLPKYSLFELENGRKRMLASAGELQKGNELALPSKYVNFLYLASHYEKLKGSPEDNEQKQLFVEQHKHYLDEIIEQISEFSKRVILADANLDKVLSAYNKHRDKPIREQAENIIHLFTLTNLGAPAAFKYFDTTIDRKRYTSTKEVLDATLIHQSITGLYETRIDLSQLGGDGGPAPEAAAKGGGGGTLNIEDEYRLHETSKEPDVSLGSTWLSDFPQAWAETGGMGLAVRQAPLIIPLKATSTPVSIKQYPMSQEARLGIKPHIQRLLDQGILVPCQSPWNTPLLPVKKPGTNDYRPVQDLREVNKRVEDIHPTVPNPYNLLSGLPPSHQWYTVLDLKDAFFCLRLHPTSQPLFAFEWRDPEMGISGQLTWTRLPQGFKNSPTLFNEALHRDLAGFRIQHPDLILLQYVDDLLLAATSELDCQQGTRALLQTLGDLGYRASAKKAQICQKQVKYLGYLLKEGQRWLTEARKETVMGQPIPKTPRQLREFLGKAGFCRLFIPGFAEMAAPLYPLTKPGTLFNWGPDQQKAFQEIKQALLTAPALGLPDLTKPFELFVDEKQGYAKGVLTQKLGPWRRPVAYLSKKLDPVAAGWPPCLRMVAAIAVLTKDAGKLTMGQPLVILAPHAVEALVKQPPDRWLSNARMTHYQALLLDTDRVQFGPVVALNPATLLPLPEEGLQHDCLDILAEAHGTRSDLMDQPLPDADHTWYTDGSSFLQEGQRKAGAAVTTETEVIWARALPAGTSAQRAELIALTQALKMAEGKKLNVYTDSRYAFATAHIHGEIYRRRGWLTSEGKEIKNKDEILALLKALFLPKRLSIIHCPGHQKGNSAEARGNRMADQAAREVATRETPETSTLLAGKRTADGSEFEKRTADGSEFESPKKKAKVE

SEQ ID NO: 2401 - protein, 2094 aa, synthetic construct
MPAAKRVKLDGGDKKYSIGLDIGTNSVGWAVITDEYKVPSKKFKVLGNTDRHSIKKNLIGALLFDSGETAEATRLKRTARRRYTRRKNRICYLQEIFSNEMAKVDDSFFHRLEESFLVEEDKKHERHPIFGNIVDEVAYHEKYPTIYHLRKKLVDSTDKADLRLIYLALAHMIKFRGHFLIEGDLNPDNSDVDKLFIQLVQTYNQLFEENPINASGVDAKAILSARLSKSRRLENLIAQLPGEKKNGLFGNLIALSLGLTPNFKSNFDLAEDAKLQLSKDTYDDDLDNLLAQIGDQYADLFLAAKNLSDAILLSDILRVNTEITKAPLSASMIKRYDEHHQDLTLLKALVRQQLPEKYKEIFFDQSKNGYAGYIDGGASQEEFYKFIKPILEKMDGTEELLVKLNREDLLRKQRTFDNGSIPHQIHLGELHAILRRQEDFYPFLKDNREKIEKILTFRIPYYVGPLARGNSRFAWMTRKSEETITPWNFEEVVDKGASAQSFIERMTNFDKNLPNEKVLPKHSLLYEYFTVYNELTKVKYVTEGMRKPAFLSGEQKKAIVDLLFKTNRKVTVKQLKEDYFKKIECFDSVEISGVEDRFNASLGTYHDLLKIIKDKDFLDNEENEDILEDIVLTLTLFEDREMIEERLKTYAHLFDDKVMKQLKRRRYTGWGRLSRKLINGIRDKQSGKTILDFLKSDGFANRNFMQLIHDDSLTFKEDIQKAQVSGQGDSLHEHIANLAGSPAIKKGILQTVKVVDELVKVMGRHKPENIVIEMARENQTTQKGQKNSRERMKRIEEGIKELGSQILKEHPVENTQLQNEKLYLYYLQNGRDMYVDQELDINRLSDYDVDHIVPQSFLKDDSIDNKVLTRSDKARGKSDNVPSEEVVKKMKNYWRQLLNAKLITQRKFDNLTKAERGGLSELDKAGFIKRQLVETRQITKHVAQILDSRMNTKYDENDKLIREVKVITLKSKLVSDFRKDFQFYKVREINNYHHAHDAYLNAVVGTALIKKYPKLESEFVYGDYKVYDVRKMIAKSEQEIGKATAKYFFYSNIMNFFKTEITLANGEIRKRPLIETNGETGEIVWDKGRDFATVRKVLSMPQVNIVKKTEVQTGGFSKESILPKRNSDKLIARKKDWDPKKYGGFDSPTVAYSVLVVAKVEKGKSKKLKSVKELLGITIMERSSFEKNPIDFLEAKGYKEVKKDLIIKLPKYSLFELENGRKRMLASAGELQKGNELALPSKYVNFLYLASHYEKLKGSPEDNEQKQLFVEQHKHYLDEIIEQISEFSKRVILADANLDKVLSAYNKHRDKPIREQAENIIHLFTLTNLGAPAAFKYFDTTIDRKRYTSTKEVLDATLIHQSITGLYETRIDLSQLGGDGGPAPGGGGGSGGTLNIEDEYRLHETSKEPDVSLGSTWLSDFPQAWAETGGMGLAVRQAPLIIPLKATSTPVSIKQYPMSQEARLGIKPHIQRLLDQGILVPCQSPWNTPLLPVKKPGTNDYRPVQDLREVNKRVEDIHPTVPNPYNLLSGLPPSHQWYTVLDLKDAFFCLRLHPTSQPLFAFEWRDPEMGISGQLTWTRLPQGFKNSPTLFNEALHRDLAGFRIQHPDLILLQYVDDLLLAATSELDCQQGTRALLQTLGDLGYRASAKKAQICQKQVKYLGYLLKEGQRWLTEARKETVMGQPIPKTPRQLREFLGKAGFCRLFIPGFAEMAAPLYPLTKPGTLFNWGPDQQKAFQEIKQALLTAPALGLPDLTKPFELFVDEKQGYAKGVLTQKLGPWRRPVAYLSKKLDPVAAGWPPCLRMVAAIAVLTKDAGKLTMGQPLVILAPHAVEALVKQPPDRWLSNARMTHYQALLLDTDRVQFGPVVALNPATLLPLPEEGLQHDCLDILAEAHGTRSDLMDQPLPDADHTWYTDGSSFLQEGQRKAGAAVTTETEVIWARALPAGTSAQRAELIALTQALKMAEGKKLNVYTDSRYAFATAHIHGEIYRRRGWLTSEGKEIKNKDEILALLKALFLPKRLSIIHCPGHQKGNSAEARGNRMADQAAREVATRETPETSTLLAGKRTADGSEFEKRTADGSEFESPKKKAKVE

SEQ ID NO: 2402 - protein, 2094 aa, synthetic construct
MPAAKRVKLDGGDKKYSIGLDIGTNSVGWAVITDEYKVPSKKFKVLGNTDRHSIKKNLIGALLFDSGETAEATRLKRTARRRYTRRKNRICYLQEIFSNEMAKVDDSFFHRLEESFLVEEDKKHERHPIFGNIVDEVAYHEKYPTIYHLRKKLVDSTDKADLRLIYLALAHMIKFRGHFLIEGDLNPDNSDVDKLFIQLVQTYNQLFEENPINASGVDAKAILSARLSKSRRLENLIAQLPGEKKNGLFGNLIALSLGLTPNFKSNFDLAEDAKLQLSKDTYDDDLDNLLAQIGDQYADLFLAAKNLSDAILLSDILRVNTEITKAPLSASMIKRYDEHHQDLTLLKALVRQQLPEKYKEIFFDQSKNGYAGYIDGGASQEEFYKFIKPILEKMDGTEELLVKLNREDLLRKQRTFDNGSIPHQIHLGELHAILRRQEDFYPFLKDNREKIEKILTFRIPYYVGPLARGNSRFAWMTRKSEETITPWNFEEVVDKGASAQSFIERMTNFDKNLPNEKVLPKHSLLYEYFTVYNELTKVKYVTEGMRKPAFLSGEQKKAIVDLLFKTNRKVTVKQLKEDYFKKIECFDSVEISGVEDRFNASLGTYHDLLKIIKDKDFLDNEENEDILEDIVLTLTLFEDREMIEERLKTYAHLFDDKVMKQLKRRRYTGWGRLSRKLINGIRDKQSGKTILDFLKSDGFANRNFMQLIHDDSLTFKEDIQKAQVSGQGDSLHEHIANLAGSPAIKKGILQTVKVVDELVKVMGRHKPENIVIEMARENQTTQKGQKNSRERMKRIEEGIKELGSQILKEHPVENTQLQNEKLYLYYLQNGRDMYVDQELDINRLSDYDVDHIVPQSFLKDDSIDNKVLTRSDKARGKSDNVPSEEVVKKMKNYWRQLLNAKLITQRKFDNLTKAERGGLSELDKAGFIKRQLVETRQITKHVAQILDSRMNTKYDENDKLIREVKVITLKSKLVSDFRKDFQFYKVREINNYHHAHDAYLNAVVGTALIKKYPKLESEFVYGDYKVYDVRKMIAKSEQEIGKATAKYFFYSNIMNFFKTEITLANGEIRKRPLIETNGETGEIVWDKGRDFATVRKVLSMPQVNIVKKTEVQTGGFSKESILPKRNSDKLIARKKDWDPKKYGGFDSPTVAYSVLVVAKVEKGKSKKLKSVKELLGITIMERSSFEKNPIDFLEAKGYKEVKKDLIIKLPKYSLFELENGRKRMLASAGELQKGNELALPSKYVNFLYLASHYEKLKGSPEDNEQKQLFVEQHKHYLDEIIEQISEFSKRVILADANLDKVLSAYNKHRDKPIREQAENIIHLFTLTNLGAPAAFKYFDTTIDRKRYTSTKEVLDATLIHQSITGLYETRIDLSQLGGDGGGSSGGGPAPGGTLNIEDEYRLHETSKEPDVSLGSTWLSDFPQAWAETGGMGLAVRQAPLIIPLKATSTPVSIKQYPMSQEARLGIKPHIQRLLDQGILVPCQSPWNTPLLPVKKPGTNDYRPVQDLREVNKRVEDIHPTVPNPYNLLSGLPPSHQWYTVLDLKDAFFCLRLHPTSQPLFAFEWRDPEMGISGQLTWTRLPQGFKNSPTLFNEALHRDLAGFRIQHPDLILLQYVDDLLLAATSELDCQQGTRALLQTLGDLGYRASAKKAQICQKQVKYLGYLLKEGQRWLTEARKETVMGQPIPKTPRQLREFLGKAGFCRLFIPGFAEMAAPLYPLTKPGTLFNWGPDQQKAFQEIKQALLTAPALGLPDLTKPFELFVDEKQGYAKGVLTQKLGPWRRPVAYLSKKLDPVAAGWPPCLRMVAAIAVLTKDAGKLTMGQPLVILAPHAVEALVKQPPDRWLSNARMTHYQALLLDTDRVQFGPVVALNPATLLPLPEEGLQHDCLDILAEAHGTRSDLMDQPLPDADHTWYTDGSSFLQEGQRKAGAAVTTETEVIWARALPAGTSAQRAELIALTQALKMAEGKKLNVYTDSRYAFATAHIHGEIYRRRGWLTSEGKEIKNKDEILALLKALFLPKRLSIIHCPGHQKGNSAEARGNRMADQAAREVATRETPETSTLLAGKRTADGSEFEKRTADGSEFESPKKKAKVE

SEQ ID NO: 2403 - protein, 2094 aa, synthetic construct
MPAAKRVKLDGGDKKYSIGLDIGTNSVGWAVITDEYKVPSKKFKVLGNTDRHSIKKNLIGALLFDSGETAEATRLKRTARRRYTRRKNRICYLQEIFSNEMAKVDDSFFHRLEESFLVEEDKKHERHPIFGNIVDEVAYHEKYPTIYHLRKKLVDSTDKADLRLIYLALAHMIKFRGHFLIEGDLNPDNSDVDKLFIQLVQTYNQLFEENPINASGVDAKAILSARLSKSRRLENLIAQLPGEKKNGLFGNLIALSLGLTPNFKSNFDLAEDAKLQLSKDTYDDDLDNLLAQIGDQYADLFLAAKNLSDAILLSDILRVNTEITKAPLSASMIKRYDEHHQDLTLLKALVRQQLPEKYKEIFFDQSKNGYAGYIDGGASQEEFYKFIKPILEKMDGTEELLVKLNREDLLRKQRTFDNGSIPHQIHLGELHAILRRQEDFYPFLKDNREKIEKILTFRIPYYVGPLARGNSRFAWMTRKSEETITPWNFEEVVDKGASAQSFIERMTNFDKNLPNEKVLPKHSLLYEYFTVYNELTKVKYVTEGMRKPAFLSGEQKKAIVDLLFKTNRKVTVKQLKEDYFKKIECFDSVEISGVEDRFNASLGTYHDLLKIIKDKDFLDNEENEDILEDIVLTLTLFEDREMIEERLKTYAHLFDDKVMKQLKRRRYTGWGRLSRKLINGIRDKQSGKTILDFLKSDGFANRNFMQLIHDDSLTFKEDIQKAQVSGQGDSLHEHIANLAGSPAIKKGILQTVKVVDELVKVMGRHKPENIVIEMARENQTTQKGQKNSRERMKRIEEGIKELGSQILKEHPVENTQLQNEKLYLYYLQNGRDMYVDQELDINRLSDYDVDHIVPQSFLKDDSIDNKVLTRSDKARGKSDNVPSEEVVKKMKNYWRQLLNAKLITQRKFDNLTKAERGGLSELDKAGFIKRQLVETRQITKHVAQILDSRMNTKYDENDKLIREVKVITLKSKLVSDFRKDFQFYKVREINNYHHAHDAYLNAVVGTALIKKYPKLESEFVYGDYKVYDVRKMIAKSEQEIGKATAKYFFYSNIMNFFKTEITLANGEIRKRPLIETNGETGEIVWDKGRDFATVRKVLSMPQVNIVKKTEVQTGGFSKESILPKRNSDKLIARKKDWDPKKYGGFDSPTVAYSVLVVAKVEKGKSKKLKSVKELLGITIMERSSFEKNPIDFLEAKGYKEVKKDLIIKLPKYSLFELENGRKRMLASAGELQKGNELALPSKYVNFLYLASHYEKLKGSPEDNEQKQLFVEQHKHYLDEIIEQISEFSKRVILADANLDKVLSAYNKHRDKPIREQAENIIHLFTLTNLGAPAAFKYFDTTIDRKRYTSTKEVLDATLIHQSITGLYETRIDLSQLGGDGGPAPGGSGGGGGTLNIEDEYRLHETSKEPDVSLGSTWLSDFPQAWAETGGMGLAVRQAPLIIPLKATSTPVSIKQYPMSQEARLGIKPHIQRLLDQGILVPCQSPWNTPLLPVKKPGTNDYRPVQDLREVNKRVEDIHPTVPNPYNLLSGLPPSHQWYTVLDLKDAFFCLRLHPTSQPLFAFEWRDPEMGISGQLTWTRLPQGFKNSPTLFNEALHRDLAGFRIQHPDLILLQYVDDLLLAATSELDCQQGTRALLQTLGDLGYRASAKKAQICQKQVKYLGYLLKEGQRWLTEARKETVMGQPIPKTPRQLREFLGKAGFCRLFIPGFAEMAAPLYPLTKPGTLFNWGPDQQKAFQEIKQALLTAPALGLPDLTKPFELFVDEKQGYAKGVLTQKLGPWRRPVAYLSKKLDPVAAGWPPCLRMVAAIAVLTKDAGKLTMGQPLVILAPHAVEALVKQPPDRWLSNARMTHYQALLLDTDRVQFGPVVALNPATLLPLPEEGLQHDCLDILAEAHGTRSDLMDQPLPDADHTWYTDGSSFLQEGQRKAGAAVTTETEVIWARALPAGTSAQRAELIALTQALKMAEGKKLNVYTDSRYAFATAHIHGEIYRRRGWLTSEGKEIKNKDEILALLKALFLPKRLSIIHCPGHQKGNSAEARGNRMADQAAREVATRETPETSTLLAGKRTADGSEFEKRTADGSEFESPKKKAKVE

SEQ ID NO: 2404 - protein, 2096 aa, synthetic construct
MPAAKRVKLDGGDKKYSIGLDIGTNSVGWAVITDEYKVPSKKFKVLGNTDRHSIKKNLIGALLFDSGETAEATRLKRTARRRYTRRKNRICYLQEIFSNEMAKVDDSFFHRLEESFLVEEDKKHERHPIFGNIVDEVAYHEKYPTIYHLRKKLVDSTDKADLRLIYLALAHMIKFRGHFLIEGDLNPDNSDVDKLFIQLVQTYNQLFEENPINASGVDAKAILSARLSKSRRLENLIAQLPGEKKNGLFGNLIALSLGLTPNFKSNFDLAEDAKLQLSKDTYDDDLDNLLAQIGDQYADLFLAAKNLSDAILLSDILRVNTEITKAPLSASMIKRYDEHHQDLTLLKALVRQQLPEKYKEIFFDQSKNGYAGYIDGGASQEEFYKFIKPILEKMDGTEELLVKLNREDLLRKQRTFDNGSIPHQIHLGELHAILRRQEDFYPFLKDNREKIEKILTFRIPYYVGPLARGNSRFAWMTRKSEETITPWNFEEVVDKGASAQSFIERMTNFDKNLPNEKVLPKHSLLYEYFTVYNELTKVKYVTEGMRKPAFLSGEQKKAIVDLLFKTNRKVTVKQLKEDYFKKIECFDSVEISGVEDRFNASLGTYHDLLKIIKDKDFLDNEENEDILEDIVLTLTLFEDREMIEERLKTYAHLFDDKVMKQLKRRRYTGWGRLSRKLINGIRDKQSGKTILDFLKSDGFANRNFMQLIHDDSLTFKEDIQKAQVSGQGDSLHEHIANLAGSPAIKKGILQTVKVVDELVKVMGRHKPENIVIEMARENQTTQKGQKNSRERMKRIEEGIKELGSQILKEHPVENTQLQNEKLYLYYLQNGRDMYVDQELDINRLSDYDVDHIVPQSFLKDDSIDNKVLTRSDKARGKSDNVPSEEVVKKMKNYWRQLLNAKLITQRKFDNLTKAERGGLSELDKAGFIKRQLVETRQITKHVAQILDSRMNTKYDENDKLIREVKVITLKSKLVSDFRKDFQFYKVREINNYHHAHDAYLNAVVGTALIKKYPKLESEFVYGDYKVYDVRKMIAKSEQEIGKATAKYFFYSNIMNFFKTEITLANGEIRKRPLIETNGETGEIVWDKGRDFATVRKVLSMPQVNIVKKTEVQTGGFSKESILPKRNSDKLIARKKDWDPKKYGGFDSPTVAYSVLVVAKVEKGKSKKLKSVKELLGITIMERSSFEKNPIDFLEAKGYKEVKKDLIIKLPKYSLFELENGRKRMLASAGELQKGNELALPSKYVNFLYLASHYEKLKGSPEDNEQKQLFVEQHKHYLDEIIEQISEFSKRVILADANLDKVLSAYNKHRDKPIREQAENIIHLFTLTNLGAPAAFKYFDTTIDRKRYTSTKEVLDATLIHQSITGLYETRIDLSQLGGDGGGGSGSSEAAAKGGTLNIEDEYRLHETSKEPDVSLGSTWLSDFPQAWAETGGMGLAVRQAPLIIPLKATSTPVSIKQYPMSQEARLGIKPHIQRLLDQGILVPCQSPWNTPLLPVKKPGTNDYRPVQDLREVNKRVEDIHPTVPNPYNLLSGLPPSHQWYTVLDLKDAFFCLRLHPTSQPLFAFEWRDPEMGISGQLTWTRLPQGFKNSPTLFNEALHRDLAGFRIQHPDLILLQYVDDLLLAATSELDCQQGTRALLQTLGDLGYRASAKKAQICQKQVKYLGYLLKEGQRWLTEARKETVMGQPIPKTPRQLREFLGKAGFCRLFIPGFAEMAAPLYPLTKPGTLFNWGPDQQKAFQEIKQALLTAPALGLPDLTKPFELFVDEKQGYAKGVLTQKLGPWRRPVAYLSKKLDPVAAGWPPCLRMVAAIAVLTKDAGKLTMGQPLVILAPHAVEALVKQPPDRWLSNARMTHYQALLLDTDRVQFGPVVALNPATLLPLPEEGLQHDCLDILAEAHGTRSDLMDQPLPDADHTWYTDGSSFLQEGQRKAGAAVTTETEVIWARALPAGTSAQRAELIALTQALKMAEGKKLNVYTDSRYAFATAHIHGEIYRRRGWLTSEGKEIKNKDEILALLKALFLPKRLSIIHCPGHQKGNSAEARGNRMADQAAREVATRETPETSTLLAGKRTADGSEFEKRTADGSEFESPKKKAKVE

SEQ ID NO: 2405 - protein, 2100 aa, synthetic construct
MPAAKRVKLDGGDKKYSIGLDIGTNSVGWAVITDEYKVPSKKFKVLGNTDRHSIKKNLIGALLFDSGETAEATRLKRTARRRYTRRKNRICYLQEIFSNEMAKVDDSFFHRLEESFLVEEDKKHERHPIFGNIVDEVAYHEKYPTIYHLRKKLVDSTDKADLRLIYLALAHMIKFRGHFLIEGDLNPDNSDVDKLFIQLVQTYNQLFEENPINASGVDAKAILSARLSKSRRLENLIAQLPGEKKNGLFGNLIALSLGLTPNFKSNFDLAEDAKLQLSKDTYDDDLDNLLAQIGDQYADLFLAAKNLSDAILLSDILRVNTEITKAPLSASMIKRYDEHHQDLTLLKALVRQQLPEKYKEIFFDQSKNGYAGYIDGGASQEEFYKFIKPILEKMDGTEELLVKLNREDLLRKQRTFDNGSIPHQIHLGELHAILRRQEDFYPFLKDNREKIEKILTFRIPYYVGPLARGNSRFAWMTRKSEETITPWNFEEVVDKGASAQSFIERMTNFDKNLPNEKVLPKHSLLYEYFTVYNELTKVKYVTEGMRKPAFLSGEQKKAIVDLLFKTNRKVTVKQLKEDYFKKIECFDSVEISGVEDRFNASLGTYHDLLKIIKDKDFLDNEENEDILEDIVLTLTLFEDREMIEERLKTYAHLFDDKVMKQLKRRRYTGWGRLSRKLINGIRDKQSGKTILDFLKSDGFANRNFMQLIHDDSLTFKEDIQKAQVSGQGDSLHEHIANLAGSPAIKKGILQTVKVVDELVKVMGRHKPENIVIEMARENQTTQKGQKNSRERMKRIEEGIKELGSQILKEHPVENTQLQNEKLYLYYLQNGRDMYVDQELDINRLSDYDVDHIVPQSFLKDDSIDNKVLTRSDKARGKSDNVPSEEVVKKMKNYWRQLLNAKLITQRKFDNLTKAERGGLSELDKAGFIKRQLVETRQITKHVAQILDSRMNTKYDENDKLIREVKVITLKSKLVSDFRKDFQFYKVREINNYHHAHDAYLNAVVGTALIKKYPKLESEFVYGDYKVYDVRKMIAKSEQEIGKATAKYFFYSNIMNFFKTEITLANGEIRKRPLIETNGETGEIVWDKGRDFATVRKVLSMPQVNIVKKTEVQTGGFSKESILPKRNSDKLIARKKDWDPKKYGGFDSPTVAYSVLVVAKVEKGKSKKLKSVKELLGITIMERSSFEKNPIDFLEAKGYKEVKKDLIIKLPKYSLFELENGRKRMLASAGELQKGNELALPSKYVNFLYLASHYEKLKGSPEDNEQKQLFVEQHKHYLDEIIEQISEFSKRVILADANLDKVLSAYNKHRDKPIREQAENIIHLFTLTNLGAPAAFKYFDTTIDRKRYTSTKEVLDATLIHQSITGLYETRIDLSQLGGDGGGSSGSSGSSGSSGSSGGTLNIEDEYRLHETSKEPDVSLGSTWLSDFPQAWAETGGMGLAVRQAPLIIPLKATSTPVSIKQYPMSQEARLGIKPHIQRLLDQGILVPCQSPWNTPLLPVKKPGTNDYRPVQDLREVNKRVEDIHPTVPNPYNLLSGLPPSHQWYTVLDLKDAFFCLRLHPTSQPLFAFEWRDPEMGISGQLTWTRLPQGFKNSPTLFNEALHRDLAGFRIQHPDLILLQYVDDLLLAATSELDCQQGTRALLQTLGDLGYRASAKKAQICQKQVKYLGYLLKEGQRWLTEARKETVMGQPIPKTPRQLREFLGKAGFCRLFIPGFAEMAAPLYPLTKPGTLFNWGPDQQKAFQEIKQALLTAPALGLPDLTKPFELFVDEKQGYAKGVLTQKLGPWRRPVAYLSKKLDPVAAGWPPCLRMVAAIAVLTKDAGKLTMGQPLVILAPHAVEALVKQPPDRWLSNARMTHYQALLLDTDRVQFGPVVALNPATLLPLPEEGLQHDCLDILAEAHGTRSDLMDQPLPDADHTWYTDGSSFLQEGQRKAGAAVTTETEVIWARALPAGTSAQRAELIALTQALKMAEGKKLNVYTDSRYAFATAHIHGEIYRRRGWLTSEGKEIKNKDEILALLKALFLPKRLSIIHCPGHQKGNSAEARGNRMADQAAREVATRETPETSTLLAGKRTADGSEFEKRTADGSEFESPKKKAKVE

SEQ ID NO: 2406 - protein, 2091 aa, synthetic construct
MPAAKRVKLDGGDKKYSIGLDIGTNSVGWAVITDEYKVPSKKFKVLGNTDRHSIKKNLIGALLFDSGETAEATRLKRTARRRYTRRKNRICYLQEIFSNEMAKVDDSFFHRLEESFLVEEDKKHERHPIFGNIVDEVAYHEKYPTIYHLRKKLVDSTDKADLRLIYLALAHMIKFRGHFLIEGDLNPDNSDVDKLFIQLVQTYNQLFEENPINASGVDAKAILSARLSKSRRLENLIAQLPGEKKNGLFGNLIALSLGLTPNFKSNFDLAEDAKLQLSKDTYDDDLDNLLAQIGDQYADLFLAAKNLSDAILLSDILRVNTEITKAPLSASMIKRYDEHHQDLTLLKALVRQQLPEKYKEIFFDQSKNGYAGYIDGGASQEEFYKFIKPILEKMDGTEELLVKLNREDLLRKQRTFDNGSIPHQIHLGELHAILRRQEDFYPFLKDNREKIEKILTFRIPYYVGPLARGNSRFAWMTRKSEETITPWNFEEVVDKGASAQSFIERMTNFDKNLPNEKVLPKHSLLYEYFTVYNELTKVKYVTEGMRKPAFLSGEQKKAIVDLLFKTNRKVTVKQLKEDYFKKIECFDSVEISGVEDRFNASLGTYHDLLKIIKDKDFLDNEENEDILEDIVLTLTLFEDREMIEERLKTYAHLFDDKVMKQLKRRRYTGWGRLSRKLINGIRDKQSGKTILDFLKSDGFANRNFMQLIHDDSLTFKEDIQKAQVSGQGDSLHEHIANLAGSPAIKKGILQTVKVVDELVKVMGRHKPENIVIEMARENQTTQKGQKNSRERMKRIEEGIKELGSQILKEHPVENTQLQNEKLYLYYLQNGRDMYVDQELDINRLSDYDVDHIVPQSFLKDDSIDNKVLTRSDKARGKSDNVPSEEVVKKMKNYWRQLLNAKLITQRKFDNLTKAERGGLSELDKAGFIKRQLVETRQITKHVAQILDSRMNTKYDENDKLIREVKVITLKSKLVSDFRKDFQFYKVREINNYHHAHDAYLNAVVGTALIKKYPKLESEFVYGDYKVYDVRKMIAKSEQEIGKATAKYFFYSNIMNFFKTEITLANGEIRKRPLIETNGETGEIVWDKGRDFATVRKVLSMPQVNIVKKTEVQTGGFSKESILPKRNSDKLIARKKDWDPKKYGGFDSPTVAYSVLVVAKVEKGKSKKLKSVKELLGITIMERSSFEKNPIDFLEAKGYKEVKKDLIIKLPKYSLFELENGRKRMLASAGELQKGNELALPSKYVNFLYLASHYEKLKGSPEDNEQKQLFVEQHKHYLDEIIEQISEFSKRVILADANLDKVLSAYNKHRDKPIREQAENIIHLFTLTNLGAPAAFKYFDTTIDRKRYTSTKEVLDATLIHQSITGLYETRIDLSQLGGDGGGSSGGSGGTLNIEDEYRLHETSKEPDVSLGSTWLSDFPQAWAETGGMGLAVRQAPLIIPLKATSTPVSIKQYPMSQEARLGIKPHIQRLLDQGILVPCQSPWNTPLLPVKKPGTNDYRPVQDLREVNKRVEDIHPTVPNPYNLLSGLPPSHQWYTVLDLKDAFFCLRLHPTSQPLFAFEWRDPEMGISGQLTWTRLPQGFKNSPTLFNEALHRDLAGFRIQHPDLILLQYVDDLLLAATSELDCQQGTRALLQTLGDLGYRASAKKAQICQKQVKYLGYLLKEGQRWLTEARKETVMGQPIPKTPRQLREFLGKAGFCRLFIPGFAEMAAPLYPLTKPGTLFNWGPDQQKAFQEIKQALLTAPALGLPDLTKPFELFVDEKQGYAKGVLTQKLGPWRRPVAYLSKKLDPVAAGWPPCLRMVAAIAVLTKDAGKLTMGQPLVILAPHAVEALVKQPPDRWLSNARMTHYQALLLDTDRVQFGPVVALNPATLLPLPEEGLQHDCLDILAEAHGTRSDLMDQPLPDADHTWYTDGSSFLQEGQRKAGAAVTTETEVIWARALPAGTSAQRAELIALTQALKMAEGKKLNVYTDSRYAFATAHIHGEIYRRRGWLTSEGKEIKNKDEILALLKALFLPKRLSIIHCPGHQKGNSAEARGNRMADQAAREVATRETPETSTLLAGKRTADGSEFEKRTADGSEFESPKKKAKVE

SEQ ID NO: 2407 - protein, 2094 aa, synthetic construct
MPAAKRVKLDGGDKKYSIGLDIGTNSVGWAVITDEYKVPSKKFKVLGNTDRHSIKKNLIGALLFDSGETAEATRLKRTARRRYTRRKNRICYLQEIFSNEMAKVDDSFFHRLEESFLVEEDKKHERHPIFGNIVDEVAYHEKYPTIYHLRKKLVDSTDKADLRLIYLALAHMIKFRGHFLIEGDLNPDNSDVDKLFIQLVQTYNQLFEENPINASGVDAKAILSARLSKSRRLENLIAQLPGEKKNGLFGNLIALSLGLTPNFKSNFDLAEDAKLQLSKDTYDDDLDNLLAQIGDQYADLFLAAKNLSDAILLSDILRVNTEITKAPLSASMIKRYDEHHQDLTLLKALVRQQLPEKYKEIFFDQSKNGYAGYIDGGASQEEFYKFIKPILEKMDGTEELLVKLNREDLLRKQRTFDNGSIPHQIHLGELHAILRRQEDFYPFLKDNREKIEKILTFRIPYYVGPLARGNSRFAWMTRKSEETITPWNFEEVVDKGASAQSFIERMTNFDKNLPNEKVLPKHSLLYEYFTVYNELTKVKYVTEGMRKPAFLSGEQKKAIVDLLFKTNRKVTVKQLKEDYFKKIECFDSVEISGVEDRFNASLGTYHDLLKIIKDKDFLDNEENEDILEDIVLTLTLFEDREMIEERLKTYAHLFDDKVMKQLKRRRYTGWGRLSRKLINGIRDKQSGKTILDFLKSDGFANRNFMQLIHDDSLTFKEDIQKAQVSGQGDSLHEHIANLAGSPAIKKGILQTVKVVDELVKVMGRHKPENIVIEMARENQTTQKGQKNSRERMKRIEEGIKELGSQILKEHPVENTQLQNEKLYLYYLQNGRDMYVDQELDINRLSDYDVDHIVPQSFLKDDSIDNKVLTRSDKARGKSDNVPSEEVVKKMKNYWRQLLNAKLITQRKFDNLTKAERGGLSELDKAGFIKRQLVETRQITKHVAQILDSRMNTKYDENDKLIREVKVITLKSKLVSDFRKDFQFYKVREINNYHHAHDAYLNAVVGTALIKKYPKLESEFVYGDYKVYDVRKMIAKSEQEIGKATAKYFFYSNIMNFFKTEITLANGEIRKRPLIETNGETGEIVWDKGRDFATVRKVLSMPQVNIVKKTEVQTGGFSKESILPKRNSDKLIARKKDWDPKKYGGFDSPTVAYSVLVVAKVEKGKSKKLKSVKELLGITIMERSSFEKNPIDFLEAKGYKEVKKDLIIKLPKYSLFELENGRKRMLASAGELQKGNELALPSKYVNFLYLASHYEKLKGSPEDNEQKQLFVEQHKHYLDEIIEQISEFSKRVILADANLDKVLSAYNKHRDKPIREQAENIIHLFTLTNLGAPAAFKYFDTTIDRKRYTSTKEVLDATLIHQSITGLYETRIDLSQLGGDGGGSSPAPGGSGGTLNIEDEYRLHETSKEPDVSLGSTWLSDFPQAWAETGGMGLAVRQAPLIIPLKATSTPVSIKQYPMSQEARLGIKPHIQRLLDQGILVPCQSPWNTPLLPVKKPGTNDYRPVQDLREVNKRVEDIHPTVPNPYNLLSGLPPSHQWYTVLDLKDAFFCLRLHPTSQPLFAFEWRDPEMGISGQLTWTRLPQGFKNSPTLFNEALHRDLAGFRIQHPDLILLQYVDDLLLAATSELDCQQGTRALLQTLGDLGYRASAKKAQICQKQVKYLGYLLKEGQRWLTEARKETVMGQPIPKTPRQLREFLGKAGFCRLFIPGFAEMAAPLYPLTKPGTLFNWGPDQQKAFQEIKQALLTAPALGLPDLTKPFELFVDEKQGYAKGVLTQKLGPWRRPVAYLSKKLDPVAAGWPPCLRMVAAIAVLTKDAGKLTMGQPLVILAPHAVEALVKQPPDRWLSNARMTHYQALLLDTDRVQFGPVVALNPATLLPLPEEGLQHDCLDILAEAHGTRSDLMDQPLPDADHTWYTDGSSFLQEGQRKAGAAVTTETEVIWARALPAGTSAQRAELIALTQALKMAEGKKLNVYTDSRYAFATAHIHGEIYRRRGWLTSEGKEIKNKDEILALLKALFLPKRLSIIHCPGHQKGNSAEARGNRMADQAAREVATRETPETSTLLAGKRTADGSEFEKRTADGSEFESPKKKAKVE

SEQ ID NO: 2408 - protein, 2096 aa, synthetic construct
MPAAKRVKLDGGDKKYSIGLDIGTNSVGWAVITDEYKVPSKKFKVLGNTDRHSIKKNLIGALLFDSGETAEATRLKRTARRRYTRRKNRICYLQEIFSNEMAKVDDSFFHRLEESFLVEEDKKHERHPIFGNIVDEVAYHEKYPTIYHLRKKLVDSTDKADLRLIYLALAHMIKFRGHFLIEGDLNPDNSDVDKLFIQLVQTYNQLFEENPINASGVDAKAILSARLSKSRRLENLIAQLPGEKKNGLFGNLIALSLGLTPNFKSNFDLAEDAKLQLSKDTYDDDLDNLLAQIGDQYADLFLAAKNLSDAILLSDILRVNTEITKAPLSASMIKRYDEHHQDLTLLKALVRQQLPEKYKEIFFDQSKNGYAGYIDGGASQEEFYKFIKPILEKMDGTEELLVKLNREDLLRKQRTFDNGSIPHQIHLGELHAILRRQEDFYPFLKDNREKIEKILTFRIPYYVGPLARGNSRFAWMTRKSEETITPWNFEEVVDKGASAQSFIERMTNFDKNLPNEKVLPKHSLLYEYFTVYNELTKVKYVTEGMRKPAFLSGEQKKAIVDLLFKTNRKVTVKQLKEDYFKKIECFDSVEISGVEDRFNASLGTYHDLLKIIKDKDFLDNEENEDILEDIVLTLTLFEDREMIEERLKTYAHLFDDKVMKQLKRRRYTGWGRLSRKLINGIRDKQSGKTILDFLKSDGFANRNFMQLIHDDSLTFKEDIQKAQVSGQGDSLHEHIANLAGSPAIKKGILQTVKVVDELVKVMGRHKPENIVIEMARENQTTQKGQKNSRERMKRIEEGIKELGSQILKEHPVENTQLQNEKLYLYYLQNGRDMYVDQELDINRLSDYDVDHIVPQSFLKDDSIDNKVLTRSDKARGKSDNVPSEEVVKKMKNYWRQLLNAKLITQRKFDNLTKAERGGLSELDKAGFIKRQLVETRQITKHVAQILDSRMNTKYDENDKLIREVKVITLKSKLVSDFRKDFQFYKVREINNYHHAHDAYLNAVVGTALIKKYPKLESEFVYGDYKVYDVRKMIAKSEQEIGKATAKYFFYSNIMNFFKTEITLANGEIRKRPLIETNGETGEIVWDKGRDFATVRKVLSMPQVNIVKKTEVQTGGFSKESILPKRNSDKLIARKKDWDPKKYGGFDSPTVAYSVLVVAKVEKGKSKKLKSVKELLGITIMERSSFEKNPIDFLEAKGYKEVKKDLIIKLPKYSLFELENGRKRMLASAGELQKGNELALPSKYVNFLYLASHYEKLKGSPEDNEQKQLFVEQHKHYLDEIIEQISEFSKRVILADANLDKVLSAYNKHRDKPIREQAENIIHLFTLTNLGAPAAFKYFDTTIDRKRYTSTKEVLDATLIHQSITGLYETRIDLSQLGGDGGGGSEAAAKGSSGGTLNIEDEYRLHETSKEPDVSLGSTWLSDFPQAWAETGGMGLAVRQAPLIIPLKATSTPVSIKQYPMSQEARLGIKPHIQRLLDQGILVPCQSPWNTPLLPVKKPGTNDYRPVQDLREVNKRVEDIHPTVPNPYNLLSGLPPSHQWYTVLDLKDAFFCLRLHPTSQPLFAFEWRDPEMGISGQLTWTRLPQGFKNSPTLFNEALHRDLAGFRIQHPDLILLQYVDDLLLAATSELDCQQGTRALLQTLGDLGYRASAKKAQICQKQVKYLGYLLKEGQRWLTEARKETVMGQPIPKTPRQLREFLGKAGFCRLFIPGFAEMAAPLYPLTKPGTLFNWGPDQQKAFQEIKQALLTAPALGLPDLTKPFELFVDEKQGYAKGVLTQKLGPWRRPVAYLSKKLDPVAAGWPPCLRMVAAIAVLTKDAGKLTMGQPLVILAPHAVEALVKQPPDRWLSNARMTHYQALLLDTDRVQFGPVVALNPATLLPLPEEGLQHDCLDILAEAHGTRSDLMDQPLPDADHTWYTDGSSFLQEGQRKAGAAVTTETEVIWARALPAGTSAQRAELIALTQALKMAEGKKLNVYTDSRYAFATAHIHGEIYRRRGWLTSEGKEIKNKDEILALLKALFLPKRLSIIHCPGHQKGNSAEARGNRMADQAAREVATRETPETSTLLAGKRTADGSEFEKRTADGSEFESPKKKAKVE

SEQ ID NO: 2409 - protein, 2094 aa, synthetic construct
MPAAKRVKLDGGDKKYSIGLDIGTNSVGWAVITDEYKVPSKKFKVLGNTDRHSIKKNLIGALLFDSGETAEATRLKRTARRRYTRRKNRICYLQEIFSNEMAKVDDSFFHRLEESFLVEEDKKHERHPIFGNIVDEVAYHEKYPTIYHLRKKLVDSTDKADLRLIYLALAHMIKFRGHFLIEGDLNPDNSDVDKLFIQLVQTYNQLFEENPINASGVDAKAILSARLSKSRRLENLIAQLPGEKKNGLFGNLIALSLGLTPNFKSNFDLAEDAKLQLSKDTYDDDLDNLLAQIGDQYADLFLAAKNLSDAILLSDILRVNTEITKAPLSASMIKRYDEHHQDLTLLKALVRQQLPEKYKEIFFDQSKNGYAGYIDGGASQEEFYKFIKPILEKMDGTEELLVKLNREDLLRKQRTFDNGSIPHQIHLGELHAILRRQEDFYPFLKDNREKIEKILTFRIPYYVGPLARGNSRFAWMTRKSEETITPWNFEEVVDKGASAQSFIERMTNFDKNLPNEKVLPKHSLLYEYFTVYNELTKVKYVTEGMRKPAFLSGEQKKAIVDLLFKTNRKVTVKQLKEDYFKKIECFDSVEISGVEDRFNASLGTYHDLLKIIKDKDFLDNEENEDILEDIVLTLTLFEDREMIEERLKTYAHLFDDKVMKQLKRRRYTGWGRLSRKLINGIRDKQSGKTILDFLKSDGFANRNFMQLIHDDSLTFKEDIQKAQVSGQGDSLHEHIANLAGSPAIKKGILQTVKVVDELVKVMGRHKPENIVIEMARENQTTQKGQKNSRERMKRIEEGIKELGSQILKEHPVENTQLQNEKLYLYYLQNGRDMYVDQELDINRLSDYDVDHIVPQSFLKDDSIDNKVLTRSDKARGKSDNVPSEEVVKKMKNYWRQLLNAKLITQRKFDNLTKAERGGLSELDKAGFIKRQLVETRQITKHVAQILDSRMNTKYDENDKLIREVKVITLKSKLVSDFRKDFQFYKVREINNYHHAHDAYLNAVVGTALIKKYPKLESEFVYGDYKVYDVRKMIAKSEQEIGKATAKYFFYSNIMNFFKTEITLANGEIRKRPLIETNGETGEIVWDKGRDFATVRKVLSMPQVNIVKKTEVQTGGFSKESILPKRNSDKLIARKKDWDPKKYGGFDSPTVAYSVLVVAKVEKGKSKKLKSVKELLGITIMERSSFEKNPIDFLEAKGYKEVKKDLIIKLPKYSLFELENGRKRMLASAGELQKGNELALPSKYVNFLYLASHYEKLKGSPEDNEQKQLFVEQHKHYLDEIIEQISEFSKRVILADANLDKVLSAYNKHRDKPIREQAENIIHLFTLTNLGAPAAFKYFDTTIDRKRYTSTKEVLDATLIHQSITGLYETRIDLSQLGGDGGGGGGSSGGSGGTLNIEDEYRLHETSKEPDVSLGSTWLSDFPQAWAETGGMGLAVRQAPLIIPLKATSTPVSIKQYPMSQEARLGIKPHIQRLLDQGILVPCQSPWNTPLLPVKKPGTNDYRPVQDLREVNKRVEDIHPTVPNPYNLLSGLPPSHQWYTVLDLKDAFFCLRLHPTSQPLFAFEWRDPEMGISGQLTWTRLPQGFKNSPTLFNEALHRDLAGFRIQHPDLILLQYVDDLLLAATSELDCQQGTRALLQTLGDLGYRASAKKAQICQKQVKYLGYLLKEGQRWLTEARKETVMGQPIPKTPRQLREFLGKAGFCRLFIPGFAEMAAPLYPLTKPGTLFNWGPDQQKAFQEIKQALLTAPALGLPDLTKPFELFVDEKQGYAKGVLTQKLGPWRRPVAYLSKKLDPVAAGWPPCLRMVAAIAVLTKDAGKLTMGQPLVILAPHAVEALVKQPPDRWLSNARMTHYQALLLDTDRVQFGPVVALNPATLLPLPEEGLQHDCLDILAEAHGTRSDLMDQPLPDADHTWYTDGSSFLQEGQRKAGAAVTTETEVIWARALPAGTSAQRAELIALTQALKMAEGKKLNVYTDSRYAFATAHIHGEIYRRRGWLTSEGKEIKNKDEILALLKALFLPKRLSIIHCPGHQKGNSAEARGNRMADQAAREVATRETPETSTLLAGKRTADGSEFEKRTADGSEFESPKKKAKVE

SEQ ID NO: 2410 - protein, 2110 aa, synthetic construct
MPAAKRVKLDGGDKKYSIGLDIGTNSVGWAVITDEYKVPSKKFKVLGNTDRHSIKKNLIGALLFDSGETAEATRLKRTARRRYTRRKNRICYLQEIFSNEMAKVDDSFFHRLEESFLVEEDKKHERHPIFGNIVDEVAYHEKYPTIYHLRKKLVDSTDKADLRLIYLALAHMIKFRGHFLIEGDLNPDNSDVDKLFIQLVQTYNQLFEENPINASGVDAKAILSARLSKSRRLENLIAQLPGEKKNGLFGNLIALSLGLTPNFKSNFDLAEDAKLQLSKDTYDDDLDNLLAQIGDQYADLFLAAKNLSDAILLSDILRVNTEITKAPLSASMIKRYDEHHQDLTLLKALVRQQLPEKYKEIFFDQSKNGYAGYIDGGASQEEFYKFIKPILEKMDGTEELLVKLNREDLLRKQRTFDNGSIPHQIHLGELHAILRRQEDFYPFLKDNREKIEKILTFRIPYYVGPLARGNSRFAWMTRKSEETITPWNFEEVVDKGASAQSFIERMTNFDKNLPNEKVLPKHSLLYEYFTVYNELTKVKYVTEGMRKPAFLSGEQKKAIVDLLFKTNRKVTVKQLKEDYFKKIECFDSVEISGVEDRFNASLGTYHDLLKIIKDKDFLDNEENEDILEDIVLTLTLFEDREMIEERLKTYAHLFDDKVMKQLKRRRYTGWGRLSRKLINGIRDKQSGKTILDFLKSDGFANRNFMQLIHDDSLTFKEDIQKAQVSGQGDSLHEHIANLAGSPAIKKGILQTVKVVDELVKVMGRHKPENIVIEMARENQTTQKGQKNSRERMKRIEEGIKELGSQILKEHPVENTQLQNEKLYLYYLQNGRDMYVDQELDINRLSDYDVDHIVPQSFLKDDSIDNKVLTRSDKARGKSDNVPSEEVVKKMKNYWRQLLNAKLITQRKFDNLTKAERGGLSELDKAGFIKRQLVETRQITKHVAQILDSRMNTKYDENDKLIREVKVITLKSKLVSDFRKDFQFYKVREINNYHHAHDAYLNAVVGTALIKKYPKLESEFVYGDYKVYDVRKMIAKSEQEIGKATAKYFFYSNIMNFFKTEITLANGEIRKRPLIETNGETGEIVWDKGRDFATVRKVLSMPQVNIVKKTEVQTGGFSKESILPKRNSDKLIARKKDWDPKKYGGFDSPTVAYSVLVVAKVEKGKSKKLKSVKELLGITIMERSSFEKNPIDFLEAKGYKEVKKDLIIKLPKYSLFELENGRKRMLASAGELQKGNELALPSKYVNFLYLASHYEKLKGSPEDNEQKQLFVEQHKHYLDEIIEQISEFSKRVILADANLDKVLSAYNKHRDKPIREQAENIIHLFTLTNLGAPAAFKYFDTTIDRKRYTSTKEVLDATLIHQSITGLYETRIDLSQLGGDGGGGGGSGGGGSGGGGSGGGGSGGGGSGGTLNIEDEYRLHETSKEPDVSLGSTWLSDFPQAWAETGGMGLAVRQAPLIIPLKATSTPVSIKQYPMSQEARLGIKPHIQRLLDQGILVPCQSPWNTPLLPVKKPGTNDYRPVQDLREVNKRVEDIHPTVPNPYNLLSGLPPSHQWYTVLDLKDAFFCLRLHPTSQPLFAFEWRDPEMGISGQLTWTRLPQGFKNSPTLFNEALHRDLAGFRIQHPDLILLQYVDDLLLAATSELDCQQGTRALLQTLGDLGYRASAKKAQICQKQVKYLGYLLKEGQRWLTEARKETVMGQPIPKTPRQLREFLGKAGFCRLFIPGFAEMAAPLYPLTKPGTLFNWGPDQQKAFQEIKQALLTAPALGLPDLTKPFELFVDEKQGYAKGVLTQKLGPWRRPVAYLSKKLDPVAAGWPPCLRMVAAIAVLTKDAGKLTMGQPLVILAPHAVEALVKQPPDRWLSNARMTHYQALLLDTDRVQFGPVVALNPATLLPLPEEGLQHDCLDILAEAHGTRSDLMDQPLPDADHTWYTDGSSFLQEGQRKAGAAVTTETEVIWARALPAGTSAQRAELIALTQALKMAEGKKLNVYTDSRYAFATAHIHGEIYRRRGWLTSEGKEIKNKDEILALLKALFLPKRLSIIHCPGHQKGNSAEARGNRMADQAAREVATRETPETSTLLAGKRTADGSEFEKRTADGSEFESPKKKAKVE

SEQ ID NO: 2411 - protein, 2091 aa, synthetic construct
MPAAKRVKLDGGDKKYSIGLDIGTNSVGWAVITDEYKVPSKKFKVLGNTDRHSIKKNLIGALLFDSGETAEATRLKRTARRRYTRRKNRICYLQEIFSNEMAKVDDSFFHRLEESFLVEEDKKHERHPIFGNIVDEVAYHEKYPTIYHLRKKLVDSTDKADLRLIYLALAHMIKFRGHFLIEGDLNPDNSDVDKLFIQLVQTYNQLFEENPINASGVDAKAILSARLSKSRRLENLIAQLPGEKKNGLFGNLIALSLGLTPNFKSNFDLAEDAKLQLSKDTYDDDLDNLLAQIGDQYADLFLAAKNLSDAILLSDILRVNTEITKAPLSASMIKRYDEHHQDLTLLKALVRQQLPEKYKEIFFDQSKNGYAGYIDGGASQEEFYKFIKPILEKMDGTEELLVKLNREDLLRKQRTFDNGSIPHQIHLGELHAILRRQEDFYPFLKDNREKIEKILTFRIPYYVGPLARGNSRFAWMTRKSEETITPWNFEEVVDKGASAQSFIERMTNFDKNLPNEKVLPKHSLLYEYFTVYNELTKVKYVTEGMRKPAFLSGEQKKAIVDLLFKTNRKVTVKQLKEDYFKKIECFDSVEISGVEDRFNASLGTYHDLLKIIKDKDFLDNEENEDILEDIVLTLTLFEDREMIEERLKTYAHLFDDKVMKQLKRRRYTGWGRLSRKLINGIRDKQSGKTILDFLKSDGFANRNFMQLIHDDSLTFKEDIQKAQVSGQGDSLHEHIANLAGSPAIKKGILQTVKVVDELVKVMGRHKPENIVIEMARENQTTQKGQKNSRERMKRIEEGIKELGSQILKEHPVENTQLQNEKLYLYYLQNGRDMYVDQELDINRLSDYDVDHIVPQSFLKDDSIDNKVLTRSDKARGKSDNVPSEEVVKKMKNYWRQLLNAKLITQRKFDNLTKAERGGLSELDKAGFIKRQLVETRQITKHVAQILDSRMNTKYDENDKLIREVKVITLKSKLVSDFRKDFQFYKVREINNYHHAHDAYLNAVVGTALIKKYPKLESEFVYGDYKVYDVRKMIAKSEQEIGKATAKYFFYSNIMNFFKTEITLANGEIRKRPLIETNGETGEIVWDKGRDFATVRKVLSMPQVNIVKKTEVQTGGFSKESILPKRNSDKLIARKKDWDPKKYGGFDSPTVAYSVLVVAKVEKGKSKKLKSVKELLGITIMERSSFEKNPIDFLEAKGYKEVKKDLIIKLPKYSLFELENGRKRMLASAGELQKGNELALPSKYVNFLYLASHYEKLKGSPEDNEQKQLFVEQHKHYLDEIIEQISEFSKRVILADANLDKVLSAYNKHRDKPIREQAENIIHLFTLTNLGAPAAFKYFDTTIDRKRYTSTKEVLDATLIHQSITGLYETRIDLSQLGGDGGGSSGSSGGTLNIEDEYRLHETSKEPDVSLGSTWLSDFPQAWAETGGMGLAVRQAPLIIPLKATSTPVSIKQYPMSQEARLGIKPHIQRLLDQGILVPCQSPWNTPLLPVKKPGTNDYRPVQDLREVNKRVEDIHPTVPNPYNLLSGLPPSHQWYTVLDLKDAFFCLRLHPTSQPLFAFEWRDPEMGISGQLTWTRLPQGFKNSPTLFNEALHRDLAGFRIQHPDLILLQYVDDLLLAATSELDCQQGTRALLQTLGDLGYRASAKKAQICQKQVKYLGYLLKEGQRWLTEARKETVMGQPIPKTPRQLREFLGKAGFCRLFIPGFAEMAAPLYPLTKPGTLFNWGPDQQKAFQEIKQALLTAPALGLPDLTKPFELFVDEKQGYAKGVLTQKLGPWRRPVAYLSKKLDPVAAGWPPCLRMVAAIAVLTKDAGKLTMGQPLVILAPHAVEALVKQPPDRWLSNARMTHYQALLLDTDRVQFGPVVALNPATLLPLPEEGLQHDCLDILAEAHGTRSDLMDQPLPDADHTWYTDGSSFLQEGQRKAGAAVTTETEVIWARALPAGTSAQRAELIALTQALKMAEGKKLNVYTDSRYAFATAHIHGEIYRRRGWLTSEGKEIKNKDEILALLKALFLPKRLSIIHCPGHQKGNSAEARGNRMADQAAREVATRETPETSTLLAGKRTADGSEFEKRTADGSEFESPKKKAKVE

SEQ ID NO: 2412 - protein, 2096 aa, synthetic construct
MPAAKRVKLDGGDKKYSIGLDIGTNSVGWAVITDEYKVPSKKFKVLGNTDRHSIKKNLIGALLFDSGETAEATRLKRTARRRYTRRKNRICYLQEIFSNEMAKVDDSFFHRLEESFLVEEDKKHERHPIFGNIVDEVAYHEKYPTIYHLRKKLVDSTDKADLRLIYLALAHMIKFRGHFLIEGDLNPDNSDVDKLFIQLVQTYNQLFEENPINASGVDAKAILSARLSKSRRLENLIAQLPGEKKNGLFGNLIALSLGLTPNFKSNFDLAEDAKLQLSKDTYDDDLDNLLAQIGDQYADLFLAAKNLSDAILLSDILRVNTEITKAPLSASMIKRYDEHHQDLTLLKALVRQQLPEKYKEIFFDQSKNGYAGYIDGGASQEEFYKFIKPILEKMDGTEELLVKLNREDLLRKQRTFDNGSIPHQIHLGELHAILRRQEDFYPFLKDNREKIEKILTFRIPYYVGPLARGNSRFAWMTRKSEETITPWNFEEVVDKGASAQSFIERMTNFDKNLPNEKVLPKHSLLYEYFTVYNELTKVKYVTEGMRKPAFLSGEQKKAIVDLLFKTNRKVTVKQLKEDYFKKIECFDSVEISGVEDRFNASLGTYHDLLKIIKDKDFLDNEENEDILEDIVLTLTLFEDREMIEERLKTYAHLFDDKVMKQLKRRRYTGWGRLSRKLINGIRDKQSGKTILDFLKSDGFANRNFMQLIHDDSLTFKEDIQKAQVSGQGDSLHEHIANLAGSPAIKKGILQTVKVVDELVKVMGRHKPENIVIEMARENQTTQKGQKNSRERMKRIEEGIKELGSQILKEHPVENTQLQNEKLYLYYLQNGRDMYVDQELDINRLSDYDVDHIVPQSFLKDDSIDNKVLTRSDKARGKSDNVPSEEVVKKMKNYWRQLLNAKLITQRKFDNLTKAERGGLSELDKAGFIKRQLVETRQITKHVAQILDSRMNTKYDENDKLIREVKVITLKSKLVSDFRKDFQFYKVREINNYHHAHDAYLNAVVGTALIKKYPKLESEFVYGDYKVYDVRKMIAKSEQEIGKATAKYFFYSNIMNFFKTEITLANGEIRKRPLIETNGETGEIVWDKGRDFATVRKVLSMPQVNIVKKTEVQTGGFSKESILPKRNSDKLIARKKDWDPKKYGGFDSPTVAYSVLVVAKVEKGKSKKLKSVKELLGITIMERSSFEKNPIDFLEAKGYKEVKKDLIIKLPKYSLFELENGRKRMLASAGELQKGNELALPSKYVNFLYLASHYEKLKGSPEDNEQKQLFVEQHKHYLDEIIEQISEFSKRVILADANLDKVLSAYNKHRDKPIREQAENIIHLFTLTNLGAPAAFKYFDTTIDRKRYTSTKEVLDATLIHQSITGLYETRIDLSQLGGDGGEAAAKGGGGSSGGTLNIEDEYRLHETSKEPDVSLGSTWLSDFPQAWAETGGMGLAVRQAPLIIPLKATSTPVSIKQYPMSQEARLGIKPHIQRLLDQGILVPCQSPWNTPLLPVKKPGTNDYRPVQDLREVNKRVEDIHPTVPNPYNLLSGLPPSHQWYTVLDLKDAFFCLRLHPTSQPLFAFEWRDPEMGISGQLTWTRLPQGFKNSPTLFNEALHRDLAGFRIQHPDLILLQYVDDLLLAATSELDCQQGTRALLQTLGDLGYRASAKKAQICQKQVKYLGYLLKEGQRWLTEARKETVMGQPIPKTPRQLREFLGKAGFCRLFIPGFAEMAAPLYPLTKPGTLFNWGPDQQKAFQEIKQALLTAPALGLPDLTKPFELFVDEKQGYAKGVLTQKLGPWRRPVAYLSKKLDPVAAGWPPCLRMVAAIAVLTKDAGKLTMGQPLVILAPHAVEALVKQPPDRWLSNARMTHYQALLLDTDRVQFGPVVALNPATLLPLPEEGLQHDCLDILAEAHGTRSDLMDQPLPDADHTWYTDGSSFLQEGQRKAGAAVTTETEVIWARALPAGTSAQRAELIALTQALKMAEGKKLNVYTDSRYAFATAHIHGEIYRRRGWLTSEGKEIKNKDEILALLKALFLPKRLSIIHCPGHQKGNSAEARGNRMADQAAREVATRETPETSTLLAGKRTADGSEFEKRTADGSEFESPKKKAKVE

SEQ ID NO: 2413 - protein, 2096 aa, synthetic construct
MPAAKRVKLDGGDKKYSIGLDIGTNSVGWAVITDEYKVPSKKFKVLGNTDRHSIKKNLIGALLFDSGETAEATRLKRTARRRYTRRKNRICYLQEIFSNEMAKVDDSFFHRLEESFLVEEDKKHERHPIFGNIVDEVAYHEKYPTIYHLRKKLVDSTDKADLRLIYLALAHMIKFRGHFLIEGDLNPDNSDVDKLFIQLVQTYNQLFEENPINASGVDAKAILSARLSKSRRLENLIAQLPGEKKNGLFGNLIALSLGLTPNFKSNFDLAEDAKLQLSKDTYDDDLDNLLAQIGDQYADLFLAAKNLSDAILLSDILRVNTEITKAPLSASMIKRYDEHHQDLTLLKALVRQQLPEKYKEIFFDQSKNGYAGYIDGGASQEEFYKFIKPILEKMDGTEELLVKLNREDLLRKQRTFDNGSIPHQIHLGELHAILRRQEDFYPFLKDNREKIEKILTFRIPYYVGPLARGNSRFAWMTRKSEETITPWNFEEVVDKGASAQSFIERMTNFDKNLPNEKVLPKHSLLYEYFTVYNELTKVKYVTEGMRKPAFLSGEQKKAIVDLLFKTNRKVTVKQLKEDYFKKIECFDSVEISGVEDRFNASLGTYHDLLKIIKDKDFLDNEENEDILEDIVLTLTLFEDREMIEERLKTYAHLFDDKVMKQLKRRRYTGWGRLSRKLINGIRDKQSGKTILDFLKSDGFANRNFMQLIHDDSLTFKEDIQKAQVSGQGDSLHEHIANLAGSPAIKKGILQTVKVVDELVKVMGRHKPENIVIEMARENQTTQKGQKNSRERMKRIEEGIKELGSQILKEHPVENTQLQNEKLYLYYLQNGRDMYVDQELDINRLSDYDVDHIVPQSFLKDDSIDNKVLTRSDKARGKSDNVPSEEVVKKMKNYWRQLLNAKLITQRKFDNLTKAERGGLSELDKAGFIKRQLVETRQITKHVAQILDSRMNTKYDENDKLIREVKVITLKSKLVSDFRKDFQFYKVREINNYHHAHDAYLNAVVGTALIKKYPKLESEFVYGDYKVYDVRKMIAKSEQEIGKATAKYFFYSNIMNFFKTEITLANGEIRKRPLIETNGETGEIVWDKGRDFATVRKVLSMPQVNIVKKTEVQTGGFSKESILPKRNSDKLIARKKDWDPKKYGGFDSPTVAYSVLVVAKVEKGKSKKLKSVKELLGITIMERSSFEKNPIDFLEAKGYKEVKKDLIIKLPKYSLFELENGRKRMLASAGELQKGNELALPSKYVNFLYLASHYEKLKGSPEDNEQKQLFVEQHKHYLDEIIEQISEFSKRVILADANLDKVLSAYNKHRDKPIREQAENIIHLFTLTNLGAPAAFKYFDTTIDRKRYTSTKEVLDATLIHQSITGLYETRIDLSQLGGDGGGGSGGGEAAAKGGTLNIEDEYRLHETSKEPDVSLGSTWLSDFPQAWAETGGMGLAVRQAPLIIPLKATSTPVSIKQYPMSQEARLGIKPHIQRLLDQGILVPCQSPWNTPLLPVKKPGTNDYRPVQDLREVNKRVEDIHPTVPNPYNLLSGLPPSHQWYTVLDLKDAFFCLRLHPTSQPLFAFEWRDPEMGISGQLTWTRLPQGFKNSPTLFNEALHRDLAGFRIQHPDLILLQYVDDLLLAATSELDCQQGTRALLQTLGDLGYRASAKKAQICQKQVKYLGYLLKEGQRWLTEARKETVMGQPIPKTPRQLREFLGKAGFCRLFIPGFAEMAAPLYPLTKPGTLFNWGPDQQKAFQEIKQALLTAPALGLPDLTKPFELFVDEKQGYAKGVLTQKLGPWRRPVAYLSKKLDPVAAGWPPCLRMVAAIAVLTKDAGKLTMGQPLVILAPHAVEALVKQPPDRWLSNARMTHYQALLLDTDRVQFGPVVALNPATLLPLPEEGLQHDCLDILAEAHGTRSDLMDQPLPDADHTWYTDGSSFLQEGQRKAGAAVTTETEVIWARALPAGTSAQRAELIALTQALKMAEGKKLNVYTDSRYAFATAHIHGEIYRRRGWLTSEGKEIKNKDEILALLKALFLPKRLSIIHCPGHQKGNSAEARGNRMADQAAREVATRETPETSTLLAGKRTADGSEFEKRTADGSEFESPKKKAKVE

SEQ ID NO: 2414 - protein, 2094 aa, synthetic construct
MPAAKRVKLDGGDKKYSIGLDIGTNSVGWAVITDEYKVPSKKFKVLGNTDRHSIKKNLIGALLFDSGETAEATRLKRTARRRYTRRKNRICYLQEIFSNEMAKVDDSFFHRLEESFLVEEDKKHERHPIFGNIVDEVAYHEKYPTIYHLRKKLVDSTDKADLRLIYLALAHMIKFRGHFLIEGDLNPDNSDVDKLFIQLVQTYNQLFEENPINASGVDAKAILSARLSKSRRLENLIAQLPGEKKNGLFGNLIALSLGLTPNFKSNFDLAEDAKLQLSKDTYDDDLDNLLAQIGDQYADLFLAAKNLSDAILLSDILRVNTEITKAPLSASMIKRYDEHHQDLTLLKALVRQQLPEKYKEIFFDQSKNGYAGYIDGGASQEEFYKFIKPILEKMDGTEELLVKLNREDLLRKQRTFDNGSIPHQIHLGELHAILRRQEDFYPFLKDNREKIEKILTFRIPYYVGPLARGNSRFAWMTRKSEETITPWNFEEVVDKGASAQSFIERMTNFDKNLPNEKVLPKHSLLYEYFTVYNELTKVKYVTEGMRKPAFLSGEQKKAIVDLLFKTNRKVTVKQLKEDYFKKIECFDSVEISGVEDRFNASLGTYHDLLKIIKDKDFLDNEENEDILEDIVLTLTLFEDREMIEERLKTYAHLFDDKVMKQLKRRRYTGWGRLSRKLINGIRDKQSGKTILDFLKSDGFANRNFMQLIHDDSLTFKEDIQKAQVSGQGDSLHEHIANLAGSPAIKKGILQTVKVVDELVKVMGRHKPENIVIEMARENQTTQKGQKNSRERMKRIEEGIKELGSQILKEHPVENTQLQNEKLYLYYLQNGRDMYVDQELDINRLSDYDVDHIVPQSFLKDDSIDNKVLTRSDKARGKSDNVPSEEVVKKMKNYWRQLLNAKLITQRKFDNLTKAERGGLSELDKAGFIKRQLVETRQITKHVAQILDSRMNTKYDENDKLIREVKVITLKSKLVSDFRKDFQFYKVREINNYHHAHDAYLNAVVGTALIKKYPKLESEFVYGDYKVYDVRKMIAKSEQEIGKATAKYFFYSNIMNFFKTEITLANGEIRKRPLIETNGETGEIVWDKGRDFATVRKVLSMPQVNIVKKTEVQTGGFSKESILPKRNSDKLIARKKDWDPKKYGGFDSPTVAYSVLVVAKVEKGKSKKLKSVKELLGITIMERSSFEKNPIDFLEAKGYKEVKKDLIIKLPKYSLFELENGRKRMLASAGELQKGNELALPSKYVNFLYLASHYEKLKGSPEDNEQKQLFVEQHKHYLDEIIEQISEFSKRVILADANLDKVLSAYNKHRDKPIREQAENIIHLFTLTNLGAPAAFKYFDTTIDRKRYTSTKEVLDATLIHQSITGLYETRIDLSQLGGDGGPAPGSSGGGGGTLNIEDEYRLHETSKEPDVSLGSTWLSDFPQAWAETGGMGLAVRQAPLIIPLKATSTPVSIKQYPMSQEARLGIKPHIQRLLDQGILVPCQSPWNTPLLPVKKPGTNDYRPVQDLREVNKRVEDIHPTVPNPYNLLSGLPPSHQWYTVLDLKDAFFCLRLHPTSQPLFAFEWRDPEMGISGQLTWTRLPQGFKNSPTLFNEALHRDLAGFRIQHPDLILLQYVDDLLLAATSELDCQQGTRALLQTLGDLGYRASAKKAQICQKQVKYLGYLLKEGQRWLTEARKETVMGQPIPKTPRQLREFLGKAGFCRLFIPGFAEMAAPLYPLTKPGTLFNWGPDQQKAFQEIKQALLTAPALGLPDLTKPFELFVDEKQGYAKGVLTQKLGPWRRPVAYLSKKLDPVAAGWPPCLRMVAAIAVLTKDAGKLTMGQPLVILAPHAVEALVKQPPDRWLSNARMTHYQALLLDTDRVQFGPVVALNPATLLPLPEEGLQHDCLDILAEAHGTRSDLMDQPLPDADHTWYTDGSSFLQEGQRKAGAAVTTETEVIWARALPAGTSAQRAELIALTQALKMAEGKKLNVYTDSRYAFATAHIHGEIYRRRGWLTSEGKEIKNKDEILALLKALFLPKRLSIIHCPGHQKGNSAEARGNRMADQAAREVATRETPETSTLLAGKRTADGSEFEKRTADGSEFESPKKKAKVE

SEQ ID NO: 2415 - protein, 2089 aa, synthetic construct
MPAAKRVKLDGGDKKYSIGLDIGTNSVGWAVITDEYKVPSKKFKVLGNTDRHSIKKNLIGALLFDSGETAEATRLKRTARRRYTRRKNRICYLQEIFSNEMAKVDDSFFHRLEESFLVEEDKKHERHPIFGNIVDEVAYHEKYPTIYHLRKKLVDSTDKADLRLIYLALAHMIKFRGHFLIEGDLNPDNSDVDKLFIQLVQTYNQLFEENPINASGVDAKAILSARLSKSRRLENLIAQLPGEKKNGLFGNLIALSLGLTPNFKSNFDLAEDAKLQLSKDTYDDDLDNLLAQIGDQYADLFLAAKNLSDAILLSDILRVNTEITKAPLSASMIKRYDEHHQDLTLLKALVRQQLPEKYKEIFFDQSKNGYAGYIDGGASQEEFYKFIKPILEKMDGTEELLVKLNREDLLRKQRTFDNGSIPHQIHLGELHAILRRQEDFYPFLKDNREKIEKILTFRIPYYVGPLARGNSRFAWMTRKSEETITPWNFEEVVDKGASAQSFIERMTNFDKNLPNEKVLPKHSLLYEYFTVYNELTKVKYVTEGMRKPAFLSGEQKKAIVDLLFKTNRKVTVKQLKEDYFKKIECFDSVEISGVEDRFNASLGTYHDLLKIIKDKDFLDNEENEDILEDIVLTLTLFEDREMIEERLKTYAHLFDDKVMKQLKRRRYTGWGRLSRKLINGIRDKQSGKTILDFLKSDGFANRNFMQLIHDDSLTFKEDIQKAQVSGQGDSLHEHIANLAGSPAIKKGILQTVKVVDELVKVMGRHKPENIVIEMARENQTTQKGQKNSRERMKRIEEGIKELGSQILKEHPVENTQLQNEKLYLYYLQNGRDMYVDQELDINRLSDYDVDHIVPQSFLKDDSIDNKVLTRSDKARGKSDNVPSEEVVKKMKNYWRQLLNAKLITQRKFDNLTKAERGGLSELDKAGFIKRQLVETRQITKHVAQILDSRMNTKYDENDKLIREVKVITLKSKLVSDFRKDFQFYKVREINNYHHAHDAYLNAVVGTALIKKYPKLESEFVYGDYKVYDVRKMIAKSEQEIGKATAKYFFYSNIMNFFKTEITLANGEIRKRPLIETNGETGEIVWDKGRDFATVRKVLSMPQVNIVKKTEVQTGGFSKESILPKRNSDKLIARKKDWDPKKYGGFDSPTVAYSVLVVAKVEKGKSKKLKSVKELLGITIMERSSFEKNPIDFLEAKGYKEVKKDLIIKLPKYSLFELENGRKRMLASAGELQKGNELALPSKYVNFLYLASHYEKLKGSPEDNEQKQLFVEQHKHYLDEIIEQISEFSKRVILADANLDKVLSAYNKHRDKPIREQAENIIHLFTLTNLGAPAAFKYFDTTIDRKRYTSTKEVLDATLIHQSITGLYETRIDLSQLGGDGGGGGGGGTLNIEDEYRLHETSKEPDVSLGSTWLSDFPQAWAETGGMGLAVRQAPLIIPLKATSTPVSIKQYPMSQEARLGIKPHIQRLLDQGILVPCQSPWNTPLLPVKKPGTNDYRPVQDLREVNKRVEDIHPTVPNPYNLLSGLPPSHQWYTVLDLKDAFFCLRLHPTSQPLFAFEWRDPEMGISGQLTWTRLPQGFKNSPTLFNEALHRDLAGFRIQHPDLILLQYVDDLLLAATSELDCQQGTRALLQTLGDLGYRASAKKAQICQKQVKYLGYLLKEGQRWLTEARKETVMGQPIPKTPRQLREFLGKAGFCRLFIPGFAEMAAPLYPLTKPGTLFNWGPDQQKAFQEIKQALLTAPALGLPDLTKPFELFVDEKQGYAKGVLTQKLGPWRRPVAYLSKKLDPVAAGWPPCLRMVAAIAVLTKDAGKLTMGQPLVILAPHAVEALVKQPPDRWLSNARMTHYQALLLDTDRVQFGPVVALNPATLLPLPEEGLQHDCLDILAEAHGTRSDLMDQPLPDADHTWYTDGSSFLQEGQRKAGAAVTTETEVIWARALPAGTSAQRAELIALTQALKMAEGKKLNVYTDSRYAFATAHIHGEIYRRRGWLTSEGKEIKNKDEILALLKALFLPKRLSIIHCPGHQKGNSAEARGNRMADQAAREVATRETPETSTLLAGKRTADGSEFEKRTADGSEFESPKKKAKVE

SEQ ID NO: 2416 - protein, 2094 aa, synthetic construct
MPAAKRVKLDGGDKKYSIGLDIGTNSVGWAVITDEYKVPSKKFKVLGNTDRHSIKKNLIGALLFDSGETAEATRLKRTARRRYTRRKNRICYLQEIFSNEMAKVDDSFFHRLEESFLVEEDKKHERHPIFGNIVDEVAYHEKYPTIYHLRKKLVDSTDKADLRLIYLALAHMIKFRGHFLIEGDLNPDNSDVDKLFIQLVQTYNQLFEENPINASGVDAKAILSARLSKSRRLENLIAQLPGEKKNGLFGNLIALSLGLTPNFKSNFDLAEDAKLQLSKDTYDDDLDNLLAQIGDQYADLFLAAKNLSDAILLSDILRVNTEITKAPLSASMIKRYDEHHQDLTLLKALVRQQLPEKYKEIFFDQSKNGYAGYIDGGASQEEFYKFIKPILEKMDGTEELLVKLNREDLLRKQRTFDNGSIPHQIHLGELHAILRRQEDFYPFLKDNREKIEKILTFRIPYYVGPLARGNSRFAWMTRKSEETITPWNFEEVVDKGASAQSFIERMTNFDKNLPNEKVLPKHSLLYEYFTVYNELTKVKYVTEGMRKPAFLSGEQKKAIVDLLFKTNRKVTVKQLKEDYFKKIECFDSVEISGVEDRFNASLGTYHDLLKIIKDKDFLDNEENEDILEDIVLTLTLFEDREMIEERLKTYAHLFDDKVMKQLKRRRYTGWGRLSRKLINGIRDKQSGKTILDFLKSDGFANRNFMQLIHDDSLTFKEDIQKAQVSGQGDSLHEHIANLAGSPAIKKGILQTVKVVDELVKVMGRHKPENIVIEMARENQTTQKGQKNSRERMKRIEEGIKELGSQILKEHPVENTQLQNEKLYLYYLQNGRDMYVDQELDINRLSDYDVDHIVPQSFLKDDSIDNKVLTRSDKARGKSDNVPSEEVVKKMKNYWRQLLNAKLITQRKFDNLTKAERGGLSELDKAGFIKRQLVETRQITKHVAQILDSRMNTKYDENDKLIREVKVITLKSKLVSDFRKDFQFYKVREINNYHHAHDAYLNAVVGTALIKKYPKLESEFVYGDYKVYDVRKMIAKSEQEIGKATAKYFFYSNIMNFFKTEITLANGEIRKRPLIETNGETGEIVWDKGRDFATVRKVLSMPQVNIVKKTEVQTGGFSKESILPKRNSDKLIARKKDWDPKKYGGFDSPTVAYSVLVVAKVEKGKSKKLKSVKELLGITIMERSSFEKNPIDFLEAKGYKEVKKDLIIKLPKYSLFELENGRKRMLASAGELQKGNELALPSKYVNFLYLASHYEKLKGSPEDNEQKQLFVEQHKHYLDEIIEQISEFSKRVILADANLDKVLSAYNKHRDKPIREQAENIIHLFTLTNLGAPAAFKYFDTTIDRKRYTSTKEVLDATLIHQSITGLYETRIDLSQLGGDGGGGGGGSPAPGGTLNIEDEYRLHETSKEPDVSLGSTWLSDFPQAWAETGGMGLAVRQAPLIIPLKATSTPVSIKQYPMSQEARLGIKPHIQRLLDQGILVPCQSPWNTPLLPVKKPGTNDYRPVQDLREVNKRVEDIHPTVPNPYNLLSGLPPSHQWYTVLDLKDAFFCLRLHPTSQPLFAFEWRDPEMGISGQLTWTRLPQGFKNSPTLFNEALHRDLAGFRIQHPDLILLQYVDDLLLAATSELDCQQGTRALLQTLGDLGYRASAKKAQICQKQVKYLGYLLKEGQRWLTEARKETVMGQPIPKTPRQLREFLGKAGFCRLFIPGFAEMAAPLYPLTKPGTLFNWGPDQQKAFQEIKQALLTAPALGLPDLTKPFELFVDEKQGYAKGVLTQKLGPWRRPVAYLSKKLDPVAAGWPPCLRMVAAIAVLTKDAGKLTMGQPLVILAPHAVEALVKQPPDRWLSNARMTHYQALLLDTDRVQFGPVVALNPATLLPLPEEGLQHDCLDILAEAHGTRSDLMDQPLPDADHTWYTDGSSFLQEGQRKAGAAVTTETEVIWARALPAGTSAQRAELIALTQALKMAEGKKLNVYTDSRYAFATAHIHGEIYRRRGWLTSEGKEIKNKDEILALLKALFLPKRLSIIHCPGHQKGNSAEARGNRMADQAAREVATRETPETSTLLAGKRTADGSEFEKRTADGSEFESPKKKAKVE

SEQ ID NO: 2417 - protein, 2100 aa, synthetic construct
MPAAKRVKLDGGDKKYSIGLDIGTNSVGWAVITDEYKVPSKKFKVLGNTDRHSIKKNLIGALLFDSGETAEATRLKRTARRRYTRRKNRICYLQEIFSNEMAKVDDSFFHRLEESFLVEEDKKHERHPIFGNIVDEVAYHEKYPTIYHLRKKLVDSTDKADLRLIYLALAHMIKFRGHFLIEGDLNPDNSDVDKLFIQLVQTYNQLFEENPINASGVDAKAILSARLSKSRRLENLIAQLPGEKKNGLFGNLIALSLGLTPNFKSNFDLAEDAKLQLSKDTYDDDLDNLLAQIGDQYADLFLAAKNLSDAILLSDILRVNTEITKAPLSASMIKRYDEHHQDLTLLKALVRQQLPEKYKEIFFDQSKNGYAGYIDGGASQEEFYKFIKPILEKMDGTEELLVKLNREDLLRKQRTFDNGSIPHQIHLGELHAILRRQEDFYPFLKDNREKIEKILTFRIPYYVGPLARGNSRFAWMTRKSEETITPWNFEEVVDKGASAQSFIERMTNFDKNLPNEKVLPKHSLLYEYFTVYNELTKVKYVTEGMRKPAFLSGEQKKAIVDLLFKTNRKVTVKQLKEDYFKKIECFDSVEISGVEDRFNASLGTYHDLLKIIKDKDFLDNEENEDILEDIVLTLTLFEDREMIEERLKTYAHLFDDKVMKQLKRRRYTGWGRLSRKLINGIRDKQSGKTILDFLKSDGFANRNFMQLIHDDSLTFKEDIQKAQVSGQGDSLHEHIANLAGSPAIKKGILQTVKVVDELVKVMGRHKPENIVIEMARENQTTQKGQKNSRERMKRIEEGIKELGSQILKEHPVENTQLQNEKLYLYYLQNGRDMYVDQELDINRLSDYDVDHIVPQSFLKDDSIDNKVLTRSDKARGKSDNVPSEEVVKKMKNYWRQLLNAKLITQRKFDNLTKAERGGLSELDKAGFIKRQLVETRQITKHVAQILDSRMNTKYDENDKLIREVKVITLKSKLVSDFRKDFQFYKVREINNYHHAHDAYLNAVVGTALIKKYPKLESEFVYGDYKVYDVRKMIAKSEQEIGKATAKYFFYSNIMNFFKTEITLANGEIRKRPLIETNGETGEIVWDKGRDFATVRKVLSMPQVNIVKKTEVQTGGFSKESILPKRNSDKLIARKKDWDPKKYGGFDSPTVAYSVLVVAKVEKGKSKKLKSVKELLGITIMERSSFEKNPIDFLEAKGYKEVKKDLIIKLPKYSLFELENGRKRMLASAGELQKGNELALPSKYVNFLYLASHYEKLKGSPEDNEQKQLFVEQHKHYLDEIIEQISEFSKRVILADANLDKVLSAYNKHRDKPIREQAENIIHLFTLTNLGAPAAFKYFDTTIDRKRYTSTKEVLDATLIHQSITGLYETRIDLSQLGGDGGGGSGGSGGSGGSGGSGGTLNIEDEYRLHETSKGPDVPLGSTWLSDFPQAWAETGGMGLAFRQAPLIISLKATSTPVSIKQYPMSQEARLGIKPHIQRLLDQGILVPCQSPWNTPLLPVKKPGTNDYRPVQDLREVNKRVEDIHPTVPNPYNLLSGLPPSHQWYTVLDLKDAFFCLRLHPTSQSLFAFEWKDPEMGISGQLTWTRLPQGFKNSPTLFDEALHRDLADFRIQHPDLILLQYVDDLLLAATSELDCQQGTRALLQTLGDLGYRASAKKAQICQKQVKYLGYLLKEGQRWLTEARKETVMGQPTPKTPRQLREFLGTAGLCRLWIPGFAEMAAPLYPLTKTGTLFKWGPDQQKAYQEIKQALLTAPALGLPDLTKPFELFVDEKQGYAKGVLTQKLGPWRRPVAYLSKKLDPVAAGWPPCLRMVAAIAVLTKDVGKLTMGQPLVILAPHAVEALVKQPPDRWLSNARMTHYQALLLDTDRVQFGPIVALNPATLLPLPEEGLQHDCLDILAEAHGTRPDLTDQPLPDADHTWYTDGSSFLQEGQRRAGAAVTTETEVIWAKALPAGTSAQRAELIALTQALKMAAGKKLNVYTDSRYAFATAHIHGEIYRRRGLLTSEGKEIKNKDEILALLKALFLPKRLSIIHCPGHQKGNHAEARGNRMADQAAREVATRETPETSTLLAGKRTADGSEFEKRTADGSEFESPKKKAKVE

SEQ ID NO: 2418 - protein, 2096 aa, synthetic construct
MPAAKRVKLDGGDKKYSIGLDIGTNSVGWAVITDEYKVPSKKFKVLGNTDRHSIKKNLIGALLFDSGETAEATRLKRTARRRYTRRKNRICYLQEIFSNEMAKVDDSFFHRLEESFLVEEDKKHERHPIFGNIVDEVAYHEKYPTIYHLRKKLVDSTDKADLRLIYLALAHMIKFRGHFLIEGDLNPDNSDVDKLFIQLVQTYNQLFEENPINASGVDAKAILSARLSKSRRLENLIAQLPGEKKNGLFGNLIALSLGLTPNFKSNFDLAEDAKLQLSKDTYDDDLDNLLAQIGDQYADLFLAAKNLSDAILLSDILRVNTEITKAPLSASMIKRYDEHHQDLTLLKALVRQQLPEKYKEIFFDQSKNGYAGYIDGGASQEEFYKFIKPILEKMDGTEELLVKLNREDLLRKQRTFDNGSIPHQIHLGELHAILRRQEDFYPFLKDNREKIEKILTFRIPYYVGPLARGNSRFAWMTRKSEETITPWNFEEVVDKGASAQSFIERMTNFDKNLPNEKVLPKHSLLYEYFTVYNELTKVKYVTEGMRKPAFLSGEQKKAIVDLLFKTNRKVTVKQLKEDYFKKIECFDSVEISGVEDRFNASLGTYHDLLKIIKDKDFLDNEENEDILEDIVLTLTLFEDREMIEERLKTYAHLFDDKVMKQLKRRRYTGWGRLSRKLINGIRDKQSGKTILDFLKSDGFANRNFMQLIHDDSLTFKEDIQKAQVSGQGDSLHEHIANLAGSPAIKKGILQTVKVVDELVKVMGRHKPENIVIEMARENQTTQKGQKNSRERMKRIEEGIKELGSQILKEHPVENTQLQNEKLYLYYLQNGRDMYVDQELDINRLSDYDVDHIVPQSFLKDDSIDNKVLTRSDKARGKSDNVPSEEVVKKMKNYWRQLLNAKLITQRKFDNLTKAERGGLSELDKAGFIKRQLVETRQITKHVAQILDSRMNTKYDENDKLIREVKVITLKSKLVSDFRKDFQFYKVREINNYHHAHDAYLNAVVGTALIKKYPKLESEFVYGDYKVYDVRKMIAKSEQEIGKATAKYFFYSNIMNFFKTEITLANGEIRKRPLIETNGETGEIVWDKGRDFATVRKVLSMPQVNIVKKTEVQTGGFSKESILPKRNSDKLIARKKDWDPKKYGGFDSPTVAYSVLVVAKVEKGKSKKLKSVKELLGITIMERSSFEKNPIDFLEAKGYKEVKKDLIIKLPKYSLFELENGRKRMLASAGELQKGNELALPSKYVNFLYLASHYEKLKGSPEDNEQKQLFVEQHKHYLDEIIEQISEFSKRVILADANLDKVLSAYNKHRDKPIREQAENIIHLFTLTNLGAPAAFKYFDTTIDRKRYTSTKEVLDATLIHQSITGLYETRIDLSQLGGDGGEAAAKGGGPAPGGTLNIEDEYRLHETSKGPDVPLGSTWLSDFPQAWAETGGMGLAFRQAPLIISLKATSTPVSIKQYPMSQEARLGIKPHIQRLLDQGILVPCQSPWNTPLLPVKKPGTNDYRPVQDLREVNKRVEDIHPTVPNPYNLLSGLPPSHQWYTVLDLKDAFFCLRLHPTSQSLFAFEWKDPEMGISGQLTWTRLPQGFKNSPTLFDEALHRDLADFRIQHPDLILLQYVDDLLLAATSELDCQQGTRALLQTLGDLGYRASAKKAQICQKQVKYLGYLLKEGQRWLTEARKETVMGQPTPKTPRQLREFLGTAGLCRLWIPGFAEMAAPLYPLTKTGTLFKWGPDQQKAYQEIKQALLTAPALGLPDLTKPFELFVDEKQGYAKGVLTQKLGPWRRPVAYLSKKLDPVAAGWPPCLRMVAAIAVLTKDVGKLTMGQPLVILAPHAVEALVKQPPDRWLSNARMTHYQALLLDTDRVQFGPIVALNPATLLPLPEEGLQHDCLDILAEAHGTRPDLTDQPLPDADHTWYTDGSSFLQEGQRRAGAAVTTETEVIWAKALPAGTSAQRAELIALTQALKMAAGKKLNVYTDSRYAFATAHIHGEIYRRRGLLTSEGKEIKNKDEILALLKALFLPKRLSIIHCPGHQKGNHAEARGNRMADQAAREVATRETPETSTLLAGKRTADGSEFEKRTADGSEFESPKKKAKVE

SEQ ID NO: 2419 - protein, 2094 aa, synthetic construct
MPAAKRVKLDGGDKKYSIGLDIGTNSVGWAVITDEYKVPSKKFKVLGNTDRHSIKKNLIGALLFDSGETAEATRLKRTARRRYTRRKNRICYLQEIFSNEMAKVDDSFFHRLEESFLVEEDKKHERHPIFGNIVDEVAYHEKYPTIYHLRKKLVDSTDKADLRLIYLALAHMIKFRGHFLIEGDLNPDNSDVDKLFIQLVQTYNQLFEENPINASGVDAKAILSARLSKSRRLENLIAQLPGEKKNGLFGNLIALSLGLTPNFKSNFDLAEDAKLQLSKDTYDDDLDNLLAQIGDQYADLFLAAKNLSDAILLSDILRVNTEITKAPLSASMIKRYDEHHQDLTLLKALVRQQLPEKYKEIFFDQSKNGYAGYIDGGASQEEFYKFIKPILEKMDGTEELLVKLNREDLLRKQRTFDNGSIPHQIHLGELHAILRRQEDFYPFLKDNREKIEKILTFRIPYYVGPLARGNSRFAWMTRKSEETITPWNFEEVVDKGASAQSFIERMTNFDKNLPNEKVLPKHSLLYEYFTVYNELTKVKYVTEGMRKPAFLSGEQKKAIVDLLFKTNRKVTVKQLKEDYFKKIECFDSVEISGVEDRFNASLGTYHDLLKIIKDKDFLDNEENEDILEDIVLTLTLFEDREMIEERLKTYAHLFDDKVMKQLKRRRYTGWGRLSRKLINGIRDKQSGKTILDFLKSDGFANRNFMQLIHDDSLTFKEDIQKAQVSGQGDSLHEHIANLAGSPAIKKGILQTVKVVDELVKVMGRHKPENIVIEMARENQTTQKGQKNSRERMKRIEEGIKELGSQILKEHPVENTQLQNEKLYLYYLQNGRDMYVDQELDINRLSDYDVDHIVPQSFLKDDSIDNKVLTRSDKARGKSDNVPSEEVVKKMKNYWRQLLNAKLITQRKFDNLTKAERGGLSELDKAGFIKRQLVETRQITKHVAQILDSRMNTKYDENDKLIREVKVITLKSKLVSDFRKDFQFYKVREINNYHHAHDAYLNAVVGTALIKKYPKLESEFVYGDYKVYDVRKMIAKSEQEIGKATAKYFFYSNIMNFFKTEITLANGEIRKRPLIETNGETGEIVWDKGRDFATVRKVLSMPQVNIVKKTEVQTGGFSKESILPKRNSDKLIARKKDWDPKKYGGFDSPTVAYSVLVVAKVEKGKSKKLKSVKELLGITIMERSSFEKNPIDFLEAKGYKEVKKDLIIKLPKYSLFELENGRKRMLASAGELQKGNELALPSKYVNFLYLASHYEKLKGSPEDNEQKQLFVEQHKHYLDEIIEQISEFSKRVILADANLDKVLSAYNKHRDKPIREQAENIIHLFTLTNLGAPAAFKYFDTTIDRKRYTSTKEVLDATLIHQSITGLYETRIDLSQLGGDGGGSSGGSGGGGGTLNIEDEYRLHETSKGPDVPLGSTWLSDFPQAWAETGGMGLAFRQAPLIISLKATSTPVSIKQYPMSQEARLGIKPHIQRLLDQGILVPCQSPWNTPLLPVKKPGTNDYRPVQDLREVNKRVEDIHPTVPNPYNLLSGLPPSHQWYTVLDLKDAFFCLRLHPTSQSLFAFEWKDPEMGISGQLTWTRLPQGFKNSPTLFDEALHRDLADFRIQHPDLILLQYVDDLLLAATSELDCQQGTRALLQTLGDLGYRASAKKAQICQKQVKYLGYLLKEGQRWLTEARKETVMGQPTPKTPRQLREFLGTAGLCRLWIPGFAEMAAPLYPLTKTGTLFKWGPDQQKAYQEIKQALLTAPALGLPDLTKPFELFVDEKQGYAKGVLTQKLGPWRRPVAYLSKKLDPVAAGWPPCLRMVAAIAVLTKDVGKLTMGQPLVILAPHAVEALVKQPPDRWLSNARMTHYQALLLDTDRVQFGPIVALNPATLLPLPEEGLQHDCLDILAEAHGTRPDLTDQPLPDADHTWYTDGSSFLQEGQRRAGAAVTTETEVIWAKALPAGTSAQRAELIALTQALKMAAGKKLNVYTDSRYAFATAHIHGEIYRRRGLLTSEGKEIKNKDEILALLKALFLPKRLSIIHCPGHQKGNHAEARGNRMADQAAREVATRETPETSTLLAGKRTADGSEFEKRTADGSEFESPKKKAKVE

SEQ ID NO: 2420 - protein, 2096 aa, synthetic construct
MPAAKRVKLDGGDKKYSIGLDIGTNSVGWAVITDEYKVPSKKFKVLGNTDRHSIKKNLIGALLFDSGETAEATRLKRTARRRYTRRKNRICYLQEIFSNEMAKVDDSFFHRLEESFLVEEDKKHERHPIFGNIVDEVAYHEKYPTIYHLRKKLVDSTDKADLRLIYLALAHMIKFRGHFLIEGDLNPDNSDVDKLFIQLVQTYNQLFEENPINASGVDAKAILSARLSKSRRLENLIAQLPGEKKNGLFGNLIALSLGLTPNFKSNFDLAEDAKLQLSKDTYDDDLDNLLAQIGDQYADLFLAAKNLSDAILLSDILRVNTEITKAPLSASMIKRYDEHHQDLTLLKALVRQQLPEKYKEIFFDQSKNGYAGYIDGGASQEEFYKFIKPILEKMDGTEELLVKLNREDLLRKQRTFDNGSIPHQIHLGELHAILRRQEDFYPFLKDNREKIEKILTFRIPYYVGPLARGNSRFAWMTRKSEETITPWNFEEVVDKGASAQSFIERMTNFDKNLPNEKVLPKHSLLYEYFTVYNELTKVKYVTEGMRKPAFLSGEQKKAIVDLLFKTNRKVTVKQLKEDYFKKIECFDSVEISGVEDRFNASLGTYHDLLKIIKDKDFLDNEENEDILEDIVLTLTLFEDREMIEERLKTYAHLFDDKVMKQLKRRRYTGWGRLSRKLINGIRDKQSGKTILDFLKSDGFANRNFMQLIHDDSLTFKEDIQKAQVSGQGDSLHEHIANLAGSPAIKKGILQTVKVVDELVKVMGRHKPENIVIEMARENQTTQKGQKNSRERMKRIEEGIKELGSQILKEHPVENTQLQNEKLYLYYLQNGRDMYVDQELDINRLSDYDVDHIVPQSFLKDDSIDNKVLTRSDKARGKSDNVPSEEVVKKMKNYWRQLLNAKLITQRKFDNLTKAERGGLSELDKAGFIKRQLVETRQITKHVAQILDSRMNTKYDENDKLIREVKVITLKSKLVSDFRKDFQFYKVREINNYHHAHDAYLNAVVGTALIKKYPKLESEFVYGDYKVYDVRKMIAKSEQEIGKATAKYFFYSNIMNFFKTEITLANGEIRKRPLIETNGETGEIVWDKGRDFATVRKVLSMPQVNIVKKTEVQTGGFSKESILPKRNSDKLIARKKDWDPKKYGGFDSPTVAYSVLVVAKVEKGKSKKLKSVKELLGITIMERSSFEKNPIDFLEAKGYKEVKKDLIIKLPKYSLFELENGRKRMLASAGELQKGNELALPSKYVNFLYLASHYEKLKGSPEDNEQKQLFVEQHKHYLDEIIEQISEFSKRVILADANLDKVLSAYNKHRDKPIREQAENIIHLFTLTNLGAPAAFKYFDTTIDRKRYTSTKEVLDATLIHQSITGLYETRIDLSQLGGDGGPAPEAAAKGGGGGTLNIEDEYRLHETSKGPDVPLGSTWLSDFPQAWAETGGMGLAFRQAPLIISLKATSTPVSIKQYPMSQEARLGIKPHIQRLLDQGILVPCQSPWNTPLLPVKKPGTNDYRPVQDLREVNKRVEDIHPTVPNPYNLLSGLPPSHQWYTVLDLKDAFFCLRLHPTSQSLFAFEWKDPEMGISGQLTWTRLPQGFKNSPTLFDEALHRDLADFRIQHPDLILLQYVDDLLLAATSELDCQQGTRALLQTLGDLGYRASAKKAQICQKQVKYLGYLLKEGQRWLTEARKETVMGQPTPKTPRQLREFLGTAGLCRLWIPGFAEMAAPLYPLTKTGTLFKWGPDQQKAYQEIKQALLTAPALGLPDLTKPFELFVDEKQGYAKGVLTQKLGPWRRPVAYLSKKLDPVAAGWPPCLRMVAAIAVLTKDVGKLTMGQPLVILAPHAVEALVKQPPDRWLSNARMTHYQALLLDTDRVQFGPIVALNPATLLPLPEEGLQHDCLDILAEAHGTRPDLTDQPLPDADHTWYTDGSSFLQEGQRRAGAAVTTETEVIWAKALPAGTSAQRAELIALTQALKMAAGKKLNVYTDSRYAFATAHIHGEIYRRRGLLTSEGKEIKNKDEILALLKALFLPKRLSIIHCPGHQKGNHAEARGNRMADQAAREVATRETPETSTLLAGKRTADGSEFEKRTADGSEFESPKKKAKVE

SEQ ID NO: 2421 - protein, 2008 aa, synthetic construct
MPAAKRVKLDGGDKKYSIGLDIGTNSVGWAVITDEYKVPSKKFKVLGNTDRHSIKKNLIGALLFDSGETAEATRLKRTARRRYTRRKNRICYLQEIFSNEMAKVDDSFFHRLEESFLVEEDKKHERHPIFGNIVDEVAYHEKYPTIYHLRKKLVDSTDKADLRLIYLALAHMIKFRGHFLIEGDLNPDNSDVDKLFIQLVQTYNQLFEENPINASGVDAKAILSARLSKSRRLENLIAQLPGEKKNGLFGNLIALSLGLTPNFKSNFDLAEDAKLQLSKDTYDDDLDNLLAQIGDQYADLFLAAKNLSDAILLSDILRVNTEITKAPLSASMIKRYDEHHQDLTLLKALVRQQLPEKYKEIFFDQSKNGYAGYIDGGASQEEFYKFIKPILEKMDGTEELLVKLNREDLLRKQRTFDNGSIPHQIHLGELHAILRRQEDFYPFLKDNREKIEKILTFRIPYYVGPLARGNSRFAWMTRKSEETITPWNFEEVVDKGASAQSFIERMTNFDKNLPNEKVLPKHSLLYEYFTVYNELTKVKYVTEGMRKPAFLSGEQKKAIVDLLFKTNRKVTVKQLKEDYFKKIECFDSVEISGVEDRFNASLGTYHDLLKIIKDKDFLDNEENEDILEDIVLTLTLFEDREMIEERLKTYAHLFDDKVMKQLKRRRYTGWGRLSRKLINGIRDKQSGKTILDFLKSDGFANRNFMQLIHDDSLTFKEDIQKAQVSGQGDSLHEHIANLAGSPAIKKGILQTVKVVDELVKVMGRHKPENIVIEMARENQTTQKGQKNSRERMKRIEEGIKELGSQILKEHPVENTQLQNEKLYLYYLQNGRDMYVDQELDINRLSDYDVDHIVPQSFLKDDSIDNKVLTRSDKARGKSDNVPSEEVVKKMKNYWRQLLNAKLITQRKFDNLTKAERGGLSELDKAGFIKRQLVETRQITKHVAQILDSRMNTKYDENDKLIREVKVITLKSKLVSDFRKDFQFYKVREINNYHHAHDAYLNAVVGTALIKKYPKLESEFVYGDYKVYDVRKMIAKSEQEIGKATAKYFFYSNIMNFFKTEITLANGEIRKRPLIETNGETGEIVWDKGRDFATVRKVLSMPQVNIVKKTEVQTGGFSKESILPKRNSDKLIARKKDWDPKKYGGFDSPTVAYSVLVVAKVEKGKSKKLKSVKELLGITIMERSSFEKNPIDFLEAKGYKEVKKDLIIKLPKYSLFELENGRKRMLASAGELQKGNELALPSKYVNFLYLASHYEKLKGSPEDNEQKQLFVEQHKHYLDEIIEQISEFSKRVILADANLDKVLSAYNKHRDKPIREQAENIIHLFTLTNLGAPAAFKYFDTTIDRKRYTSTKEVLDATLIHQSITGLYETRIDLSQLGGDGGGGSGGSGGSGGSGGSGGSGGGVLDAPPSHIGLEHLPPPPEVPQFPLNLERLQALQDLVHRSLEAGYISPWDGPGNNPVFPVRKPNGAWRFVHDLRVTNALTKPIPALSPGPPDLTAIPTHLPHIICLDLKDAFFQIPVEDRFRSYFAFTLPTPGGLQPHRRFAWRVLPQGFINSPALFERALQEPLRQVSAAFSQSLLVSYMDDILYVSPTEEQRLQCYQTMAAHLRDLGFQVASEKTRQTPSPVPFLGQMVHERMVTYQSLPTLQISSPISLHQLQTVLGDLQWVSRGTPTTRRPLQLLYSSLKGIDDPRAIIHLSPEQQQGIAELRQALSHNARSRYNEQEPLLAYVHLTRAGSTLVLFQKGAQFPLAYFQTPLTDNQASPWGLLLLLGCQYLQAQALSSYAKTILKYYHNLPKTSLDNWIQSSEDPRVQELLQLWPQISSQGIQPPGPWKTLVTRAEVFLTPQFSPEPIPAALCLFSDGAARRGAYCLWKDHLLDFQAVPAPESAQKGELAGLLAGLAAAPPEPLNIWVDSKYLYSLLRTLVLGAWLQPDPVPSYALLYKSLLRHPAIFVGHVRSHSSASHPIASLNNYVDQLAGKRTADGSEFEKRTADGSEFESPKKKAKVE

SEQ ID NO: 2422 - protein, 2093 aa, synthetic construct
MPAAKRVKLDGGDKKYSIGLDIGTNSVGWAVITDEYKVPSKKFKVLGNTDRHSIKKNLIGALLFDSGETAEATRLKRTARRRYTRRKNRICYLQEIFSNEMAKVDDSFFHRLEESFLVEEDKKHERHPIFGNIVDEVAYHEKYPTIYHLRKKLVDSTDKADLRLIYLALAHMIKFRGHFLIEGDLNPDNSDVDKLFIQLVQTYNQLFEENPINASGVDAKAILSARLSKSRRLENLIAQLPGEKKNGLFGNLIALSLGLTPNFKSNFDLAEDAKLQLSKDTYDDDLDNLLAQIGDQYADLFLAAKNLSDAILLSDILRVNTEITKAPLSASMIKRYDEHHQDLTLLKALVRQQLPEKYKEIFFDQSKNGYAGYIDGGASQEEFYKFIKPILEKMDGTEELLVKLNREDLLRKQRTFDNGSIPHQIHLGELHAILRRQEDFYPFLKDNREKIEKILTFRIPYYVGPLARGNSRFAWMTRKSEETITPWNFEEVVDKGASAQSFIERMTNFDKNLPNEKVLPKHSLLYEYFTVYNELTKVKYVTEGMRKPAFLSGEQKKAIVDLLFKTNRKVTVKQLKEDYFKKIECFDSVEISGVEDRFNASLGTYHDLLKIIKDKDFLDNEENEDILEDIVLTLTLFEDREMIEERLKTYAHLFDDKVMKQLKRRRYTGWGRLSRKLINGIRDKQSGKTILDFLKSDGFANRNFMQLIHDDSLTFKEDIQKAQVSGQGDSLHEHIANLAGSPAIKKGILQTVKVVDELVKVMGRHKPENIVIEMARENQTTQKGQKNSRERMKRIEEGIKELGSQILKEHPVENTQLQNEKLYLYYLQNGRDMYVDQELDINRLSDYDVDHIVPQSFLKDDSIDNKVLTRSDKARGKSDNVPSEEVVKKMKNYWRQLLNAKLITQRKFDNLTKAERGGLSELDKAGFIKRQLVETRQITKHVAQILDSRMNTKYDENDKLIREVKVITLKSKLVSDFRKDFQFYKVREINNYHHAHDAYLNAVVGTALIKKYPKLESEFVYGDYKVYDVRKMIAKSEQEIGKATAKYFFYSNIMNFFKTEITLANGEIRKRPLIETNGETGEIVWDKGRDFATVRKVLSMPQVNIVKKTEVQTGGFSKESILPKRNSDKLIARKKDWDPKKYGGFDSPTVAYSVLVVAKVEKGKSKKLKSVKELLGITIMERSSFEKNPIDFLEAKGYKEVKKDLIIKLPKYSLFELENGRKRMLASAGELQKGNELALPSKYVNFLYLASHYEKLKGSPEDNEQKQLFVEQHKHYLDEIIEQISEFSKRVILADANLDKVLSAYNKHRDKPIREQAENIIHLFTLTNLGAPAAFKYFDTTIDRKRYTSTKEVLDATLIHQSITGLYETRIDLSQLGGDGGEAAAKPAPGGTLNIEDEYRLHETSKGPDVPLGSTWLSDFPQAWAETGGMGLAFRQAPLIISLKATSTPVSIKQYPMSQEARLGIKPHIQRLLDQGILVPCQSPWNTPLLPVKKPGTNDYRPVQDLREVNKRVEDIHPTVPNPYNLLSGLPPSHQWYTVLDLKDAFFCLRLHPTSQSLFAFEWKDPEMGISGQLTWTRLPQGFKNSPTLFNEALHRDLADFRIQHPDLILLQYVDDLLLAATSELDCQQGTRALLQTLGDLGYRASAKKAQICQKQVKYLGYLLKEGQRWLTEARKETVMGQPTPKTPRQLREFLGTAGLCRLWIPGFAEMAAPLYPLTKPGTLFKWGPDQQKAYQEIKQALLTAPALGLPDLTKPFELFVDEKQGYAKGVLTQKLGPWRRPVAYLSKKLDPVAAGWPPCLRMVAAIAVLTKDVGKLTMGQPLVILAPHAVEALVKQPPDRWLSNARMTHYQALLLDTDRVQFGPIVALNPATLLPLPEEGLQHDCLDILAEAHGTRPDLTDQPLPDADHTWYTDGSSFLQEGQRRAGAAVTTETEVIWAKALPAGTSAQRAELIALTQALKMAAGKKLNVYTDSRYAFATAHIHGEIYRRRGWLTSEGKEIKNKDEILALLKALFLPKRLSIIHCPGHQKGNHAEARGNRMADQAAREVATRETPETSTLLAGKRTADGSEFEKRTADGSEFESPKKKAKVE

SEQ ID NO: 2423 - protein, 2096 aa, synthetic construct
MPAAKRVKLDGGDKKYSIGLDIGTNSVGWAVITDEYKVPSKKFKVLGNTDRHSIKKNLIGALLFDSGETAEATRLKRTARRRYTRRKNRICYLQEIFSNEMAKVDDSFFHRLEESFLVEEDKKHERHPIFGNIVDEVAYHEKYPTIYHLRKKLVDSTDKADLRLIYLALAHMIKFRGHFLIEGDLNPDNSDVDKLFIQLVQTYNQLFEENPINASGVDAKAILSARLSKSRRLENLIAQLPGEKKNGLFGNLIALSLGLTPNFKSNFDLAEDAKLQLSKDTYDDDLDNLLAQIGDQYADLFLAAKNLSDAILLSDILRVNTEITKAPLSASMIKRYDEHHQDLTLLKALVRQQLPEKYKEIFFDQSKNGYAGYIDGGASQEEFYKFIKPILEKMDGTEELLVKLNREDLLRKQRTFDNGSIPHQIHLGELHAILRRQEDFYPFLKDNREKIEKILTFRIPYYVGPLARGNSRFAWMTRKSEETITPWNFEEVVDKGASAQSFIERMTNFDKNLPNEKVLPKHSLLYEYFTVYNELTKVKYVTEGMRKPAFLSGEQKKAIVDLLFKTNRKVTVKQLKEDYFKKIECFDSVEISGVEDRFNASLGTYHDLLKIIKDKDFLDNEENEDILEDIVLTLTLFEDREMIEERLKTYAHLFDDKVMKQLKRRRYTGWGRLSRKLINGIRDKQSGKTILDFLKSDGFANRNFMQLIHDDSLTFKEDIQKAQVSGQGDSLHEHIANLAGSPAIKKGILQTVKVVDELVKVMGRHKPENIVIEMARENQTTQKGQKNSRERMKRIEEGIKELGSQILKEHPVENTQLQNEKLYLYYLQNGRDMYVDQELDINRLSDYDVDHIVPQSFLKDDSIDNKVLTRSDKARGKSDNVPSEEVVKKMKNYWRQLLNAKLITQRKFDNLTKAERGGLSELDKAGFIKRQLVETRQITKHVAQILDSRMNTKYDENDKLIREVKVITLKSKLVSDFRKDFQFYKVREINNYHHAHDAYLNAVVGTALIKKYPKLESEFVYGDYKVYDVRKMIAKSEQEIGKATAKYFFYSNIMNFFKTEITLANGEIRKRPLIETNGETGEIVWDKGRDFATVRKVLSMPQVNIVKKTEVQTGGFSKESILPKRNSDKLIARKKDWDPKKYGGFDSPTVAYSVLVVAKVEKGKSKKLKSVKELLGITIMERSSFEKNPIDFLEAKGYKEVKKDLIIKLPKYSLFELENGRKRMLASAGELQKGNELALPSKYVNFLYLASHYEKLKGSPEDNEQKQLFVEQHKHYLDEIIEQISEFSKRVILADANLDKVLSAYNKHRDKPIREQAENIIHLFTLTNLGAPAAFKYFDTTIDRKRYTSTKEVLDATLIHQSITGLYETRIDLSQLGGDGGPAPAPAPAPAPGGTLNIEDEYRLHETSKGPDVPLGSTWLSDFPQAWAETGGMGLAFRQAPLIISLKATSTPVSIKQYPMSQEARLGIKPHIQRLLDQGILVPCQSPWNTPLLPVKKPGTNDYRPVQDLREVNKRVEDIHPTVPNPYNLLSGLPPSHQWYTVLDLKDAFFCLRLHPTSQSLFAFEWKDPEMGISGQLTWTRLPQGFKNSPTLFNEALHRDLADFRIQHPDLILLQYVDDLLLAATSELDCQQGTRALLQTLGDLGYRASAKKAQICQKQVKYLGYLLKEGQRWLTEARKETVMGQPTPKTPRQLREFLGTAGLCRLWIPGFAEMAAPLYPLTKPGTLFKWGPDQQKAYQEIKQALLTAPALGLPDLTKPFELFVDEKQGYAKGVLTQKLGPWRRPVAYLSKKLDPVAAGWPPCLRMVAAIAVLTKDVGKLTMGQPLVILAPHAVEALVKQPPDRWLSNARMTHYQALLLDTDRVQFGPIVALNPATLLPLPEEGLQHDCLDILAEAHGTRPDLTDQPLPDADHTWYTDGSSFLQEGQRRAGAAVTTETEVIWAKALPAGTSAQRAELIALTQALKMAAGKKLNVYTDSRYAFATAHIHGEIYRRRGWLTSEGKEIKNKDEILALLKALFLPKRLSIIHCPGHQKGNHAEARGNRMADQAAREVATRETPETSTLLAGKRTADGSEFEKRTADGSEFESPKKKAKVE

SEQ ID NO: 2424 - protein, 2089 aa, synthetic construct
MPAAKRVKLDGGDKKYSIGLDIGTNSVGWAVITDEYKVPSKKFKVLGNTDRHSIKKNLIGALLFDSGETAEATRLKRTARRRYTRRKNRICYLQEIFSNEMAKVDDSFFHRLEESFLVEEDKKHERHPIFGNIVDEVAYHEKYPTIYHLRKKLVDSTDKADLRLIYLALAHMIKFRGHFLIEGDLNPDNSDVDKLFIQLVQTYNQLFEENPINASGVDAKAILSARLSKSRRLENLIAQLPGEKKNGLFGNLIALSLGLTPNFKSNFDLAEDAKLQLSKDTYDDDLDNLLAQIGDQYADLFLAAKNLSDAILLSDILRVNTEITKAPLSASMIKRYDEHHQDLTLLKALVRQQLPEKYKEIFFDQSKNGYAGYIDGGASQEEFYKFIKPILEKMDGTEELLVKLNREDLLRKQRTFDNGSIPHQIHLGELHAILRRQEDFYPFLKDNREKIEKILTFRIPYYVGPLARGNSRFAWMTRKSEETITPWNFEEVVDKGASAQSFIERMTNFDKNLPNEKVLPKHSLLYEYFTVYNELTKVKYVTEGMRKPAFLSGEQKKAIVDLLFKTNRKVTVKQLKEDYFKKIECFDSVEISGVEDRFNASLGTYHDLLKIIKDKDFLDNEENEDILEDIVLTLTLFEDREMIEERLKTYAHLFDDKVMKQLKRRRYTGWGRLSRKLINGIRDKQSGKTILDFLKSDGFANRNFMQLIHDDSLTFKEDIQKAQVSGQGDSLHEHIANLAGSPAIKKGILQTVKVVDELVKVMGRHKPENIVIEMARENQTTQKGQKNSRERMKRIEEGIKELGSQILKEHPVENTQLQNEKLYLYYLQNGRDMYVDQELDINRLSDYDVDHIVPQSFLKDDSIDNKVLTRSDKARGKSDNVPSEEVVKKMKNYWRQLLNAKLITQRKFDNLTKAERGGLSELDKAGFIKRQLVETRQITKHVAQILDSRMNTKYDENDKLIREVKVITLKSKLVSDFRKDFQFYKVREINNYHHAHDAYLNAVVGTALIKKYPKLESEFVYGDYKVYDVRKMIAKSEQEIGKATAKYFFYSNIMNFFKTEITLANGEIRKRPLIETNGETGEIVWDKGRDFATVRKVLSMPQVNIVKKTEVQTGGFSKESILPKRNSDKLIARKKDWDPKKYGGFDSPTVAYSVLVVAKVEKGKSKKLKSVKELLGITIMERSSFEKNPIDFLEAKGYKEVKKDLIIKLPKYSLFELENGRKRMLASAGELQKGNELALPSKYVNFLYLASHYEKLKGSPEDNEQKQLFVEQHKHYLDEIIEQISEFSKRVILADANLDKVLSAYNKHRDKPIREQAENIIHLFTLTNLGAPAAFKYFDTTIDRKRYTSTKEVLDATLIHQSITGLYETRIDLSQLGGDGGGGGGGGTLNIEDEYRLHETSKGPDVPLGSTWLSDFPQAWAETGGMGLAFRQAPLIISLKATSTPVSIKQYPMSQEARLGIKPHIQRLLDQGILVPCQSPWNTPLLPVKKPGTNDYRPVQDLREVNKRVEDIHPTVPNPYNLLSGLPPSHQWYTVLDLKDAFFCLRLHPTSQSLFAFEWKDPEMGISGQLTWTRLPQGFKNSPTLFNEALHRDLADFRIQHPDLILLQYVDDLLLAATSELDCQQGTRALLQTLGDLGYRASAKKAQICQKQVKYLGYLLKEGQRWLTEARKETVMGQPTPKTPRQLREFLGTAGLCRLWIPGFAEMAAPLYPLTKPGTLFKWGPDQQKAYQEIKQALLTAPALGLPDLTKPFELFVDEKQGYAKGVLTQKLGPWRRPVAYLSKKLDPVAAGWPPCLRMVAAIAVLTKDVGKLTMGQPLVILAPHAVEALVKQPPDRWLSNARMTHYQALLLDTDRVQFGPIVALNPATLLPLPEEGLQHDCLDILAEAHGTRPDLTDQPLPDADHTWYTDGSSFLQEGQRRAGAAVTTETEVIWAKALPAGTSAQRAELIALTQALKMAAGKKLNVYTDSRYAFATAHIHGEIYRRRGWLTSEGKEIKNKDEILALLKALFLPKRLSIIHCPGHQKGNHAEARGNRMADQAAREVATRETPETSTLLAGKRTADGSEFEKRTADGSEFESPKKKAKVE

SEQ ID NO: 2425 - protein, 2094 aa, synthetic construct
MPAAKRVKLDGGDKKYSIGLDIGTNSVGWAVITDEYKVPSKKFKVLGNTDRHSIKKNLIGALLFDSGETAEATRLKRTARRRYTRRKNRICYLQEIFSNEMAKVDDSFFHRLEESFLVEEDKKHERHPIFGNIVDEVAYHEKYPTIYHLRKKLVDSTDKADLRLIYLALAHMIKFRGHFLIEGDLNPDNSDVDKLFIQLVQTYNQLFEENPINASGVDAKAILSARLSKSRRLENLIAQLPGEKKNGLFGNLIALSLGLTPNFKSNFDLAEDAKLQLSKDTYDDDLDNLLAQIGDQYADLFLAAKNLSDAILLSDILRVNTEITKAPLSASMIKRYDEHHQDLTLLKALVRQQLPEKYKEIFFDQSKNGYAGYIDGGASQEEFYKFIKPILEKMDGTEELLVKLNREDLLRKQRTFDNGSIPHQIHLGELHAILRRQEDFYPFLKDNREKIEKILTFRIPYYVGPLARGNSRFAWMTRKSEETITPWNFEEVVDKGASAQSFIERMTNFDKNLPNEKVLPKHSLLYEYFTVYNELTKVKYVTEGMRKPAFLSGEQKKAIVDLLFKTNRKVTVKQLKEDYFKKIECFDSVEISGVEDRFNASLGTYHDLLKIIKDKDFLDNEENEDILEDIVLTLTLFEDREMIEERLKTYAHLFDDKVMKQLKRRRYTGWGRLSRKLINGIRDKQSGKTILDFLKSDGFANRNFMQLIHDDSLTFKEDIQKAQVSGQGDSLHEHIANLAGSPAIKKGILQTVKVVDELVKVMGRHKPENIVIEMARENQTTQKGQKNSRERMKRIEEGIKELGSQILKEHPVENTQLQNEKLYLYYLQNGRDMYVDQELDINRLSDYDVDHIVPQSFLKDDSIDNKVLTRSDKARGKSDNVPSEEVVKKMKNYWRQLLNAKLITQRKFDNLTKAERGGLSELDKAGFIKRQLVETRQITKHVAQILDSRMNTKYDENDKLIREVKVITLKSKLVSDFRKDFQFYKVREINNYHHAHDAYLNAVVGTALIKKYPKLESEFVYGDYKVYDVRKMIAKSEQEIGKATAKYFFYSNIMNFFKTEITLANGEIRKRPLIETNGETGEIVWDKGRDFATVRKVLSMPQVNIVKKTEVQTGGFSKESILPKRNSDKLIARKKDWDPKKYGGFDSPTVAYSVLVVAKVEKGKSKKLKSVKELLGITIMERSSFEKNPIDFLEAKGYKEVKKDLIIKLPKYSLFELENGRKRMLASAGELQKGNELALPSKYVNFLYLASHYEKLKGSPEDNEQKQLFVEQHKHYLDEIIEQISEFSKRVILADANLDKVLSAYNKHRDKPIREQAENIIHLFTLTNLGAPAAFKYFDTTIDRKRYTSTKEVLDATLIHQSITGLYETRIDLSQLGGDGGGSSGGGGGSGGTLNIEDEYRLHETSKGPDVPLGSTWLSDFPQAWAETGGMGLAFRQAPLIISLKATSTPVSIKQYPMSQEARLGIKPHIQRLLDQGILVPCQSPWNTPLLPVKKPGTNDYRPVQDLREVNKRVEDIHPTVPNPYNLLSGLPPSHQWYTVLDLKDAFFCLRLHPTSQSLFAFEWKDPEMGISGQLTWTRLPQGFKNSPTLFNEALHRDLADFRIQHPDLILLQYVDDLLLAATSELDCQQGTRALLQTLGDLGYRASAKKAQICQKQVKYLGYLLKEGQRWLTEARKETVMGQPTPKTPRQLREFLGTAGLCRLWIPGFAEMAAPLYPLTKPGTLFKWGPDQQKAYQEIKQALLTAPALGLPDLTKPFELFVDEKQGYAKGVLTQKLGPWRRPVAYLSKKLDPVAAGWPPCLRMVAAIAVLTKDVGKLTMGQPLVILAPHAVEALVKQPPDRWLSNARMTHYQALLLDTDRVQFGPIVALNPATLLPLPEEGLQHDCLDILAEAHGTRPDLTDQPLPDADHTWYTDGSSFLQEGQRRAGAAVTTETEVIWAKALPAGTSAQRAELIALTQALKMAAGKKLNVYTDSRYAFATAHIHGEIYRRRGWLTSEGKEIKNKDEILALLKALFLPKRLSIIHCPGHQKGNHAEARGNRMADQAAREVATRETPETSTLLAGKRTADGSEFEKRTADGSEFESPKKKAKVE

SEQ ID NO: 2426 - protein, 2093 aa, synthetic construct
MPAAKRVKLDGGDKKYSIGLDIGTNSVGWAVITDEYKVPSKKFKVLGNTDRHSIKKNLIGALLFDSGETAEATRLKRTARRRYTRRKNRICYLQEIFSNEMAKVDDSFFHRLEESFLVEEDKKHERHPIFGNIVDEVAYHEKYPTIYHLRKKLVDSTDKADLRLIYLALAHMIKFRGHFLIEGDLNPDNSDVDKLFIQLVQTYNQLFEENPINASGVDAKAILSARLSKSRRLENLIAQLPGEKKNGLFGNLIALSLGLTPNFKSNFDLAEDAKLQLSKDTYDDDLDNLLAQIGDQYADLFLAAKNLSDAILLSDILRVNTEITKAPLSASMIKRYDEHHQDLTLLKALVRQQLPEKYKEIFFDQSKNGYAGYIDGGASQEEFYKFIKPILEKMDGTEELLVKLNREDLLRKQRTFDNGSIPHQIHLGELHAILRRQEDFYPFLKDNREKIEKILTFRIPYYVGPLARGNSRFAWMTRKSEETITPWNFEEVVDKGASAQSFIERMTNFDKNLPNEKVLPKHSLLYEYFTVYNELTKVKYVTEGMRKPAFLSGEQKKAIVDLLFKTNRKVTVKQLKEDYFKKIECFDSVEISGVEDRFNASLGTYHDLLKIIKDKDFLDNEENEDILEDIVLTLTLFEDREMIEERLKTYAHLFDDKVMKQLKRRRYTGWGRLSRKLINGIRDKQSGKTILDFLKSDGFANRNFMQLIHDDSLTFKEDIQKAQVSGQGDSLHEHIANLAGSPAIKKGILQTVKVVDELVKVMGRHKPENIVIEMARENQTTQKGQKNSRERMKRIEEGIKELGSQILKEHPVENTQLQNEKLYLYYLQNGRDMYVDQELDINRLSDYDVDHIVPQSFLKDDSIDNKVLTRSDKARGKSDNVPSEEVVKKMKNYWRQLLNAKLITQRKFDNLTKAERGGLSELDKAGFIKRQLVETRQITKHVAQILDSRMNTKYDENDKLIREVKVITLKSKLVSDFRKDFQFYKVREINNYHHAHDAYLNAVVGTALIKKYPKLESEFVYGDYKVYDVRKMIAKSEQEIGKATAKYFFYSNIMNFFKTEITLANGEIRKRPLIETNGETGEIVWDKGRDFATVRKVLSMPQVNIVKKTEVQTGGFSKESILPKRNSDKLIARKKDWDPKKYGGFDSPTVAYSVLVVAKVEKGKSKKLKSVKELLGITIMERSSFEKNPIDFLEAKGYKEVKKDLIIKLPKYSLFELENGRKRMLASAGELQKGNELALPSKYVNFLYLASHYEKLKGSPEDNEQKQLFVEQHKHYLDEIIEQISEFSKRVILADANLDKVLSAYNKHRDKPIREQAENIIHLFTLTNLGAPAAFKYFDTTIDRKRYTSTKEVLDATLIHQSITGLYETRIDLSQLGGDGGEAAAKGGSGGTLNIEDEYRLHETSKGPDVPLGSTWLSDFPQAWAETGGMGLAFRQAPLIISLKATSTPVSIKQYPMSQEARLGIKPHIQRLLDQGILVPCQSPWNTPLLPVKKPGTNDYRPVQDLREVNKRVEDIHPTVPNPYNLLSGLPPSHQWYTVLDLKDAFFCLRLHPTSQSLFAFEWKDPEMGISGQLTWTRLPQGFKNSPTLFNEALHRDLADFRIQHPDLILLQYVDDLLLAATSELDCQQGTRALLQTLGDLGYRASAKKAQICQKQVKYLGYLLKEGQRWLTEARKETVMGQPTPKTPRQLREFLGTAGLCRLWIPGFAEMAAPLYPLTKPGTLFKWGPDQQKAYQEIKQALLTAPALGLPDLTKPFELFVDEKQGYAKGVLTQKLGPWRRPVAYLSKKLDPVAAGWPPCLRMVAAIAVLTKDVGKLTMGQPLVILAPHAVEALVKQPPDRWLSNARMTHYQALLLDTDRVQFGPIVALNPATLLPLPEEGLQHDCLDILAEAHGTRPDLTDQPLPDADHTWYTDGSSFLQEGQRRAGAAVTTETEVIWAKALPAGTSAQRAELIALTQALKMAAGKKLNVYTDSRYAFATAHIHGEIYRRRGWLTSEGKEIKNKDEILALLKALFLPKRLSIIHCPGHQKGNHAEARGNRMADQAAREVATRETPETSTLLAGKRTADGSEFEKRTADGSEFESPKKKAKVE

SEQ ID NO: 2427 - protein, 2088 aa, synthetic construct
MPAAKRVKLDGGDKKYSIGLDIGTNSVGWAVITDEYKVPSKKFKVLGNTDRHSIKKNLIGALLFDSGETAEATRLKRTARRRYTRRKNRICYLQEIFSNEMAKVDDSFFHRLEESFLVEEDKKHERHPIFGNIVDEVAYHEKYPTIYHLRKKLVDSTDKADLRLIYLALAHMIKFRGHFLIEGDLNPDNSDVDKLFIQLVQTYNQLFEENPINASGVDAKAILSARLSKSRRLENLIAQLPGEKKNGLFGNLIALSLGLTPNFKSNFDLAEDAKLQLSKDTYDDDLDNLLAQIGDQYADLFLAAKNLSDAILLSDILRVNTEITKAPLSASMIKRYDEHHQDLTLLKALVRQQLPEKYKEIFFDQSKNGYAGYIDGGASQEEFYKFIKPILEKMDGTEELLVKLNREDLLRKQRTFDNGSIPHQIHLGELHAILRRQEDFYPFLKDNREKIEKILTFRIPYYVGPLARGNSRFAWMTRKSEETITPWNFEEVVDKGASAQSFIERMTNFDKNLPNEKVLPKHSLLYEYFTVYNELTKVKYVTEGMRKPAFLSGEQKKAIVDLLFKTNRKVTVKQLKEDYFKKIECFDSVEISGVEDRFNASLGTYHDLLKIIKDKDFLDNEENEDILEDIVLTLTLFEDREMIEERLKTYAHLFDDKVMKQLKRRRYTGWGRLSRKLINGIRDKQSGKTILDFLKSDGFANRNFMQLIHDDSLTFKEDIQKAQVSGQGDSLHEHIANLAGSPAIKKGILQTVKVVDELVKVMGRHKPENIVIEMARENQTTQKGQKNSRERMKRIEEGIKELGSQILKEHPVENTQLQNEKLYLYYLQNGRDMYVDQELDINRLSDYDVDHIVPQSFLKDDSIDNKVLTRSDKARGKSDNVPSEEVVKKMKNYWRQLLNAKLITQRKFDNLTKAERGGLSELDKAGFIKRQLVETRQITKHVAQILDSRMNTKYDENDKLIREVKVITLKSKLVSDFRKDFQFYKVREINNYHHAHDAYLNAVVGTALIKKYPKLESEFVYGDYKVYDVRKMIAKSEQEIGKATAKYFFYSNIMNFFKTEITLANGEIRKRPLIETNGETGEIVWDKGRDFATVRKVLSMPQVNIVKKTEVQTGGFSKESILPKRNSDKLIARKKDWDPKKYGGFDSPTVAYSVLVVAKVEKGKSKKLKSVKELLGITIMERSSFEKNPIDFLEAKGYKEVKKDLIIKLPKYSLFELENGRKRMLASAGELQKGNELALPSKYVNFLYLASHYEKLKGSPEDNEQKQLFVEQHKHYLDEIIEQISEFSKRVILADANLDKVLSAYNKHRDKPIREQAENIIHLFTLTNLGAPAAFKYFDTTIDRKRYTSTKEVLDATLIHQSITGLYETRIDLSQLGGDGGPAPGGTLNIEDEYRLHETSKGPDVPLGSTWLSDFPQAWAETGGMGLAFRQAPLIISLKATSTPVSIKQYPMSQEARLGIKPHIQRLLDQGILVPCQSPWNTPLLPVKKPGTNDYRPVQDLREVNKRVEDIHPTVPNPYNLLSGLPPSHQWYTVLDLKDAFFCLRLHPTSQSLFAFEWKDPEMGISGQLTWTRLPQGFKNSPTLFNEALHRDLADFRIQHPDLILLQYVDDLLLAATSELDCQQGTRALLQTLGDLGYRASAKKAQICQKQVKYLGYLLKEGQRWLTEARKETVMGQPTPKTPRQLREFLGTAGLCRLWIPGFAEMAAPLYPLTKPGTLFKWGPDQQKAYQEIKQALLTAPALGLPDLTKPFELFVDEKQGYAKGVLTQKLGPWRRPVAYLSKKLDPVAAGWPPCLRMVAAIAVLTKDVGKLTMGQPLVILAPHAVEALVKQPPDRWLSNARMTHYQALLLDTDRVQFGPIVALNPATLLPLPEEGLQHDCLDILAEAHGTRPDLTDQPLPDADHTWYTDGSSFLQEGQRRAGAAVTTETEVIWAKALPAGTSAQRAELIALTQALKMAAGKKLNVYTDSRYAFATAHIHGEIYRRRGWLTSEGKEIKNKDEILALLKALFLPKRLSIIHCPGHQKGNHAEARGNRMADQAAREVATRETPETSTLLAGKRTADGSEFEKRTADGSEFESPKKKAKVE

SEQ ID NO: 2428 - protein, 2096 aa, synthetic construct
MPAAKRVKLDGGDKKYSIGLDIGTNSVGWAVITDEYKVPSKKFKVLGNTDRHSIKKNLIGALLFDSGETAEATRLKRTARRRYTRRKNRICYLQEIFSNEMAKVDDSFFHRLEESFLVEEDKKHERHPIFGNIVDEVAYHEKYPTIYHLRKKLVDSTDKADLRLIYLALAHMIKFRGHFLIEGDLNPDNSDVDKLFIQLVQTYNQLFEENPINASGVDAKAILSARLSKSRRLENLIAQLPGEKKNGLFGNLIALSLGLTPNFKSNFDLAEDAKLQLSKDTYDDDLDNLLAQIGDQYADLFLAAKNLSDAILLSDILRVNTEITKAPLSASMIKRYDEHHQDLTLLKALVRQQLPEKYKEIFFDQSKNGYAGYIDGGASQEEFYKFIKPILEKMDGTEELLVKLNREDLLRKQRTFDNGSIPHQIHLGELHAILRRQEDFYPFLKDNREKIEKILTFRIPYYVGPLARGNSRFAWMTRKSEETITPWNFEEVVDKGASAQSFIERMTNFDKNLPNEKVLPKHSLLYEYFTVYNELTKVKYVTEGMRKPAFLSGEQKKAIVDLLFKTNRKVTVKQLKEDYFKKIECFDSVEISGVEDRFNASLGTYHDLLKIIKDKDFLDNEENEDILEDIVLTLTLFEDREMIEERLKTYAHLFDDKVMKQLKRRRYTGWGRLSRKLINGIRDKQSGKTILDFLKSDGFANRNFMQLIHDDSLTFKEDIQKAQVSGQGDSLHEHIANLAGSPAIKKGILQTVKVVDELVKVMGRHKPENIVIEMARENQTTQKGQKNSRERMKRIEEGIKELGSQILKEHPVENTQLQNEKLYLYYLQNGRDMYVDQELDINRLSDYDVDHIVPQSFLKDDSIDNKVLTRSDKARGKSDNVPSEEVVKKMKNYWRQLLNAKLITQRKFDNLTKAERGGLSELDKAGFIKRQLVETRQITKHVAQILDSRMNTKYDENDKLIREVKVITLKSKLVSDFRKDFQFYKVREINNYHHAHDAYLNAVVGTALIKKYPKLESEFVYGDYKVYDVRKMIAKSEQEIGKATAKYFFYSNIMNFFKTEITLANGEIRKRPLIETNGETGEIVWDKGRDFATVRKVLSMPQVNIVKKTEVQTGGFSKESILPKRNSDKLIARKKDWDPKKYGGFDSPTVAYSVLVVAKVEKGKSKKLKSVKELLGITIMERSSFEKNPIDFLEAKGYKEVKKDLIIKLPKYSLFELENGRKRMLASAGELQKGNELALPSKYVNFLYLASHYEKLKGSPEDNEQKQLFVEQHKHYLDEIIEQISEFSKRVILADANLDKVLSAYNKHRDKPIREQAENIIHLFTLTNLGAPAAFKYFDTTIDRKRYTSTKEVLDATLIHQSITGLYETRIDLSQLGGDGGPAPGSSEAAAKGGTLNIEDEYRLHETSKGPDVPLGSTWLSDFPQAWAETGGMGLAFRQAPLIISLKATSTPVSIKQYPMSQEARLGIKPHIQRLLDQGILVPCQSPWNTPLLPVKKPGTNDYRPVQDLREVNKRVEDIHPTVPNPYNLLSGLPPSHQWYTVLDLKDAFFCLRLHPTSQSLFAFEWKDPEMGISGQLTWTRLPQGFKNSPTLFNEALHRDLADFRIQHPDLILLQYVDDLLLAATSELDCQQGTRALLQTLGDLGYRASAKKAQICQKQVKYLGYLLKEGQRWLTEARKETVMGQPTPKTPRQLREFLGTAGLCRLWIPGFAEMAAPLYPLTKPGTLFKWGPDQQKAYQEIKQALLTAPALGLPDLTKPFELFVDEKQGYAKGVLTQKLGPWRRPVAYLSKKLDPVAAGWPPCLRMVAAIAVLTKDVGKLTMGQPLVILAPHAVEALVKQPPDRWLSNARMTHYQALLLDTDRVQFGPIVALNPATLLPLPEEGLQHDCLDILAEAHGTRPDLTDQPLPDADHTWYTDGSSFLQEGQRRAGAAVTTETEVIWAKALPAGTSAQRAELIALTQALKMAAGKKLNVYTDSRYAFATAHIHGEIYRRRGWLTSEGKEIKNKDEILALLKALFLPKRLSIIHCPGHQKGNHAEARGNRMADQAAREVATRETPETSTLLAGKRTADGSEFEKRTADGSEFESPKKKAKVE

SEQ ID NO: 2429 - protein, 2115 aa, synthetic construct
MPAAKRVKLDGGDKKYSIGLDIGTNSVGWAVITDEYKVPSKKFKVLGNTDRHSIKKNLIGALLFDSGETAEATRLKRTARRRYTRRKNRICYLQEIFSNEMAKVDDSFFHRLEESFLVEEDKKHERHPIFGNIVDEVAYHEKYPTIYHLRKKLVDSTDKADLRLIYLALAHMIKFRGHFLIEGDLNPDNSDVDKLFIQLVQTYNQLFEENPINASGVDAKAILSARLSKSRRLENLIAQLPGEKKNGLFGNLIALSLGLTPNFKSNFDLAEDAKLQLSKDTYDDDLDNLLAQIGDQYADLFLAAKNLSDAILLSDILRVNTEITKAPLSASMIKRYDEHHQDLTLLKALVRQQLPEKYKEIFFDQSKNGYAGYIDGGASQEEFYKFIKPILEKMDGTEELLVKLNREDLLRKQRTFDNGSIPHQIHLGELHAILRRQEDFYPFLKDNREKIEKILTFRIPYYVGPLARGNSRFAWMTRKSEETITPWNFEEVVDKGASAQSFIERMTNFDKNLPNEKVLPKHSLLYEYFTVYNELTKVKYVTEGMRKPAFLSGEQKKAIVDLLFKTNRKVTVKQLKEDYFKKIECFDSVEISGVEDRFNASLGTYHDLLKIIKDKDFLDNEENEDILEDIVLTLTLFEDREMIEERLKTYAHLFDDKVMKQLKRRRYTGWGRLSRKLINGIRDKQSGKTILDFLKSDGFANRNFMQLIHDDSLTFKEDIQKAQVSGQGDSLHEHIANLAGSPAIKKGILQTVKVVDELVKVMGRHKPENIVIEMARENQTTQKGQKNSRERMKRIEEGIKELGSQILKEHPVENTQLQNEKLYLYYLQNGRDMYVDQELDINRLSDYDVDHIVPQSFLKDDSIDNKVLTRSDKARGKSDNVPSEEVVKKMKNYWRQLLNAKLITQRKFDNLTKAERGGLSELDKAGFIKRQLVETRQITKHVAQILDSRMNTKYDENDKLIREVKVITLKSKLVSDFRKDFQFYKVREINNYHHAHDAYLNAVVGTALIKKYPKLESEFVYGDYKVYDVRKMIAKSEQEIGKATAKYFFYSNIMNFFKTEITLANGEIRKRPLIETNGETGEIVWDKGRDFATVRKVLSMPQVNIVKKTEVQTGGFSKESILPKRNSDKLIARKKDWDPKKYGGFDSPTVAYSVLVVAKVEKGKSKKLKSVKELLGITIMERSSFEKNPIDFLEAKGYKEVKKDLIIKLPKYSLFELENGRKRMLASAGELQKGNELALPSKYVNFLYLASHYEKLKGSPEDNEQKQLFVEQHKHYLDEIIEQISEFSKRVILADANLDKVLSAYNKHRDKPIREQAENIIHLFTLTNLGAPAAFKYFDTTIDRKRYTSTKEVLDATLIHQSITGLYETRIDLSQLGGDGGGGGGSGGGGSGGGGSGGGGSGGGGSGGGGSGGTLNIEDEYRLHETSKGPDVPLGSTWLSDFPQAWAETGGMGLAFRQAPLIISLKATSTPVSIKQYPMSQEARLGIKPHIQRLLDQGILVPCQSPWNTPLLPVKKPGTNDYRPVQDLREVNKRVEDIHPTVPNPYNLLSGLPPSHQWYTVLDLKDAFFCLRLHPTSQSLFAFEWKDPEMGISGQLTWTRLPQGFKNSPTLFNEALHRDLADFRIQHPDLILLQYVDDLLLAATSELDCQQGTRALLQTLGDLGYRASAKKAQICQKQVKYLGYLLKEGQRWLTEARKETVMGQPTPKTPRQLREFLGTAGLCRLWIPGFAEMAAPLYPLTKPGTLFKWGPDQQKAYQEIKQALLTAPALGLPDLTKPFELFVDEKQGYAKGVLTQKLGPWRRPVAYLSKKLDPVAAGWPPCLRMVAAIAVLTKDVGKLTMGQPLVILAPHAVEALVKQPPDRWLSNARMTHYQALLLDTDRVQFGPIVALNPATLLPLPEEGLQHDCLDILAEAHGTRPDLTDQPLPDADHTWYTDGSSFLQEGQRRAGAAVTTETEVIWAKALPAGTSAQRAELIALTQALKMAAGKKLNVYTDSRYAFATAHIHGEIYRRRGWLTSEGKEIKNKDEILALLKALFLPKRLSIIHCPGHQKGNHAEARGNRMADQAAREVATRETPETSTLLAGKRTADGSEFEKRTADGSEFESPKKKAKVE

SEQ ID NO: 2430 - protein, 2098 aa, synthetic construct
MPAAKRVKLDGGDKKYSIGLDIGTNSVGWAVITDEYKVPSKKFKVLGNTDRHSIKKNLIGALLFDSGETAEATRLKRTARRRYTRRKNRICYLQEIFSNEMAKVDDSFFHRLEESFLVEEDKKHERHPIFGNIVDEVAYHEKYPTIYHLRKKLVDSTDKADLRLIYLALAHMIKFRGHFLIEGDLNPDNSDVDKLFIQLVQTYNQLFEENPINASGVDAKAILSARLSKSRRLENLIAQLPGEKKNGLFGNLIALSLGLTPNFKSNFDLAEDAKLQLSKDTYDDDLDNLLAQIGDQYADLFLAAKNLSDAILLSDILRVNTEITKAPLSASMIKRYDEHHQDLTLLKALVRQQLPEKYKEIFFDQSKNGYAGYIDGGASQEEFYKFIKPILEKMDGTEELLVKLNREDLLRKQRTFDNGSIPHQIHLGELHAILRRQEDFYPFLKDNREKIEKILTFRIPYYVGPLARGNSRFAWMTRKSEETITPWNFEEVVDKGASAQSFIERMTNFDKNLPNEKVLPKHSLLYEYFTVYNELTKVKYVTEGMRKPAFLSGEQKKAIVDLLFKTNRKVTVKQLKEDYFKKIECFDSVEISGVEDRFNASLGTYHDLLKIIKDKDFLDNEENEDILEDIVLTLTLFEDREMIEERLKTYAHLFDDKVMKQLKRRRYTGWGRLSRKLINGIRDKQSGKTILDFLKSDGFANRNFMQLIHDDSLTFKEDIQKAQVSGQGDSLHEHIANLAGSPAIKKGILQTVKVVDELVKVMGRHKPENIVIEMARENQTTQKGQKNSRERMKRIEEGIKELGSQILKEHPVENTQLQNEKLYLYYLQNGRDMYVDQELDINRLSDYDVDHIVPQSFLKDDSIDNKVLTRSDKARGKSDNVPSEEVVKKMKNYWRQLLNAKLITQRKFDNLTKAERGGLSELDKAGFIKRQLVETRQITKHVAQILDSRMNTKYDENDKLIREVKVITLKSKLVSDFRKDFQFYKVREINNYHHAHDAYLNAVVGTALIKKYPKLESEFVYGDYKVYDVRKMIAKSEQEIGKATAKYFFYSNIMNFFKTEITLANGEIRKRPLIETNGETGEIVWDKGRDFATVRKVLSMPQVNIVKKTEVQTGGFSKESILPKRNSDKLIARKKDWDPKKYGGFDSPTVAYSVLVVAKVEKGKSKKLKSVKELLGITIMERSSFEKNPIDFLEAKGYKEVKKDLIIKLPKYSLFELENGRKRMLASAGELQKGNELALPSKYVNFLYLASHYEKLKGSPEDNEQKQLFVEQHKHYLDEIIEQISEFSKRVILADANLDKVLSAYNKHRDKPIREQAENIIHLFTLTNLGAPAAFKYFDTTIDRKRYTSTKEVLDATLIHQSITGLYETRIDLSQLGGDGGPAPAPAPAPAPAPGGTLNIEDEYRLHETSKGPDVPLGSTWLSDFPQAWAETGGMGLAFRQAPLIISLKATSTPVSIKQYPMSQEARLGIKPHIQRLLDQGILVPCQSPWNTPLLPVKKPGTNDYRPVQDLREVNKRVEDIHPTVPNPYNLLSGLPPSHQWYTVLDLKDAFFCLRLHPTSQSLFAFEWKDPEMGISGQLTWTRLPQGFKNSPTLFNEALHRDLADFRIQHPDLILLQYVDDLLLAATSELDCQQGTRALLQTLGDLGYRASAKKAQICQKQVKYLGYLLKEGQRWLTEARKETVMGQPTPKTPRQLREFLGKAGLCRLFIPGFAEMAAPLYPLTKPGTLFKWGPDQQKAYQEIKQALLTAPALGLPDLTKPFELFVDEKQGYAKGVLTQKLGPWRRPVAYLSKKLDPVAAGWPPCLRMVAAIAVLTKDVGKLTMGQPLVILAPHAVEALVKQPPDRWLSNARMTHYQALLLDTDRVQFGPIVALNPATLLPLPEEGLQHDCLDILAEAHGTRPDLTDQPLPDADHTWYTDGSSFLQEGQRRAGAAVTTETEVIWAKALPAGTSAQRAELIALTQALKMAAGKKLNVYTDSRYAFATAHIHGEIYRRRGWLTSEGKEIKNKDEILALLKALFLPKRLSIIHCPGHQKGNHAEARGNRMADQAAREVATRETPETSTLLAGKRTADGSEFEKRTADGSEFESPKKKAKVE

SEQ ID NO: 2431 - protein, 2096 aa, synthetic construct
MPAAKRVKLDGGDKKYSIGLDIGTNSVGWAVITDEYKVPSKKFKVLGNTDRHSIKKNLIGALLFDSGETAEATRLKRTARRRYTRRKNRICYLQEIFSNEMAKVDDSFFHRLEESFLVEEDKKHERHPIFGNIVDEVAYHEKYPTIYHLRKKLVDSTDKADLRLIYLALAHMIKFRGHFLIEGDLNPDNSDVDKLFIQLVQTYNQLFEENPINASGVDAKAILSARLSKSRRLENLIAQLPGEKKNGLFGNLIALSLGLTPNFKSNFDLAEDAKLQLSKDTYDDDLDNLLAQIGDQYADLFLAAKNLSDAILLSDILRVNTEITKAPLSASMIKRYDEHHQDLTLLKALVRQQLPEKYKEIFFDQSKNGYAGYIDGGASQEEFYKFIKPILEKMDGTEELLVKLNREDLLRKQRTFDNGSIPHQIHLGELHAILRRQEDFYPFLKDNREKIEKILTFRIPYYVGPLARGNSRFAWMTRKSEETITPWNFEEVVDKGASAQSFIERMTNFDKNLPNEKVLPKHSLLYEYFTVYNELTKVKYVTEGMRKPAFLSGEQKKAIVDLLFKTNRKVTVKQLKEDYFKKIECFDSVEISGVEDRFNASLGTYHDLLKIIKDKDFLDNEENEDILEDIVLTLTLFEDREMIEERLKTYAHLFDDKVMKQLKRRRYTGWGRLSRKLINGIRDKQSGKTILDFLKSDGFANRNFMQLIHDDSLTFKEDIQKAQVSGQGDSLHEHIANLAGSPAIKKGILQTVKVVDELVKVMGRHKPENIVIEMARENQTTQKGQKNSRERMKRIEEGIKELGSQILKEHPVENTQLQNEKLYLYYLQNGRDMYVDQELDINRLSDYDVDHIVPQSFLKDDSIDNKVLTRSDKARGKSDNVPSEEVVKKMKNYWRQLLNAKLITQRKFDNLTKAERGGLSELDKAGFIKRQLVETRQITKHVAQILDSRMNTKYDENDKLIREVKVITLKSKLVSDFRKDFQFYKVREINNYHHAHDAYLNAVVGTALIKKYPKLESEFVYGDYKVYDVRKMIAKSEQEIGKATAKYFFYSNIMNFFKTEITLANGEIRKRPLIETNGETGEIVWDKGRDFATVRKVLSMPQVNIVKKTEVQTGGFSKESILPKRNSDKLIARKKDWDPKKYGGFDSPTVAYSVLVVAKVEKGKSKKLKSVKELLGITIMERSSFEKNPIDFLEAKGYKEVKKDLIIKLPKYSLFELENGRKRMLASAGELQKGNELALPSKYVNFLYLASHYEKLKGSPEDNEQKQLFVEQHKHYLDEIIEQISEFSKRVILADANLDKVLSAYNKHRDKPIREQAENIIHLFTLTNLGAPAAFKYFDTTIDRKRYTSTKEVLDATLIHQSITGLYETRIDLSQLGGDGGEAAAKPAPGGSGGTLNIEDEYRLHETSKGPDVPLGSTWLSDFPQAWAETGGMGLAFRQAPLIISLKATSTPVSIKQYPMSQEARLGIKPHIQRLLDQGILVPCQSPWNTPLLPVKKPGTNDYRPVQDLREVNKRVEDIHPTVPNPYNLLSGLPPSHQWYTVLDLKDAFFCLRLHPTSQSLFAFEWKDPEMGISGQLTWTRLPQGFKNSPTLFNEALHRDLADFRIQHPDLILLQYVDDLLLAATSELDCQQGTRALLQTLGDLGYRASAKKAQICQKQVKYLGYLLKEGQRWLTEARKETVMGQPTPKTPRQLREFLGKAGLCRLFIPGFAEMAAPLYPLTKPGTLFKWGPDQQKAYQEIKQALLTAPALGLPDLTKPFELFVDEKQGYAKGVLTQKLGPWRRPVAYLSKKLDPVAAGWPPCLRMVAAIAVLTKDVGKLTMGQPLVILAPHAVEALVKQPPDRWLSNARMTHYQALLLDTDRVQFGPIVALNPATLLPLPEEGLQHDCLDILAEAHGTRPDLTDQPLPDADHTWYTDGSSFLQEGQRRAGAAVTTETEVIWAKALPAGTSAQRAELIALTQALKMAAGKKLNVYTDSRYAFATAHIHGEIYRRRGWLTSEGKEIKNKDEILALLKALFLPKRLSIIHCPGHQKGNHAEARGNRMADQAAREVATRETPETSTLLAGKRTADGSEFEKRTADGSEFESPKKKAKVE

SEQ ID NO: 2432 - protein, 2094 aa, synthetic construct
MPAAKRVKLDGGDKKYSIGLDIGTNSVGWAVITDEYKVPSKKFKVLGNTDRHSIKKNLIGALLFDSGETAEATRLKRTARRRYTRRKNRICYLQEIFSNEMAKVDDSFFHRLEESFLVEEDKKHERHPIFGNIVDEVAYHEKYPTIYHLRKKLVDSTDKADLRLIYLALAHMIKFRGHFLIEGDLNPDNSDVDKLFIQLVQTYNQLFEENPINASGVDAKAILSARLSKSRRLENLIAQLPGEKKNGLFGNLIALSLGLTPNFKSNFDLAEDAKLQLSKDTYDDDLDNLLAQIGDQYADLFLAAKNLSDAILLSDILRVNTEITKAPLSASMIKRYDEHHQDLTLLKALVRQQLPEKYKEIFFDQSKNGYAGYIDGGASQEEFYKFIKPILEKMDGTEELLVKLNREDLLRKQRTFDNGSIPHQIHLGELHAILRRQEDFYPFLKDNREKIEKILTFRIPYYVGPLARGNSRFAWMTRKSEETITPWNFEEVVDKGASAQSFIERMTNFDKNLPNEKVLPKHSLLYEYFTVYNELTKVKYVTEGMRKPAFLSGEQKKAIVDLLFKTNRKVTVKQLKEDYFKKIECFDSVEISGVEDRFNASLGTYHDLLKIIKDKDFLDNEENEDILEDIVLTLTLFEDREMIEERLKTYAHLFDDKVMKQLKRRRYTGWGRLSRKLINGIRDKQSGKTILDFLKSDGFANRNFMQLIHDDSLTFKEDIQKAQVSGQGDSLHEHIANLAGSPAIKKGILQTVKVVDELVKVMGRHKPENIVIEMARENQTTQKGQKNSRERMKRIEEGIKELGSQILKEHPVENTQLQNEKLYLYYLQNGRDMYVDQELDINRLSDYDVDHIVPQSFLKDDSIDNKVLTRSDKARGKSDNVPSEEVVKKMKNYWRQLLNAKLITQRKFDNLTKAERGGLSELDKAGFIKRQLVETRQITKHVAQILDSRMNTKYDENDKLIREVKVITLKSKLVSDFRKDFQFYKVREINNYHHAHDAYLNAVVGTALIKKYPKLESEFVYGDYKVYDVRKMIAKSEQEIGKATAKYFFYSNIMNFFKTEITLANGEIRKRPLIETNGETGEIVWDKGRDFATVRKVLSMPQVNIVKKTEVQTGGFSKESILPKRNSDKLIARKKDWDPKKYGGFDSPTVAYSVLVVAKVEKGKSKKLKSVKELLGITIMERSSFEKNPIDFLEAKGYKEVKKDLIIKLPKYSLFELENGRKRMLASAGELQKGNELALPSKYVNFLYLASHYEKLKGSPEDNEQKQLFVEQHKHYLDEIIEQISEFSKRVILADANLDKVLSAYNKHRDKPIREQAENIIHLFTLTNLGAPAAFKYFDTTIDRKRYTSTKEVLDATLIHQSITGLYETRIDLSQLGGDGGPAPGGSGGGGGTLNIEDEYRLHETSKGPDVPLGSTWLSDFPQAWAETGGMGLAFRQAPLIISLKATSTPVSIKQYPMSQEARLGIKPHIQRLLDQGILVPCQSPWNTPLLPVKKPGTNDYRPVQDLREVNKRVEDIHPTVPNPYNLLSGLPPSHQWYTVLDLKDAFFCLRLHPTSQSLFAFEWKDPEMGISGQLTWTRLPQGFKNSPTLFNEALHRDLADFRIQHPDLILLQYVDDLLLAATSELDCQQGTRALLQTLGDLGYRASAKKAQICQKQVKYLGYLLKEGQRWLTEARKETVMGQPTPKTPRQLREFLGKAGLCRLFIPGFAEMAAPLYPLTKPGTLFKWGPDQQKAYQEIKQALLTAPALGLPDLTKPFELFVDEKQGYAKGVLTQKLGPWRRPVAYLSKKLDPVAAGWPPCLRMVAAIAVLTKDVGKLTMGQPLVILAPHAVEALVKQPPDRWLSNARMTHYQALLLDTDRVQFGPIVALNPATLLPLPEEGLQHDCLDILAEAHGTRPDLTDQPLPDADHTWYTDGSSFLQEGQRRAGAAVTTETEVIWAKALPAGTSAQRAELIALTQALKMAAGKKLNVYTDSRYAFATAHIHGEIYRRRGWLTSEGKEIKNKDEILALLKALFLPKRLSIIHCPGHQKGNHAEARGNRMADQAAREVATRETPETSTLLAGKRTADGSEFEKRTADGSEFESPKKKAKVE

SEQ ID NO: 2433 - protein, 2100 aa, synthetic construct
MPAAKRVKLDGGDKKYSIGLDIGTNSVGWAVITDEYKVPSKKFKVLGNTDRHSIKKNLIGALLFDSGETAEATRLKRTARRRYTRRKNRICYLQEIFSNEMAKVDDSFFHRLEESFLVEEDKKHERHPIFGNIVDEVAYHEKYPTIYHLRKKLVDSTDKADLRLIYLALAHMIKFRGHFLIEGDLNPDNSDVDKLFIQLVQTYNQLFEENPINASGVDAKAILSARLSKSRRLENLIAQLPGEKKNGLFGNLIALSLGLTPNFKSNFDLAEDAKLQLSKDTYDDDLDNLLAQIGDQYADLFLAAKNLSDAILLSDILRVNTEITKAPLSASMIKRYDEHHQDLTLLKALVRQQLPEKYKEIFFDQSKNGYAGYIDGGASQEEFYKFIKPILEKMDGTEELLVKLNREDLLRKQRTFDNGSIPHQIHLGELHAILRRQEDFYPFLKDNREKIEKILTFRIPYYVGPLARGNSRFAWMTRKSEETITPWNFEEVVDKGASAQSFIERMTNFDKNLPNEKVLPKHSLLYEYFTVYNELTKVKYVTEGMRKPAFLSGEQKKAIVDLLFKTNRKVTVKQLKEDYFKKIECFDSVEISGVEDRFNASLGTYHDLLKIIKDKDFLDNEENEDILEDIVLTLTLFEDREMIEERLKTYAHLFDDKVMKQLKRRRYTGWGRLSRKLINGIRDKQSGKTILDFLKSDGFANRNFMQLIHDDSLTFKEDIQKAQVSGQGDSLHEHIANLAGSPAIKKGILQTVKVVDELVKVMGRHKPENIVIEMARENQTTQKGQKNSRERMKRIEEGIKELGSQILKEHPVENTQLQNEKLYLYYLQNGRDMYVDQELDINRLSDYDVDHIVPQSFLKDDSIDNKVLTRSDKARGKSDNVPSEEVVKKMKNYWRQLLNAKLITQRKFDNLTKAERGGLSELDKAGFIKRQLVETRQITKHVAQILDSRMNTKYDENDKLIREVKVITLKSKLVSDFRKDFQFYKVREINNYHHAHDAYLNAVVGTALIKKYPKLESEFVYGDYKVYDVRKMIAKSEQEIGKATAKYFFYSNIMNFFKTEITLANGEIRKRPLIETNGETGEIVWDKGRDFATVRKVLSMPQVNIVKKTEVQTGGFSKESILPKRNSDKLIARKKDWDPKKYGGFDSPTVAYSVLVVAKVEKGKSKKLKSVKELLGITIMERSSFEKNPIDFLEAKGYKEVKKDLIIKLPKYSLFELENGRKRMLASAGELQKGNELALPSKYVNFLYLASHYEKLKGSPEDNEQKQLFVEQHKHYLDEIIEQISEFSKRVILADANLDKVLSAYNKHRDKPIREQAENIIHLFTLTNLGAPAAFKYFDTTIDRKRYTSTKEVLDATLIHQSITGLYETRIDLSQLGGDGGEAAAKGGGGSEAAAKGGTLNIEDEYRLHETSKGPDVPLGSTWLSDFPQAWAETGGMGLAFRQAPLIISLKATSTPVSIKQYPMSQEARLGIKPHIQRLLDQGILVPCQSPWNTPLLPVKKPGTNDYRPVQDLREVNKRVEDIHPTVPNPYNLLSGLPPSHQWYTVLDLKDAFFCLRLHPTSQSLFAFEWKDPEMGISGQLTWTRLPQGFKNSPTLFNEALHRDLADFRIQHPDLILLQYVDDLLLAATSELDCQQGTRALLQTLGDLGYRASAKKAQICQKQVKYLGYLLKEGQRWLTEARKETVMGQPTPKTPRQLREFLGKAGLCRLFIPGFAEMAAPLYPLTKPGTLFKWGPDQQKAYQEIKQALLTAPALGLPDLTKPFELFVDEKQGYAKGVLTQKLGPWRRPVAYLSKKLDPVAAGWPPCLRMVAAIAVLTKDVGKLTMGQPLVILAPHAVEALVKQPPDRWLSNARMTHYQALLLDTDRVQFGPIVALNPATLLPLPEEGLQHDCLDILAEAHGTRPDLTDQPLPDADHTWYTDGSSFLQEGQRRAGAAVTTETEVIWAKALPAGTSAQRAELIALTQALKMAAGKKLNVYTDSRYAFATAHIHGEIYRRRGWLTSEGKEIKNKDEILALLKALFLPKRLSIIHCPGHQKGNHAEARGNRMADQAAREVATRETPETSTLLAGKRTADGSEFEKRTADGSEFESPKKKAKVE

SEQ ID NO: 2434 - protein, 2096 aa, synthetic construct
MPAAKRVKLDGGDKKYSIGLDIGTNSVGWAVITDEYKVPSKKFKVLGNTDRHSIKKNLIGALLFDSGETAEATRLKRTARRRYTRRKNRICYLQEIFSNEMAKVDDSFFHRLEESFLVEEDKKHERHPIFGNIVDEVAYHEKYPTIYHLRKKLVDSTDKADLRLIYLALAHMIKFRGHFLIEGDLNPDNSDVDKLFIQLVQTYNQLFEENPINASGVDAKAILSARLSKSRRLENLIAQLPGEKKNGLFGNLIALSLGLTPNFKSNFDLAEDAKLQLSKDTYDDDLDNLLAQIGDQYADLFLAAKNLSDAILLSDILRVNTEITKAPLSASMIKRYDEHHQDLTLLKALVRQQLPEKYKEIFFDQSKNGYAGYIDGGASQEEFYKFIKPILEKMDGTEELLVKLNREDLLRKQRTFDNGSIPHQIHLGELHAILRRQEDFYPFLKDNREKIEKILTFRIPYYVGPLARGNSRFAWMTRKSEETITPWNFEEVVDKGASAQSFIERMTNFDKNLPNEKVLPKHSLLYEYFTVYNELTKVKYVTEGMRKPAFLSGEQKKAIVDLLFKTNRKVTVKQLKEDYFKKIECFDSVEISGVEDRFNASLGTYHDLLKIIKDKDFLDNEENEDILEDIVLTLTLFEDREMIEERLKTYAHLFDDKVMKQLKRRRYTGWGRLSRKLINGIRDKQSGKTILDFLKSDGFANRNFMQLIHDDSLTFKEDIQKAQVSGQGDSLHEHIANLAGSPAIKKGILQTVKVVDELVKVMGRHKPENIVIEMARENQTTQKGQKNSRERMKRIEEGIKELGSQILKEHPVENTQLQNEKLYLYYLQNGRDMYVDQELDINRLSDYDVDHIVPQSFLKDDSIDNKVLTRSDKARGKSDNVPSEEVVKKMKNYWRQLLNAKLITQRKFDNLTKAERGGLSELDKAGFIKRQLVETRQITKHVAQILDSRMNTKYDENDKLIREVKVITLKSKLVSDFRKDFQFYKVREINNYHHAHDAYLNAVVGTALIKKYPKLESEFVYGDYKVYDVRKMIAKSEQEIGKATAKYFFYSNIMNFFKTEITLANGEIRKRPLIETNGETGEIVWDKGRDFATVRKVLSMPQVNIVKKTEVQTGGFSKESILPKRNSDKLIARKKDWDPKKYGGFDSPTVAYSVLVVAKVEKGKSKKLKSVKELLGITIMERSSFEKNPIDFLEAKGYKEVKKDLIIKLPKYSLFELENGRKRMLASAGELQKGNELALPSKYVNFLYLASHYEKLKGSPEDNEQKQLFVEQHKHYLDEIIEQISEFSKRVILADANLDKVLSAYNKHRDKPIREQAENIIHLFTLTNLGAPAAFKYFDTTIDRKRYTSTKEVLDATLIHQSITGLYETRIDLSQLGGDGGGGGGSSEAAAKGGTLNIEDEYRLHETSKGPDVPLGSTWLSDFPQAWAETGGMGLAFRQAPLIISLKATSTPVSIKQYPMSQEARLGIKPHIQRLLDQGILVPCQSPWNTPLLPVKKPGTNDYRPVQDLREVNKRVEDIHPTVPNPYNLLSGLPPSHQWYTVLDLKDAFFCLRLHPTSQSLFAFEWKDPEMGISGQLTWTRLPQGFKNSPTLFNEALHRDLADFRIQHPDLILLQYVDDLLLAATSELDCQQGTRALLQTLGDLGYRASAKKAQICQKQVKYLGYLLKEGQRWLTEARKETVMGQPTPKTPRQLREFLGKAGLCRLFIPGFAEMAAPLYPLTKPGTLFKWGPDQQKAYQEIKQALLTAPALGLPDLTKPFELFVDEKQGYAKGVLTQKLGPWRRPVAYLSKKLDPVAAGWPPCLRMVAAIAVLTKDVGKLTMGQPLVILAPHAVEALVKQPPDRWLSNARMTHYQALLLDTDRVQFGPIVALNPATLLPLPEEGLQHDCLDILAEAHGTRPDLTDQPLPDADHTWYTDGSSFLQEGQRRAGAAVTTETEVIWAKALPAGTSAQRAELIALTQALKMAAGKKLNVYTDSRYAFATAHIHGEIYRRRGWLTSEGKEIKNKDEILALLKALFLPKRLSIIHCPGHQKGNHAEARGNRMADQAAREVATRETPETSTLLAGKRTADGSEFEKRTADGSEFESPKKKAKVE

SEQ ID NO: 2435 - protein, 2093 aa, synthetic construct
MPAAKRVKLDGGDKKYSIGLDIGTNSVGWAVITDEYKVPSKKFKVLGNTDRHSIKKNLIGALLFDSGETAEATRLKRTARRRYTRRKNRICYLQEIFSNEMAKVDDSFFHRLEESFLVEEDKKHERHPIFGNIVDEVAYHEKYPTIYHLRKKLVDSTDKADLRLIYLALAHMIKFRGHFLIEGDLNPDNSDVDKLFIQLVQTYNQLFEENPINASGVDAKAILSARLSKSRRLENLIAQLPGEKKNGLFGNLIALSLGLTPNFKSNFDLAEDAKLQLSKDTYDDDLDNLLAQIGDQYADLFLAAKNLSDAILLSDILRVNTEITKAPLSASMIKRYDEHHQDLTLLKALVRQQLPEKYKEIFFDQSKNGYAGYIDGGASQEEFYKFIKPILEKMDGTEELLVKLNREDLLRKQRTFDNGSIPHQIHLGELHAILRRQEDFYPFLKDNREKIEKILTFRIPYYVGPLARGNSRFAWMTRKSEETITPWNFEEVVDKGASAQSFIERMTNFDKNLPNEKVLPKHSLLYEYFTVYNELTKVKYVTEGMRKPAFLSGEQKKAIVDLLFKTNRKVTVKQLKEDYFKKIECFDSVEISGVEDRFNASLGTYHDLLKIIKDKDFLDNEENEDILEDIVLTLTLFEDREMIEERLKTYAHLFDDKVMKQLKRRRYTGWGRLSRKLINGIRDKQSGKTILDFLKSDGFANRNFMQLIHDDSLTFKEDIQKAQVSGQGDSLHEHIANLAGSPAIKKGILQTVKVVDELVKVMGRHKPENIVIEMARENQTTQKGQKNSRERMKRIEEGIKELGSQILKEHPVENTQLQNEKLYLYYLQNGRDMYVDQELDINRLSDYDVDHIVPQSFLKDDSIDNKVLTRSDKARGKSDNVPSEEVVKKMKNYWRQLLNAKLITQRKFDNLTKAERGGLSELDKAGFIKRQLVETRQITKHVAQILDSRMNTKYDENDKLIREVKVITLKSKLVSDFRKDFQFYKVREINNYHHAHDAYLNAVVGTALIKKYPKLESEFVYGDYKVYDVRKMIAKSEQEIGKATAKYFFYSNIMNFFKTEITLANGEIRKRPLIETNGETGEIVWDKGRDFATVRKVLSMPQVNIVKKTEVQTGGFSKESILPKRNSDKLIARKKDWDPKKYGGFDSPTVAYSVLVVAKVEKGKSKKLKSVKELLGITIMERSSFEKNPIDFLEAKGYKEVKKDLIIKLPKYSLFELENGRKRMLASAGELQKGNELALPSKYVNFLYLASHYEKLKGSPEDNEQKQLFVEQHKHYLDEIIEQISEFSKRVILADANLDKVLSAYNKHRDKPIREQAENIIHLFTLTNLGAPAAFKYFDTTIDRKRYTSTKEVLDATLIHQSITGLYETRIDLSQLGGDGGEAAAKGGSGGTLNIEDEYRLHETSKGPDVPLGSTWLSDFPQAWAETGGMGLAFRQAPLIISLKATSTPVSIKQYPMSQEARLGIKPHIQRLLDQGILVPCQSPWNTPLLPVKKPGTNDYRPVQDLREVNKRVEDIHPTVPNPYNLLSGLPPSHQWYTVLDLKDAFFCLRLHPTSQSLFAFEWKDPEMGISGQLTWTRLPQGFKNSPTLFNEALHRDLADFRIQHPDLILLQYVDDLLLAATSELDCQQGTRALLQTLGDLGYRASAKKAQICQKQVKYLGYLLKEGQRWLTEARKETVMGQPTPKTPRQLREFLGKAGLCRLFIPGFAEMAAPLYPLTKPGTLFKWGPDQQKAYQEIKQALLTAPALGLPDLTKPFELFVDEKQGYAKGVLTQKLGPWRRPVAYLSKKLDPVAAGWPPCLRMVAAIAVLTKDVGKLTMGQPLVILAPHAVEALVKQPPDRWLSNARMTHYQALLLDTDRVQFGPIVALNPATLLPLPEEGLQHDCLDILAEAHGTRPDLTDQPLPDADHTWYTDGSSFLQEGQRRAGAAVTTETEVIWAKALPAGTSAQRAELIALTQALKMAAGKKLNVYTDSRYAFATAHIHGEIYRRRGWLTSEGKEIKNKDEILALLKALFLPKRLSIIHCPGHQKGNHAEARGNRMADQAAREVATRETPETSTLLAGKRTADGSEFEKRTADGSEFESPKKKAKVE

SEQ ID NO: 2436 - protein, 2091 aa, synthetic construct
MPAAKRVKLDGGDKKYSIGLDIGTNSVGWAVITDEYKVPSKKFKVLGNTDRHSIKKNLIGALLFDSGETAEATRLKRTARRRYTRRKNRICYLQEIFSNEMAKVDDSFFHRLEESFLVEEDKKHERHPIFGNIVDEVAYHEKYPTIYHLRKKLVDSTDKADLRLIYLALAHMIKFRGHFLIEGDLNPDNSDVDKLFIQLVQTYNQLFEENPINASGVDAKAILSARLSKSRRLENLIAQLPGEKKNGLFGNLIALSLGLTPNFKSNFDLAEDAKLQLSKDTYDDDLDNLLAQIGDQYADLFLAAKNLSDAILLSDILRVNTEITKAPLSASMIKRYDEHHQDLTLLKALVRQQLPEKYKEIFFDQSKNGYAGYIDGGASQEEFYKFIKPILEKMDGTEELLVKLNREDLLRKQRTFDNGSIPHQIHLGELHAILRRQEDFYPFLKDNREKIEKILTFRIPYYVGPLARGNSRFAWMTRKSEETITPWNFEEVVDKGASAQSFIERMTNFDKNLPNEKVLPKHSLLYEYFTVYNELTKVKYVTEGMRKPAFLSGEQKKAIVDLLFKTNRKVTVKQLKEDYFKKIECFDSVEISGVEDRFNASLGTYHDLLKIIKDKDFLDNEENEDILEDIVLTLTLFEDREMIEERLKTYAHLFDDKVMKQLKRRRYTGWGRLSRKLINGIRDKQSGKTILDFLKSDGFANRNFMQLIHDDSLTFKEDIQKAQVSGQGDSLHEHIANLAGSPAIKKGILQTVKVVDELVKVMGRHKPENIVIEMARENQTTQKGQKNSRERMKRIEEGIKELGSQILKEHPVENTQLQNEKLYLYYLQNGRDMYVDQELDINRLSDYDVDHIVPQSFLKDDSIDNKVLTRSDKARGKSDNVPSEEVVKKMKNYWRQLLNAKLITQRKFDNLTKAERGGLSELDKAGFIKRQLVETRQITKHVAQILDSRMNTKYDENDKLIREVKVITLKSKLVSDFRKDFQFYKVREINNYHHAHDAYLNAVVGTALIKKYPKLESEFVYGDYKVYDVRKMIAKSEQEIGKATAKYFFYSNIMNFFKTEITLANGEIRKRPLIETNGETGEIVWDKGRDFATVRKVLSMPQVNIVKKTEVQTGGFSKESILPKRNSDKLIARKKDWDPKKYGGFDSPTVAYSVLVVAKVEKGKSKKLKSVKELLGITIMERSSFEKNPIDFLEAKGYKEVKKDLIIKLPKYSLFELENGRKRMLASAGELQKGNELALPSKYVNFLYLASHYEKLKGSPEDNEQKQLFVEQHKHYLDEIIEQISEFSKRVILADANLDKVLSAYNKHRDKPIREQAENIIHLFTLTNLGAPAAFKYFDTTIDRKRYTSTKEVLDATLIHQSITGLYETRIDLSQLGGDGGGGGGGSGGTLNIEDEYRLHETSKGPDVPLGSTWLSDFPQAWAETGGMGLAFRQAPLIISLKATSTPVSIKQYPMSQEARLGIKPHIQRLLDQGILVPCQSPWNTPLLPVKKPGTNDYRPVQDLREVNKRVEDIHPTVPNPYNLLSGLPPSHQWYTVLDLKDAFFCLRLHPTSQSLFAFEWKDPEMGISGQLTWTRLPQGFKNSPTLFNEALHRDLADFRIQHPDLILLQYVDDLLLAATSELDCQQGTRALLQTLGDLGYRASAKKAQICQKQVKYLGYLLKEGQRWLTEARKETVMGQPTPKTPRQLREFLGKAGLCRLFIPGFAEMAAPLYPLTKPGTLFKWGPDQQKAYQEIKQALLTAPALGLPDLTKPFELFVDEKQGYAKGVLTQKLGPWRRPVAYLSKKLDPVAAGWPPCLRMVAAIAVLTKDVGKLTMGQPLVILAPHAVEALVKQPPDRWLSNARMTHYQALLLDTDRVQFGPIVALNPATLLPLPEEGLQHDCLDILAEAHGTRPDLTDQPLPDADHTWYTDGSSFLQEGQRRAGAAVTTETEVIWAKALPAGTSAQRAELIALTQALKMAAGKKLNVYTDSRYAFATAHIHGEIYRRRGWLTSEGKEIKNKDEILALLKALFLPKRLSIIHCPGHQKGNHAEARGNRMADQAAREVATRETPETSTLLAGKRTADGSEFEKRTADGSEFESPKKKAKVE

SEQ ID NO: 2437 - protein, 2096 aa, synthetic construct
MPAAKRVKLDGGDKKYSIGLDIGTNSVGWAVITDEYKVPSKKFKVLGNTDRHSIKKNLIGALLFDSGETAEATRLKRTARRRYTRRKNRICYLQEIFSNEMAKVDDSFFHRLEESFLVEEDKKHERHPIFGNIVDEVAYHEKYPTIYHLRKKLVDSTDKADLRLIYLALAHMIKFRGHFLIEGDLNPDNSDVDKLFIQLVQTYNQLFEENPINASGVDAKAILSARLSKSRRLENLIAQLPGEKKNGLFGNLIALSLGLTPNFKSNFDLAEDAKLQLSKDTYDDDLDNLLAQIGDQYADLFLAAKNLSDAILLSDILRVNTEITKAPLSASMIKRYDEHHQDLTLLKALVRQQLPEKYKEIFFDQSKNGYAGYIDGGASQEEFYKFIKPILEKMDGTEELLVKLNREDLLRKQRTFDNGSIPHQIHLGELHAILRRQEDFYPFLKDNREKIEKILTFRIPYYVGPLARGNSRFAWMTRKSEETITPWNFEEVVDKGASAQSFIERMTNFDKNLPNEKVLPKHSLLYEYFTVYNELTKVKYVTEGMRKPAFLSGEQKKAIVDLLFKTNRKVTVKQLKEDYFKKIECFDSVEISGVEDRFNASLGTYHDLLKIIKDKDFLDNEENEDILEDIVLTLTLFEDREMIEERLKTYAHLFDDKVMKQLKRRRYTGWGRLSRKLINGIRDKQSGKTILDFLKSDGFANRNFMQLIHDDSLTFKEDIQKAQVSGQGDSLHEHIANLAGSPAIKKGILQTVKVVDELVKVMGRHKPENIVIEMARENQTTQKGQKNSRERMKRIEEGIKELGSQILKEHPVENTQLQNEKLYLYYLQNGRDMYVDQELDINRLSDYDVDHIVPQSFLKDDSIDNKVLTRSDKARGKSDNVPSEEVVKKMKNYWRQLLNAKLITQRKFDNLTKAERGGLSELDKAGFIKRQLVETRQITKHVAQILDSRMNTKYDENDKLIREVKVITLKSKLVSDFRKDFQFYKVREINNYHHAHDAYLNAVVGTALIKKYPKLESEFVYGDYKVYDVRKMIAKSEQEIGKATAKYFFYSNIMNFFKTEITLANGEIRKRPLIETNGETGEIVWDKGRDFATVRKVLSMPQVNIVKKTEVQTGGFSKESILPKRNSDKLIARKKDWDPKKYGGFDSPTVAYSVLVVAKVEKGKSKKLKSVKELLGITIMERSSFEKNPIDFLEAKGYKEVKKDLIIKLPKYSLFELENGRKRMLASAGELQKGNELALPSKYVNFLYLASHYEKLKGSPEDNEQKQLFVEQHKHYLDEIIEQISEFSKRVILADANLDKVLSAYNKHRDKPIREQAENIIHLFTLTNLGAPAAFKYFDTTIDRKRYTSTKEVLDATLIHQSITGLYETRIDLSQLGGDGGGSSGGSEAAAKGGTLNIEDEYRLHETSKGPDVPLGSTWLSDFPQAWAETGGMGLAFRQAPLIISLKATSTPVSIKQYPMSQEARLGIKPHIQRLLDQGILVPCQSPWNTPLLPVKKPGTNDYRPVQDLREVNKRVEDIHPTVPNPYNLLSGLPPSHQWYTVLDLKDAFFCLRLHPTSQSLFAFEWKDPEMGISGQLTWTRLPQGFKNSPTLFNEALHRDLADFRIQHPDLILLQYVDDLLLAATSELDCQQGTRALLQTLGDLGYRASAKKAQICQKQVKYLGYLLKEGQRWLTEARKETVMGQPTPKTPRQLREFLGKAGLCRLFIPGFAEMAAPLYPLTKPGTLFKWGPDQQKAYQEIKQALLTAPALGLPDLTKPFELFVDEKQGYAKGVLTQKLGPWRRPVAYLSKKLDPVAAGWPPCLRMVAAIAVLTKDVGKLTMGQPLVILAPHAVEALVKQPPDRWLSNARMTHYQALLLDTDRVQFGPIVALNPATLLPLPEEGLQHDCLDILAEAHGTRPDLTDQPLPDADHTWYTDGSSFLQEGQRRAGAAVTTETEVIWAKALPAGTSAQRAELIALTQALKMAAGKKLNVYTDSRYAFATAHIHGEIYRRRGWLTSEGKEIKNKDEILALLKALFLPKRLSIIHCPGHQKGNHAEARGNRMADQAAREVATRETPETSTLLAGKRTADGSEFEKRTADGSEFESPKKKAKVE

SEQ ID NO: 2438 - protein, 2094 aa, synthetic construct
MPAAKRVKLDGGDKKYSIGLDIGTNSVGWAVITDEYKVPSKKFKVLGNTDRHSIKKNLIGALLFDSGETAEATRLKRTARRRYTRRKNRICYLQEIFSNEMAKVDDSFFHRLEESFLVEEDKKHERHPIFGNIVDEVAYHEKYPTIYHLRKKLVDSTDKADLRLIYLALAHMIKFRGHFLIEGDLNPDNSDVDKLFIQLVQTYNQLFEENPINASGVDAKAILSARLSKSRRLENLIAQLPGEKKNGLFGNLIALSLGLTPNFKSNFDLAEDAKLQLSKDTYDDDLDNLLAQIGDQYADLFLAAKNLSDAILLSDILRVNTEITKAPLSASMIKRYDEHHQDLTLLKALVRQQLPEKYKEIFFDQSKNGYAGYIDGGASQEEFYKFIKPILEKMDGTEELLVKLNREDLLRKQRTFDNGSIPHQIHLGELHAILRRQEDFYPFLKDNREKIEKILTFRIPYYVGPLARGNSRFAWMTRKSEETITPWNFEEVVDKGASAQSFIERMTNFDKNLPNEKVLPKHSLLYEYFTVYNELTKVKYVTEGMRKPAFLSGEQKKAIVDLLFKTNRKVTVKQLKEDYFKKIECFDSVEISGVEDRFNASLGTYHDLLKIIKDKDFLDNEENEDILEDIVLTLTLFEDREMIEERLKTYAHLFDDKVMKQLKRRRYTGWGRLSRKLINGIRDKQSGKTILDFLKSDGFANRNFMQLIHDDSLTFKEDIQKAQVSGQGDSLHEHIANLAGSPAIKKGILQTVKVVDELVKVMGRHKPENIVIEMARENQTTQKGQKNSRERMKRIEEGIKELGSQILKEHPVENTQLQNEKLYLYYLQNGRDMYVDQELDINRLSDYDVDHIVPQSFLKDDSIDNKVLTRSDKARGKSDNVPSEEVVKKMKNYWRQLLNAKLITQRKFDNLTKAERGGLSELDKAGFIKRQLVETRQITKHVAQILDSRMNTKYDENDKLIREVKVITLKSKLVSDFRKDFQFYKVREINNYHHAHDAYLNAVVGTALIKKYPKLESEFVYGDYKVYDVRKMIAKSEQEIGKATAKYFFYSNIMNFFKTEITLANGEIRKRPLIETNGETGEIVWDKGRDFATVRKVLSMPQVNIVKKTEVQTGGFSKESILPKRNSDKLIARKKDWDPKKYGGFDSPTVAYSVLVVAKVEKGKSKKLKSVKELLGITIMERSSFEKNPIDFLEAKGYKEVKKDLIIKLPKYSLFELENGRKRMLASAGELQKGNELALPSKYVNFLYLASHYEKLKGSPEDNEQKQLFVEQHKHYLDEIIEQISEFSKRVILADANLDKVLSAYNKHRDKPIREQAENIIHLFTLTNLGAPAAFKYFDTTIDRKRYTSTKEVLDATLIHQSITGLYETRIDLSQLGGDGGGSSGGGGGSGGTLNIEDEYRLHETSKGPDVPLGSTWLSDFPQAWAETGGMGLAFRQAPLIISLKATSTPVSIKQYPMSQEARLGIKPHIQRLLDQGILVPCQSPWNTPLLPVKKPGTNDYRPVQDLREVNKRVEDIHPTVPNPYNLLSGLPPSHQWYTVLDLKDAFFCLRLHPTSQSLFAFEWKDPEMGISGQLTWTRLPQGFKNSPTLFNEALHRDLADFRIQHPDLILLQYVDDLLLAATSELDCQQGTRALLQTLGDLGYRASAKKAQICQKQVKYLGYLLKEGQRWLTEARKETVMGQPTPKTPRQLREFLGKAGLCRLFIPGFAEMAAPLYPLTKPGTLFKWGPDQQKAYQEIKQALLTAPALGLPDLTKPFELFVDEKQGYAKGVLTQKLGPWRRPVAYLSKKLDPVAAGWPPCLRMVAAIAVLTKDVGKLTMGQPLVILAPHAVEALVKQPPDRWLSNARMTHYQALLLDTDRVQFGPIVALNPATLLPLPEEGLQHDCLDILAEAHGTRPDLTDQPLPDADHTWYTDGSSFLQEGQRRAGAAVTTETEVIWAKALPAGTSAQRAELIALTQALKMAAGKKLNVYTDSRYAFATAHIHGEIYRRRGWLTSEGKEIKNKDEILALLKALFLPKRLSIIHCPGHQKGNHAEARGNRMADQAAREVATRETPETSTLLAGKRTADGSEFEKRTADGSEFESPKKKAKVE

SEQ ID NO: 2439 - protein, 2091 aa, synthetic construct
MPAAKRVKLDGGDKKYSIGLDIGTNSVGWAVITDEYKVPSKKFKVLGNTDRHSIKKNLIGALLFDSGETAEATRLKRTARRRYTRRKNRICYLQEIFSNEMAKVDDSFFHRLEESFLVEEDKKHERHPIFGNIVDEVAYHEKYPTIYHLRKKLVDSTDKADLRLIYLALAHMIKFRGHFLIEGDLNPDNSDVDKLFIQLVQTYNQLFEENPINASGVDAKAILSARLSKSRRLENLIAQLPGEKKNGLFGNLIALSLGLTPNFKSNFDLAEDAKLQLSKDTYDDDLDNLLAQIGDQYADLFLAAKNLSDAILLSDILRVNTEITKAPLSASMIKRYDEHHQDLTLLKALVRQQLPEKYKEIFFDQSKNGYAGYIDGGASQEEFYKFIKPILEKMDGTEELLVKLNREDLLRKQRTFDNGSIPHQIHLGELHAILRRQEDFYPFLKDNREKIEKILTFRIPYYVGPLARGNSRFAWMTRKSEETITPWNFEEVVDKGASAQSFIERMTNFDKNLPNEKVLPKHSLLYEYFTVYNELTKVKYVTEGMRKPAFLSGEQKKAIVDLLFKTNRKVTVKQLKEDYFKKIECFDSVEISGVEDRFNASLGTYHDLLKIIKDKDFLDNEENEDILEDIVLTLTLFEDREMIEERLKTYAHLFDDKVMKQLKRRRYTGWGRLSRKLINGIRDKQSGKTILDFLKSDGFANRNFMQLIHDDSLTFKEDIQKAQVSGQGDSLHEHIANLAGSPAIKKGILQTVKVVDELVKVMGRHKPENIVIEMARENQTTQKGQKNSRERMKRIEEGIKELGSQILKEHPVENTQLQNEKLYLYYLQNGRDMYVDQELDINRLSDYDVDHIVPQSFLKDDSIDNKVLTRSDKARGKSDNVPSEEVVKKMKNYWRQLLNAKLITQRKFDNLTKAERGGLSELDKAGFIKRQLVETRQITKHVAQILDSRMNTKYDENDKLIREVKVITLKSKLVSDFRKDFQFYKVREINNYHHAHDAYLNAVVGTALIKKYPKLESEFVYGDYKVYDVRKMIAKSEQEIGKATAKYFFYSNIMNFFKTEITLANGEIRKRPLIETNGETGEIVWDKGRDFATVRKVLSMPQVNIVKKTEVQTGGFSKESILPKRNSDKLIARKKDWDPKKYGGFDSPTVAYSVLVVAKVEKGKSKKLKSVKELLGITIMERSSFEKNPIDFLEAKGYKEVKKDLIIKLPKYSLFELENGRKRMLASAGELQKGNELALPSKYVNFLYLASHYEKLKGSPEDNEQKQLFVEQHKHYLDEIIEQISEFSKRVILADANLDKVLSAYNKHRDKPIREQAENIIHLFTLTNLGAPAAFKYFDTTIDRKRYTSTKEVLDATLIHQSITGLYETRIDLSQLGGDGGGGSGSSGGTLNIEDEYRLHETSKGPDVPLGSTWLSDFPQAWAETGGMGLAFRQAPLIISLKATSTPVSIKQYPMSQEARLGIKPHIQRLLDQGILVPCQSPWNTPLLPVKKPGTNDYRPVQDLREVNKRVEDIHPTVPNPYNLLSGLPPSHQWYTVLDLKDAFFCLRLHPTSQSLFAFEWKDPEMGISGQLTWTRLPQGFKNSPTLFNEALHRDLADFRIQHPDLILLQYVDDLLLAATSELDCQQGTRALLQTLGDLGYRASAKKAQICQKQVKYLGYLLKEGQRWLTEARKETVMGQPTPKTPRQLREFLGKAGLCRLFIPGFAEMAAPLYPLTKPGTLFKWGPDQQKAYQEIKQALLTAPALGLPDLTKPFELFVDEKQGYAKGVLTQKLGPWRRPVAYLSKKLDPVAAGWPPCLRMVAAIAVLTKDVGKLTMGQPLVILAPHAVEALVKQPPDRWLSNARMTHYQALLLDTDRVQFGPIVALNPATLLPLPEEGLQHDCLDILAEAHGTRPDLTDQPLPDADHTWYTDGSSFLQEGQRRAGAAVTTETEVIWAKALPAGTSAQRAELIALTQALKMAAGKKLNVYTDSRYAFATAHIHGEIYRRRGWLTSEGKEIKNKDEILALLKALFLPKRLSIIHCPGHQKGNHAEARGNRMADQAAREVATRETPETSTLLAGKRTADGSEFEKRTADGSEFESPKKKAKVE

SEQ ID NO: 2440 - protein, 2096 aa, synthetic construct
MPAAKRVKLDGGDKKYSIGLDIGTNSVGWAVITDEYKVPSKKFKVLGNTDRHSIKKNLIGALLFDSGETAEATRLKRTARRRYTRRKNRICYLQEIFSNEMAKVDDSFFHRLEESFLVEEDKKHERHPIFGNIVDEVAYHEKYPTIYHLRKKLVDSTDKADLRLIYLALAHMIKFRGHFLIEGDLNPDNSDVDKLFIQLVQTYNQLFEENPINASGVDAKAILSARLSKSRRLENLIAQLPGEKKNGLFGNLIALSLGLTPNFKSNFDLAEDAKLQLSKDTYDDDLDNLLAQIGDQYADLFLAAKNLSDAILLSDILRVNTEITKAPLSASMIKRYDEHHQDLTLLKALVRQQLPEKYKEIFFDQSKNGYAGYIDGGASQEEFYKFIKPILEKMDGTEELLVKLNREDLLRKQRTFDNGSIPHQIHLGELHAILRRQEDFYPFLKDNREKIEKILTFRIPYYVGPLARGNSRFAWMTRKSEETITPWNFEEVVDKGASAQSFIERMTNFDKNLPNEKVLPKHSLLYEYFTVYNELTKVKYVTEGMRKPAFLSGEQKKAIVDLLFKTNRKVTVKQLKEDYFKKIECFDSVEISGVEDRFNASLGTYHDLLKIIKDKDFLDNEENEDILEDIVLTLTLFEDREMIEERLKTYAHLFDDKVMKQLKRRRYTGWGRLSRKLINGIRDKQSGKTILDFLKSDGFANRNFMQLIHDDSLTFKEDIQKAQVSGQGDSLHEHIANLAGSPAIKKGILQTVKVVDELVKVMGRHKPENIVIEMARENQTTQKGQKNSRERMKRIEEGIKELGSQILKEHPVENTQLQNEKLYLYYLQNGRDMYVDQELDINRLSDYDVDHIVPQSFLKDDSIDNKVLTRSDKARGKSDNVPSEEVVKKMKNYWRQLLNAKLITQRKFDNLTKAERGGLSELDKAGFIKRQLVETRQITKHVAQILDSRMNTKYDENDKLIREVKVITLKSKLVSDFRKDFQFYKVREINNYHHAHDAYLNAVVGTALIKKYPKLESEFVYGDYKVYDVRKMIAKSEQEIGKATAKYFFYSNIMNFFKTEITLANGEIRKRPLIETNGETGEIVWDKGRDFATVRKVLSMPQVNIVKKTEVQTGGFSKESILPKRNSDKLIARKKDWDPKKYGGFDSPTVAYSVLVVAKVEKGKSKKLKSVKELLGITIMERSSFEKNPIDFLEAKGYKEVKKDLIIKLPKYSLFELENGRKRMLASAGELQKGNELALPSKYVNFLYLASHYEKLKGSPEDNEQKQLFVEQHKHYLDEIIEQISEFSKRVILADANLDKVLSAYNKHRDKPIREQAENIIHLFTLTNLGAPAAFKYFDTTIDRKRYTSTKEVLDATLIHQSITGLYETRIDLSQLGGDGGPAPGGGEAAAKGGTLNIEDEYRLHETSKGPDVPLGSTWLSDFPQAWAETGGMGLAVRQAPLIIPLKATSTPVSIKQYPMSQEARLGIKPHIQRLLDQGILVPCQSPWNTPLLPVKKPGTNDYRPVQDLREVNKRVEDIHPTVPNPYNLLSGLPPSHQWYTVLDLKDAFFCLRLHPTSQSLFAFEWRDPEMGISGQLTWTRLPQGFKNSPTLFNEALHRDLADFRIQHPDLILLQYVDDLLLAATSELDCQQGTRALLQTLGDLGYRASAKKAQICQKQVKYLGYLLKEGQRWLTEARKETVMGQPTPKTPRQLREFLGTAGFCRLWIPGFAEMAAPLYPLTKPGTLFEWGPDQQKAYQEIKQALLTAPALGLPDLTKPFELFVDEKQGYAKGVLTQKLGPWRRPVAYLSKKLDPVAAGWPPCLRMVAAIAVLTKDAGKLTMGQPLVILAPHAVEALVKQPPDRWLSNARMTHYQALLLDTDRVQFGPIVALNPATLLPLPEEGLQHDCLDILAEAHGTRPDLTDQPLPDADHTWYTDGSSFLQEGQRKAGAAVTTETEVVWAKALPAGTSAQRAELIALTQALKMAEGKKLNVYTDSRYAFATAHIHGEIYRRRGWLTSEGKEIKNKDEILALLKALFLPKRLSIIHCPGHQKGNRAEARGNRMADQAAREVATRETPETSTLLAGKRTADGSEFEKRTADGSEFESPKKKAKVE

SEQ ID NO: 2441 - protein, 2110 aa, synthetic construct
MPAAKRVKLDGGDKKYSIGLDIGTNSVGWAVITDEYKVPSKKFKVLGNTDRHSIKKNLIGALLFDSGETAEATRLKRTARRRYTRRKNRICYLQEIFSNEMAKVDDSFFHRLEESFLVEEDKKHERHPIFGNIVDEVAYHEKYPTIYHLRKKLVDSTDKADLRLIYLALAHMIKFRGHFLIEGDLNPDNSDVDKLFIQLVQTYNQLFEENPINASGVDAKAILSARLSKSRRLENLIAQLPGEKKNGLFGNLIALSLGLTPNFKSNFDLAEDAKLQLSKDTYDDDLDNLLAQIGDQYADLFLAAKNLSDAILLSDILRVNTEITKAPLSASMIKRYDEHHQDLTLLKALVRQQLPEKYKEIFFDQSKNGYAGYIDGGASQEEFYKFIKPILEKMDGTEELLVKLNREDLLRKQRTFDNGSIPHQIHLGELHAILRRQEDFYPFLKDNREKIEKILTFRIPYYVGPLARGNSRFAWMTRKSEETITPWNFEEVVDKGASAQSFIERMTNFDKNLPNEKVLPKHSLLYEYFTVYNELTKVKYVTEGMRKPAFLSGEQKKAIVDLLFKTNRKVTVKQLKEDYFKKIECFDSVEISGVEDRFNASLGTYHDLLKIIKDKDFLDNEENEDILEDIVLTLTLFEDREMIEERLKTYAHLFDDKVMKQLKRRRYTGWGRLSRKLINGIRDKQSGKTILDFLKSDGFANRNFMQLIHDDSLTFKEDIQKAQVSGQGDSLHEHIANLAGSPAIKKGILQTVKVVDELVKVMGRHKPENIVIEMARENQTTQKGQKNSRERMKRIEEGIKELGSQILKEHPVENTQLQNEKLYLYYLQNGRDMYVDQELDINRLSDYDVDHIVPQSFLKDDSIDNKVLTRSDKARGKSDNVPSEEVVKKMKNYWRQLLNAKLITQRKFDNLTKAERGGLSELDKAGFIKRQLVETRQITKHVAQILDSRMNTKYDENDKLIREVKVITLKSKLVSDFRKDFQFYKVREINNYHHAHDAYLNAVVGTALIKKYPKLESEFVYGDYKVYDVRKMIAKSEQEIGKATAKYFFYSNIMNFFKTEITLANGEIRKRPLIETNGETGEIVWDKGRDFATVRKVLSMPQVNIVKKTEVQTGGFSKESILPKRNSDKLIARKKDWDPKKYGGFDSPTVAYSVLVVAKVEKGKSKKLKSVKELLGITIMERSSFEKNPIDFLEAKGYKEVKKDLIIKLPKYSLFELENGRKRMLASAGELQKGNELALPSKYVNFLYLASHYEKLKGSPEDNEQKQLFVEQHKHYLDEIIEQISEFSKRVILADANLDKVLSAYNKHRDKPIREQAENIIHLFTLTNLGAPAAFKYFDTTIDRKRYTSTKEVLDATLIHQSITGLYETRIDLSQLGGDGGGGGGSGGGGSGGGGSGGGGSGGGGSGGTLNIEDEYRLHETSKGPDVPLGSTWLSDFPQAWAETGGMGLAVRQAPLIIPLKATSTPVSIKQYPMSQEARLGIKPHIQRLLDQGILVPCQSPWNTPLLPVKKPGTNDYRPVQDLREVNKRVEDIHPTVPNPYNLLSGLPPSHQWYTVLDLKDAFFCLRLHPTSQSLFAFEWRDPEMGISGQLTWTRLPQGFKNSPTLFNEALHRDLADFRIQHPDLILLQYVDDLLLAATSELDCQQGTRALLQTLGDLGYRASAKKAQICQKQVKYLGYLLKEGQRWLTEARKETVMGQPTPKTPRQLREFLGTAGFCRLWIPGFAEMAAPLYPLTKPGTLFEWGPDQQKAYQEIKQALLTAPALGLPDLTKPFELFVDEKQGYAKGVLTQKLGPWRRPVAYLSKKLDPVAAGWPPCLRMVAAIAVLTKDAGKLTMGQPLVILAPHAVEALVKQPPDRWLSNARMTHYQALLLDTDRVQFGPIVALNPATLLPLPEEGLQHDCLDILAEAHGTRPDLTDQPLPDADHTWYTDGSSFLQEGQRKAGAAVTTETEVVWAKALPAGTSAQRAELIALTQALKMAEGKKLNVYTDSRYAFATAHIHGEIYRRRGWLTSEGKEIKNKDEILALLKALFLPKRLSIIHCPGHQKGNRAEARGNRMADQAAREVATRETPETSTLLAGKRTADGSEFEKRTADGSEFESPKKKAKVE

SEQ ID NO: 2442 - protein, 2088 aa, synthetic construct
MPAAKRVKLDGGDKKYSIGLDIGTNSVGWAVITDEYKVPSKKFKVLGNTDRHSIKKNLIGALLFDSGETAEATRLKRTARRRYTRRKNRICYLQEIFSNEMAKVDDSFFHRLEESFLVEEDKKHERHPIFGNIVDEVAYHEKYPTIYHLRKKLVDSTDKADLRLIYLALAHMIKFRGHFLIEGDLNPDNSDVDKLFIQLVQTYNQLFEENPINASGVDAKAILSARLSKSRRLENLIAQLPGEKKNGLFGNLIALSLGLTPNFKSNFDLAEDAKLQLSKDTYDDDLDNLLAQIGDQYADLFLAAKNLSDAILLSDILRVNTEITKAPLSASMIKRYDEHHQDLTLLKALVRQQLPEKYKEIFFDQSKNGYAGYIDGGASQEEFYKFIKPILEKMDGTEELLVKLNREDLLRKQRTFDNGSIPHQIHLGELHAILRRQEDFYPFLKDNREKIEKILTFRIPYYVGPLARGNSRFAWMTRKSEETITPWNFEEVVDKGASAQSFIERMTNFDKNLPNEKVLPKHSLLYEYFTVYNELTKVKYVTEGMRKPAFLSGEQKKAIVDLLFKTNRKVTVKQLKEDYFKKIECFDSVEISGVEDRFNASLGTYHDLLKIIKDKDFLDNEENEDILEDIVLTLTLFEDREMIEERLKTYAHLFDDKVMKQLKRRRYTGWGRLSRKLINGIRDKQSGKTILDFLKSDGFANRNFMQLIHDDSLTFKEDIQKAQVSGQGDSLHEHIANLAGSPAIKKGILQTVKVVDELVKVMGRHKPENIVIEMARENQTTQKGQKNSRERMKRIEEGIKELGSQILKEHPVENTQLQNEKLYLYYLQNGRDMYVDQELDINRLSDYDVDHIVPQSFLKDDSIDNKVLTRSDKARGKSDNVPSEEVVKKMKNYWRQLLNAKLITQRKFDNLTKAERGGLSELDKAGFIKRQLVETRQITKHVAQILDSRMNTKYDENDKLIREVKVITLKSKLVSDFRKDFQFYKVREINNYHHAHDAYLNAVVGTALIKKYPKLESEFVYGDYKVYDVRKMIAKSEQEIGKATAKYFFYSNIMNFFKTEITLANGEIRKRPLIETNGETGEIVWDKGRDFATVRKVLSMPQVNIVKKTEVQTGGFSKESILPKRNSDKLIARKKDWDPKKYGGFDSPTVAYSVLVVAKVEKGKSKKLKSVKELLGITIMERSSFEKNPIDFLEAKGYKEVKKDLIIKLPKYSLFELENGRKRMLASAGELQKGNELALPSKYVNFLYLASHYEKLKGSPEDNEQKQLFVEQHKHYLDEIIEQISEFSKRVILADANLDKVLSAYNKHRDKPIREQAENIIHLFTLTNLGAPAAFKYFDTTIDRKRYTSTKEVLDATLIHQSITGLYETRIDLSQLGGDGGPAPGGTLNIEDEYRLHETSKGPDVPLGSTWLSDFPQAWAETGGMGLAVRQAPLIIPLKATSTPVSIKQYPMSQEARLGIKPHIQRLLDQGILVPCQSPWNTPLLPVKKPGTNDYRPVQDLREVNKRVEDIHPTVPNPYNLLSGLPPSHQWYTVLDLKDAFFCLRLHPTSQSLFAFEWRDPEMGISGQLTWTRLPQGFKNSPTLFNEALHRDLADFRIQHPDLILLQYVDDLLLAATSELDCQQGTRALLQTLGDLGYRASAKKAQICQKQVKYLGYLLKEGQRWLTEARKETVMGQPTPKTPRQLREFLGTAGFCRLWIPGFAEMAAPLYPLTKPGTLFEWGPDQQKAYQEIKQALLTAPALGLPDLTKPFELFVDEKQGYAKGVLTQKLGPWRRPVAYLSKKLDPVAAGWPPCLRMVAAIAVLTKDAGKLTMGQPLVILAPHAVEALVKQPPDRWLSNARMTHYQALLLDTDRVQFGPIVALNPATLLPLPEEGLQHDCLDILAEAHGTRPDLTDQPLPDADHTWYTDGSSFLQEGQRKAGAAVTTETEVVWAKALPAGTSAQRAELIALTQALKMAEGKKLNVYTDSRYAFATAHIHGEIYRRRGWLTSEGKEIKNKDEILALLKALFLPKRLSIIHCPGHQKGNRAEARGNRMADQAAREVATRETPETSTLLAGKRTADGSEFEKRTADGSEFESPKKKAKVE

SEQ ID NO: 2443 - protein, 2100 aa, synthetic construct
MPAAKRVKLDGGDKKYSIGLDIGTNSVGWAVITDEYKVPSKKFKVLGNTDRHSIKKNLIGALLFDSGETAEATRLKRTARRRYTRRKNRICYLQEIFSNEMAKVDDSFFHRLEESFLVEEDKKHERHPIFGNIVDEVAYHEKYPTIYHLRKKLVDSTDKADLRLIYLALAHMIKFRGHFLIEGDLNPDNSDVDKLFIQLVQTYNQLFEENPINASGVDAKAILSARLSKSRRLENLIAQLPGEKKNGLFGNLIALSLGLTPNFKSNFDLAEDAKLQLSKDTYDDDLDNLLAQIGDQYADLFLAAKNLSDAILLSDILRVNTEITKAPLSASMIKRYDEHHQDLTLLKALVRQQLPEKYKEIFFDQSKNGYAGYIDGGASQEEFYKFIKPILEKMDGTEELLVKLNREDLLRKQRTFDNGSIPHQIHLGELHAILRRQEDFYPFLKDNREKIEKILTFRIPYYVGPLARGNSRFAWMTRKSEETITPWNFEEVVDKGASAQSFIERMTNFDKNLPNEKVLPKHSLLYEYFTVYNELTKVKYVTEGMRKPAFLSGEQKKAIVDLLFKTNRKVTVKQLKEDYFKKIECFDSVEISGVEDRFNASLGTYHDLLKIIKDKDFLDNEENEDILEDIVLTLTLFEDREMIEERLKTYAHLFDDKVMKQLKRRRYTGWGRLSRKLINGIRDKQSGKTILDFLKSDGFANRNFMQLIHDDSLTFKEDIQKAQVSGQGDSLHEHIANLAGSPAIKKGILQTVKVVDELVKVMGRHKPENIVIEMARENQTTQKGQKNSRERMKRIEEGIKELGSQILKEHPVENTQLQNEKLYLYYLQNGRDMYVDQELDINRLSDYDVDHIVPQSFLKDDSIDNKVLTRSDKARGKSDNVPSEEVVKKMKNYWRQLLNAKLITQRKFDNLTKAERGGLSELDKAGFIKRQLVETRQITKHVAQILDSRMNTKYDENDKLIREVKVITLKSKLVSDFRKDFQFYKVREINNYHHAHDAYLNAVVGTALIKKYPKLESEFVYGDYKVYDVRKMIAKSEQEIGKATAKYFFYSNIMNFFKTEITLANGEIRKRPLIETNGETGEIVWDKGRDFATVRKVLSMPQVNIVKKTEVQTGGFSKESILPKRNSDKLIARKKDWDPKKYGGFDSPTVAYSVLVVAKVEKGKSKKLKSVKELLGITIMERSSFEKNPIDFLEAKGYKEVKKDLIIKLPKYSLFELENGRKRMLASAGELQKGNELALPSKYVNFLYLASHYEKLKGSPEDNEQKQLFVEQHKHYLDEIIEQISEFSKRVILADANLDKVLSAYNKHRDKPIREQAENIIHLFTLTNLGAPAAFKYFDTTIDRKRYTSTKEVLDATLIHQSITGLYETRIDLSQLGGDGGGSSGSSGSSGSSGSSGGTLNIEDEYRLHETSKGPDVPLGSTWLSDFPQAWAETGGMGLAVRQAPLIIPLKATSTPVSIKQYPMSQEARLGIKPHIQRLLDQGILVPCQSPWNTPLLPVKKPGTNDYRPVQDLREVNKRVEDIHPTVPNPYNLLSGLPPSHQWYTVLDLKDAFFCLRLHPTSQSLFAFEWRDPEMGISGQLTWTRLPQGFKNSPTLFNEALHRDLADFRIQHPDLILLQYVDDLLLAATSELDCQQGTRALLQTLGDLGYRASAKKAQICQKQVKYLGYLLKEGQRWLTEARKETVMGQPTPKTPRQLREFLGTAGFCRLWIPGFAEMAAPLYPLTKPGTLFEWGPDQQKAYQEIKQALLTAPALGLPDLTKPFELFVDEKQGYAKGVLTQKLGPWRRPVAYLSKKLDPVAAGWPPCLRMVAAIAVLTKDAGKLTMGQPLVILAPHAVEALVKQPPDRWLSNARMTHYQALLLDTDRVQFGPIVALNPATLLPLPEEGLQHDCLDILAEAHGTRPDLTDQPLPDADHTWYTDGSSFLQEGQRKAGAAVTTETEVVWAKALPAGTSAQRAELIALTQALKMAEGKKLNVYTDSRYAFATAHIHGEIYRRRGWLTSEGKEIKNKDEILALLKALFLPKRLSIIHCPGHQKGNRAEARGNRMADQAAREVATRETPETSTLLAGKRTADGSEFEKRTADGSEFESPKKKAKVE

SEQ ID NO: 2444 - protein, 2096 aa, synthetic construct
MPAAKRVKLDGGDKKYSIGLDIGTNSVGWAVITDEYKVPSKKFKVLGNTDRHSIKKNLIGALLFDSGETAEATRLKRTARRRYTRRKNRICYLQEIFSNEMAKVDDSFFHRLEESFLVEEDKKHERHPIFGNIVDEVAYHEKYPTIYHLRKKLVDSTDKADLRLIYLALAHMIKFRGHFLIEGDLNPDNSDVDKLFIQLVQTYNQLFEENPINASGVDAKAILSARLSKSRRLENLIAQLPGEKKNGLFGNLIALSLGLTPNFKSNFDLAEDAKLQLSKDTYDDDLDNLLAQIGDQYADLFLAAKNLSDAILLSDILRVNTEITKAPLSASMIKRYDEHHQDLTLLKALVRQQLPEKYKEIFFDQSKNGYAGYIDGGASQEEFYKFIKPILEKMDGTEELLVKLNREDLLRKQRTFDNGSIPHQIHLGELHAILRRQEDFYPFLKDNREKIEKILTFRIPYYVGPLARGNSRFAWMTRKSEETITPWNFEEVVDKGASAQSFIERMTNFDKNLPNEKVLPKHSLLYEYFTVYNELTKVKYVTEGMRKPAFLSGEQKKAIVDLLFKTNRKVTVKQLKEDYFKKIECFDSVEISGVEDRFNASLGTYHDLLKIIKDKDFLDNEENEDILEDIVLTLTLFEDREMIEERLKTYAHLFDDKVMKQLKRRRYTGWGRLSRKLINGIRDKQSGKTILDFLKSDGFANRNFMQLIHDDSLTFKEDIQKAQVSGQGDSLHEHIANLAGSPAIKKGILQTVKVVDELVKVMGRHKPENIVIEMARENQTTQKGQKNSRERMKRIEEGIKELGSQILKEHPVENTQLQNEKLYLYYLQNGRDMYVDQELDINRLSDYDVDHIVPQSFLKDDSIDNKVLTRSDKARGKSDNVPSEEVVKKMKNYWRQLLNAKLITQRKFDNLTKAERGGLSELDKAGFIKRQLVETRQITKHVAQILDSRMNTKYDENDKLIREVKVITLKSKLVSDFRKDFQFYKVREINNYHHAHDAYLNAVVGTALIKKYPKLESEFVYGDYKVYDVRKMIAKSEQEIGKATAKYFFYSNIMNFFKTEITLANGEIRKRPLIETNGETGEIVWDKGRDFATVRKVLSMPQVNIVKKTEVQTGGFSKESILPKRNSDKLIARKKDWDPKKYGGFDSPTVAYSVLVVAKVEKGKSKKLKSVKELLGITIMERSSFEKNPIDFLEAKGYKEVKKDLIIKLPKYSLFELENGRKRMLASAGELQKGNELALPSKYVNFLYLASHYEKLKGSPEDNEQKQLFVEQHKHYLDEIIEQISEFSKRVILADANLDKVLSAYNKHRDKPIREQAENIIHLFTLTNLGAPAAFKYFDTTIDRKRYTSTKEVLDATLIHQSITGLYETRIDLSQLGGDGGEAAAKGSSGGSGGTLNIEDEYRLHETSKGPDVPLGSTWLSDFPQAWAETGGMGLAVRQAPLIIPLKATSTPVSIKQYPMSQEARLGIKPHIQRLLDQGILVPCQSPWNTPLLPVKKPGTNDYRPVQDLREVNKRVEDIHPTVPNPYNLLSGLPPSHQWYTVLDLKDAFFCLRLHPTSQSLFAFEWRDPEMGISGQLTWTRLPQGFKNSPTLFNEALHRDLADFRIQHPDLILLQYVDDLLLAATSELDCQQGTRALLQTLGDLGYRASAKKAQICQKQVKYLGYLLKEGQRWLTEARKETVMGQPTPKTPRQLREFLGTAGFCRLWIPGFAEMAAPLYPLTKPGTLFEWGPDQQKAYQEIKQALLTAPALGLPDLTKPFELFVDEKQGYAKGVLTQKLGPWRRPVAYLSKKLDPVAAGWPPCLRMVAAIAVLTKDAGKLTMGQPLVILAPHAVEALVKQPPDRWLSNARMTHYQALLLDTDRVQFGPIVALNPATLLPLPEEGLQHDCLDILAEAHGTRPDLTDQPLPDADHTWYTDGSSFLQEGQRKAGAAVTTETEVVWAKALPAGTSAQRAELIALTQALKMAEGKKLNVYTDSRYAFATAHIHGEIYRRRGWLTSEGKEIKNKDEILALLKALFLPKRLSIIHCPGHQKGNRAEARGNRMADQAAREVATRETPETSTLLAGKRTADGSEFEKRTADGSEFESPKKKAKVE

SEQ ID NO: 2445 - protein, 2091 aa, synthetic construct
MPAAKRVKLDGGDKKYSIGLDIGTNSVGWAVITDEYKVPSKKFKVLGNTDRHSIKKNLIGALLFDSGETAEATRLKRTARRRYTRRKNRICYLQEIFSNEMAKVDDSFFHRLEESFLVEEDKKHERHPIFGNIVDEVAYHEKYPTIYHLRKKLVDSTDKADLRLIYLALAHMIKFRGHFLIEGDLNPDNSDVDKLFIQLVQTYNQLFEENPINASGVDAKAILSARLSKSRRLENLIAQLPGEKKNGLFGNLIALSLGLTPNFKSNFDLAEDAKLQLSKDTYDDDLDNLLAQIGDQYADLFLAAKNLSDAILLSDILRVNTEITKAPLSASMIKRYDEHHQDLTLLKALVRQQLPEKYKEIFFDQSKNGYAGYIDGGASQEEFYKFIKPILEKMDGTEELLVKLNREDLLRKQRTFDNGSIPHQIHLGELHAILRRQEDFYPFLKDNREKIEKILTFRIPYYVGPLARGNSRFAWMTRKSEETITPWNFEEVVDKGASAQSFIERMTNFDKNLPNEKVLPKHSLLYEYFTVYNELTKVKYVTEGMRKPAFLSGEQKKAIVDLLFKTNRKVTVKQLKEDYFKKIECFDSVEISGVEDRFNASLGTYHDLLKIIKDKDFLDNEENEDILEDIVLTLTLFEDREMIEERLKTYAHLFDDKVMKQLKRRRYTGWGRLSRKLINGIRDKQSGKTILDFLKSDGFANRNFMQLIHDDSLTFKEDIQKAQVSGQGDSLHEHIANLAGSPAIKKGILQTVKVVDELVKVMGRHKPENIVIEMARENQTTQKGQKNSRERMKRIEEGIKELGSQILKEHPVENTQLQNEKLYLYYLQNGRDMYVDQELDINRLSDYDVDHIVPQSFLKDDSIDNKVLTRSDKARGKSDNVPSEEVVKKMKNYWRQLLNAKLITQRKFDNLTKAERGGLSELDKAGFIKRQLVETRQITKHVAQILDSRMNTKYDENDKLIREVKVITLKSKLVSDFRKDFQFYKVREINNYHHAHDAYLNAVVGTALIKKYPKLESEFVYGDYKVYDVRKMIAKSEQEIGKATAKYFFYSNIMNFFKTEITLANGEIRKRPLIETNGETGEIVWDKGRDFATVRKVLSMPQVNIVKKTEVQTGGFSKESILPKRNSDKLIARKKDWDPKKYGGFDSPTVAYSVLVVAKVEKGKSKKLKSVKELLGITIMERSSFEKNPIDFLEAKGYKEVKKDLIIKLPKYSLFELENGRKRMLASAGELQKGNELALPSKYVNFLYLASHYEKLKGSPEDNEQKQLFVEQHKHYLDEIIEQISEFSKRVILADANLDKVLSAYNKHRDKPIREQAENIIHLFTLTNLGAPAAFKYFDTTIDRKRYTSTKEVLDATLIHQSITGLYETRIDLSQLGGDGGGGGPAPGGTLNIEDEYRLHETSKGPDVPLGSTWLSDFPQAWAETGGMGLAVRQAPLIIPLKATSTPVSIKQYPMSQEARLGIKPHIQRLLDQGILVPCQSPWNTPLLPVKKPGTNDYRPVQDLREVNKRVEDIHPTVPNPYNLLSGLPPSHQWYTVLDLKDAFFCLRLHPTSQSLFAFEWRDPEMGISGQLTWTRLPQGFKNSPTLFNEALHRDLADFRIQHPDLILLQYVDDLLLAATSELDCQQGTRALLQTLGDLGYRASAKKAQICQKQVKYLGYLLKEGQRWLTEARKETVMGQPTPKTPRQLREFLGTAGFCRLWIPGFAEMAAPLYPLTKPGTLFEWGPDQQKAYQEIKQALLTAPALGLPDLTKPFELFVDEKQGYAKGVLTQKLGPWRRPVAYLSKKLDPVAAGWPPCLRMVAAIAVLTKDAGKLTMGQPLVILAPHAVEALVKQPPDRWLSNARMTHYQALLLDTDRVQFGPIVALNPATLLPLPEEGLQHDCLDILAEAHGTRPDLTDQPLPDADHTWYTDGSSFLQEGQRKAGAAVTTETEVVWAKALPAGTSAQRAELIALTQALKMAEGKKLNVYTDSRYAFATAHIHGEIYRRRGWLTSEGKEIKNKDEILALLKALFLPKRLSIIHCPGHQKGNRAEARGNRMADQAAREVATRETPETSTLLAGKRTADGSEFEKRTADGSEFESPKKKAKVE

SEQ ID NO: 2446 - protein, 2105 aa, synthetic construct
MPAAKRVKLDGGDKKYSIGLDIGTNSVGWAVITDEYKVPSKKFKVLGNTDRHSIKKNLIGALLFDSGETAEATRLKRTARRRYTRRKNRICYLQEIFSNEMAKVDDSFFHRLEESFLVEEDKKHERHPIFGNIVDEVAYHEKYPTIYHLRKKLVDSTDKADLRLIYLALAHMIKFRGHFLIEGDLNPDNSDVDKLFIQLVQTYNQLFEENPINASGVDAKAILSARLSKSRRLENLIAQLPGEKKNGLFGNLIALSLGLTPNFKSNFDLAEDAKLQLSKDTYDDDLDNLLAQIGDQYADLFLAAKNLSDAILLSDILRVNTEITKAPLSASMIKRYDEHHQDLTLLKALVRQQLPEKYKEIFFDQSKNGYAGYIDGGASQEEFYKFIKPILEKMDGTEELLVKLNREDLLRKQRTFDNGSIPHQIHLGELHAILRRQEDFYPFLKDNREKIEKILTFRIPYYVGPLARGNSRFAWMTRKSEETITPWNFEEVVDKGASAQSFIERMTNFDKNLPNEKVLPKHSLLYEYFTVYNELTKVKYVTEGMRKPAFLSGEQKKAIVDLLFKTNRKVTVKQLKEDYFKKIECFDSVEISGVEDRFNASLGTYHDLLKIIKDKDFLDNEENEDILEDIVLTLTLFEDREMIEERLKTYAHLFDDKVMKQLKRRRYTGWGRLSRKLINGIRDKQSGKTILDFLKSDGFANRNFMQLIHDDSLTFKEDIQKAQVSGQGDSLHEHIANLAGSPAIKKGILQTVKVVDELVKVMGRHKPENIVIEMARENQTTQKGQKNSRERMKRIEEGIKELGSQILKEHPVENTQLQNEKLYLYYLQNGRDMYVDQELDINRLSDYDVDHIVPQSFLKDDSIDNKVLTRSDKARGKSDNVPSEEVVKKMKNYWRQLLNAKLITQRKFDNLTKAERGGLSELDKAGFIKRQLVETRQITKHVAQILDSRMNTKYDENDKLIREVKVITLKSKLVSDFRKDFQFYKVREINNYHHAHDAYLNAVVGTALIKKYPKLESEFVYGDYKVYDVRKMIAKSEQEIGKATAKYFFYSNIMNFFKTEITLANGEIRKRPLIETNGETGEIVWDKGRDFATVRKVLSMPQVNIVKKTEVQTGGFSKESILPKRNSDKLIARKKDWDPKKYGGFDSPTVAYSVLVVAKVEKGKSKKLKSVKELLGITIMERSSFEKNPIDFLEAKGYKEVKKDLIIKLPKYSLFELENGRKRMLASAGELQKGNELALPSKYVNFLYLASHYEKLKGSPEDNEQKQLFVEQHKHYLDEIIEQISEFSKRVILADANLDKVLSAYNKHRDKPIREQAENIIHLFTLTNLGAPAAFKYFDTTIDRKRYTSTKEVLDATLIHQSITGLYETRIDLSQLGGDGGEAAAKEAAAKEAAAKEAAAKGGTLNIEDEYRLHETSKGPDVPLGSTWLSDFPQAWAETGGMGLAVRQAPLIIPLKATSTPVSIKQYPMSQEARLGIKPHIQRLLDQGILVPCQSPWNTPLLPVKKPGTNDYRPVQDLREVNKRVEDIHPTVPNPYNLLSGLPPSHQWYTVLDLKDAFFCLRLHPTSQSLFAFEWRDPEMGISGQLTWTRLPQGFKNSPTLFNEALHRDLADFRIQHPDLILLQYVDDLLLAATSELDCQQGTRALLQTLGDLGYRASAKKAQICQKQVKYLGYLLKEGQRWLTEARKETVMGQPTPKTPRQLREFLGTAGFCRLWIPGFAEMAAPLYPLTKPGTLFEWGPDQQKAYQEIKQALLTAPALGLPDLTKPFELFVDEKQGYAKGVLTQKLGPWRRPVAYLSKKLDPVAAGWPPCLRMVAAIAVLTKDAGKLTMGQPLVILAPHAVEALVKQPPDRWLSNARMTHYQALLLDTDRVQFGPIVALNPATLLPLPEEGLQHDCLDILAEAHGTRPDLTDQPLPDADHTWYTDGSSFLQEGQRKAGAAVTTETEVVWAKALPAGTSAQRAELIALTQALKMAEGKKLNVYTDSRYAFATAHIHGEIYRRRGWLTSEGKEIKNKDEILALLKALFLPKRLSIIHCPGHQKGNRAEARGNRMADQAAREVATRETPETSTLLAGKRTADGSEFEKRTADGSEFESPKKKAKVE

SEQ ID NO: 2447 - protein, 2096 aa, synthetic construct
MPAAKRVKLDGGDKKYSIGLDIGTNSVGWAVITDEYKVPSKKFKVLGNTDRHSIKKNLIGALLFDSGETAEATRLKRTARRRYTRRKNRICYLQEIFSNEMAKVDDSFFHRLEESFLVEEDKKHERHPIFGNIVDEVAYHEKYPTIYHLRKKLVDSTDKADLRLIYLALAHMIKFRGHFLIEGDLNPDNSDVDKLFIQLVQTYNQLFEENPINASGVDAKAILSARLSKSRRLENLIAQLPGEKKNGLFGNLIALSLGLTPNFKSNFDLAEDAKLQLSKDTYDDDLDNLLAQIGDQYADLFLAAKNLSDAILLSDILRVNTEITKAPLSASMIKRYDEHHQDLTLLKALVRQQLPEKYKEIFFDQSKNGYAGYIDGGASQEEFYKFIKPILEKMDGTEELLVKLNREDLLRKQRTFDNGSIPHQIHLGELHAILRRQEDFYPFLKDNREKIEKILTFRIPYYVGPLARGNSRFAWMTRKSEETITPWNFEEVVDKGASAQSFIERMTNFDKNLPNEKVLPKHSLLYEYFTVYNELTKVKYVTEGMRKPAFLSGEQKKAIVDLLFKTNRKVTVKQLKEDYFKKIECFDSVEISGVEDRFNASLGTYHDLLKIIKDKDFLDNEENEDILEDIVLTLTLFEDREMIEERLKTYAHLFDDKVMKQLKRRRYTGWGRLSRKLINGIRDKQSGKTILDFLKSDGFANRNFMQLIHDDSLTFKEDIQKAQVSGQGDSLHEHIANLAGSPAIKKGILQTVKVVDELVKVMGRHKPENIVIEMARENQTTQKGQKNSRERMKRIEEGIKELGSQILKEHPVENTQLQNEKLYLYYLQNGRDMYVDQELDINRLSDYDVDHIVPQSFLKDDSIDNKVLTRSDKARGKSDNVPSEEVVKKMKNYWRQLLNAKLITQRKFDNLTKAERGGLSELDKAGFIKRQLVETRQITKHVAQILDSRMNTKYDENDKLIREVKVITLKSKLVSDFRKDFQFYKVREINNYHHAHDAYLNAVVGTALIKKYPKLESEFVYGDYKVYDVRKMIAKSEQEIGKATAKYFFYSNIMNFFKTEITLANGEIRKRPLIETNGETGEIVWDKGRDFATVRKVLSMPQVNIVKKTEVQTGGFSKESILPKRNSDKLIARKKDWDPKKYGGFDSPTVAYSVLVVAKVEKGKSKKLKSVKELLGITIMERSSFEKNPIDFLEAKGYKEVKKDLIIKLPKYSLFELENGRKRMLASAGELQKGNELALPSKYVNFLYLASHYEKLKGSPEDNEQKQLFVEQHKHYLDEIIEQISEFSKRVILADANLDKVLSAYNKHRDKPIREQAENIIHLFTLTNLGAPAAFKYFDTTIDRKRYTSTKEVLDATLIHQSITGLYETRIDLSQLGGDGGGGSPAPEAAAKGGTLNIEDEYRLHETSKGPDVPLGSTWLSDFPQAWAETGGMGLAVRQAPLIIPLKATSTPVSIKQYPMSQEARLGIKPHIQRLLDQGILVPCQSPWNTPLLPVKKPGTNDYRPVQDLREVNKRVEDIHPTVPNPYNLLSGLPPSHQWYTVLDLKDAFFCLRLHPTSQSLFAFEWRDPEMGISGQLTWTRLPQGFKNSPTLFNEALHRDLADFRIQHPDLILLQYVDDLLLAATSELDCQQGTRALLQTLGDLGYRASAKKAQICQKQVKYLGYLLKEGQRWLTEARKETVMGQPTPKTPRQLREFLGTAGFCRLWIPGFAEMAAPLYPLTKPGTLFEWGPDQQKAYQEIKQALLTAPALGLPDLTKPFELFVDEKQGYAKGVLTQKLGPWRRPVAYLSKKLDPVAAGWPPCLRMVAAIAVLTKDAGKLTMGQPLVILAPHAVEALVKQPPDRWLSNARMTHYQALLLDTDRVQFGPIVALNPATLLPLPEEGLQHDCLDILAEAHGTRPDLTDQPLPDADHTWYTDGSSFLQEGQRKAGAAVTTETEVVWAKALPAGTSAQRAELIALTQALKMAEGKKLNVYTDSRYAFATAHIHGEIYRRRGWLTSEGKEIKNKDEILALLKALFLPKRLSIIHCPGHQKGNRAEARGNRMADQAAREVATRETPETSTLLAGKRTADGSEFEKRTADGSEFESPKKKAKVE

SEQ ID NO: 2448 - protein, 2090 aa, synthetic construct
MPAAKRVKLDGGDKKYSIGLDIGTNSVGWAVITDEYKVPSKKFKVLGNTDRHSIKKNLIGALLFDSGETAEATRLKRTARRRYTRRKNRICYLQEIFSNEMAKVDDSFFHRLEESFLVEEDKKHERHPIFGNIVDEVAYHEKYPTIYHLRKKLVDSTDKADLRLIYLALAHMIKFRGHFLIEGDLNPDNSDVDKLFIQLVQTYNQLFEENPINASGVDAKAILSARLSKSRRLENLIAQLPGEKKNGLFGNLIALSLGLTPNFKSNFDLAEDAKLQLSKDTYDDDLDNLLAQIGDQYADLFLAAKNLSDAILLSDILRVNTEITKAPLSASMIKRYDEHHQDLTLLKALVRQQLPEKYKEIFFDQSKNGYAGYIDGGASQEEFYKFIKPILEKMDGTEELLVKLNREDLLRKQRTFDNGSIPHQIHLGELHAILRRQEDFYPFLKDNREKIEKILTFRIPYYVGPLARGNSRFAWMTRKSEETITPWNFEEVVDKGASAQSFIERMTNFDKNLPNEKVLPKHSLLYEYFTVYNELTKVKYVTEGMRKPAFLSGEQKKAIVDLLFKTNRKVTVKQLKEDYFKKIECFDSVEISGVEDRFNASLGTYHDLLKIIKDKDFLDNEENEDILEDIVLTLTLFEDREMIEERLKTYAHLFDDKVMKQLKRRRYTGWGRLSRKLINGIRDKQSGKTILDFLKSDGFANRNFMQLIHDDSLTFKEDIQKAQVSGQGDSLHEHIANLAGSPAIKKGILQTVKVVDELVKVMGRHKPENIVIEMARENQTTQKGQKNSRERMKRIEEGIKELGSQILKEHPVENTQLQNEKLYLYYLQNGRDMYVDQELDINRLSDYDVDHIVPQSFLKDDSIDNKVLTRSDKARGKSDNVPSEEVVKKMKNYWRQLLNAKLITQRKFDNLTKAERGGLSELDKAGFIKRQLVETRQITKHVAQILDSRMNTKYDENDKLIREVKVITLKSKLVSDFRKDFQFYKVREINNYHHAHDAYLNAVVGTALIKKYPKLESEFVYGDYKVYDVRKMIAKSEQEIGKATAKYFFYSNIMNFFKTEITLANGEIRKRPLIETNGETGEIVWDKGRDFATVRKVLSMPQVNIVKKTEVQTGGFSKESILPKRNSDKLIARKKDWDPKKYGGFDSPTVAYSVLVVAKVEKGKSKKLKSVKELLGITIMERSSFEKNPIDFLEAKGYKEVKKDLIIKLPKYSLFELENGRKRMLASAGELQKGNELALPSKYVNFLYLASHYEKLKGSPEDNEQKQLFVEQHKHYLDEIIEQISEFSKRVILADANLDKVLSAYNKHRDKPIREQAENIIHLFTLTNLGAPAAFKYFDTTIDRKRYTSTKEVLDATLIHQSITGLYETRIDLSQLGGDGGPAPAPGGTLNIEDEYRLHETSKGPDVPLGSTWLSDFPQAWAETGGMGLAVRQAPLIIPLKATSTPVSIKQYPMSQEARLGIKPHIQRLLDQGILVPCQSPWNTPLLPVKKPGTNDYRPVQDLREVNKRVEDIHPTVPNPYNLLSGLPPSHQWYTVLDLKDAFFCLRLHPTSQSLFAFEWRDPEMGISGQLTWTRLPQGFKNSPTLFNEALHRDLADFRIQHPDLILLQYVDDLLLAATSELDCQQGTRALLQTLGDLGYRASAKKAQICQKQVKYLGYLLKEGQRWLTEARKETVMGQPTPKTPRQLREFLGTAGFCRLWIPGFAEMAAPLYPLTKPGTLFEWGPDQQKAYQEIKQALLTAPALGLPDLTKPFELFVDEKQGYAKGVLTQKLGPWRRPVAYLSKKLDPVAAGWPPCLRMVAAIAVLTKDAGKLTMGQPLVILAPHAVEALVKQPPDRWLSNARMTHYQALLLDTDRVQFGPIVALNPATLLPLPEEGLQHDCLDILAEAHGTRPDLTDQPLPDADHTWYTDGSSFLQEGQRKAGAAVTTETEVVWAKALPAGTSAQRAELIALTQALKMAEGKKLNVYTDSRYAFATAHIHGEIYRRRGWLTSEGKEIKNKDEILALLKALFLPKRLSIIHCPGHQKGNRAEARGNRMADQAAREVATRETPETSTLLAGKRTADGSEFEKRTADGSEFESPKKKAKVE

SEQ ID NO: 2449 - protein, 2098 aa, synthetic construct
MPAAKRVKLDGGDKKYSIGLDIGTNSVGWAVITDEYKVPSKKFKVLGNTDRHSIKKNLIGALLFDSGETAEATRLKRTARRRYTRRKNRICYLQEIFSNEMAKVDDSFFHRLEESFLVEEDKKHERHPIFGNIVDEVAYHEKYPTIYHLRKKLVDSTDKADLRLIYLALAHMIKFRGHFLIEGDLNPDNSDVDKLFIQLVQTYNQLFEENPINASGVDAKAILSARLSKSRRLENLIAQLPGEKKNGLFGNLIALSLGLTPNFKSNFDLAEDAKLQLSKDTYDDDLDNLLAQIGDQYADLFLAAKNLSDAILLSDILRVNTEITKAPLSASMIKRYDEHHQDLTLLKALVRQQLPEKYKEIFFDQSKNGYAGYIDGGASQEEFYKFIKPILEKMDGTEELLVKLNREDLLRKQRTFDNGSIPHQIHLGELHAILRRQEDFYPFLKDNREKIEKILTFRIPYYVGPLARGNSRFAWMTRKSEETITPWNFEEVVDKGASAQSFIERMTNFDKNLPNEKVLPKHSLLYEYFTVYNELTKVKYVTEGMRKPAFLSGEQKKAIVDLLFKTNRKVTVKQLKEDYFKKIECFDSVEISGVEDRFNASLGTYHDLLKIIKDKDFLDNEENEDILEDIVLTLTLFEDREMIEERLKTYAHLFDDKVMKQLKRRRYTGWGRLSRKLINGIRDKQSGKTILDFLKSDGFANRNFMQLIHDDSLTFKEDIQKAQVSGQGDSLHEHIANLAGSPAIKKGILQTVKVVDELVKVMGRHKPENIVIEMARENQTTQKGQKNSRERMKRIEEGIKELGSQILKEHPVENTQLQNEKLYLYYLQNGRDMYVDQELDINRLSDYDVDHIVPQSFLKDDSIDNKVLTRSDKARGKSDNVPSEEVVKKMKNYWRQLLNAKLITQRKFDNLTKAERGGLSELDKAGFIKRQLVETRQITKHVAQILDSRMNTKYDENDKLIREVKVITLKSKLVSDFRKDFQFYKVREINNYHHAHDAYLNAVVGTALIKKYPKLESEFVYGDYKVYDVRKMIAKSEQEIGKATAKYFFYSNIMNFFKTEITLANGEIRKRPLIETNGETGEIVWDKGRDFATVRKVLSMPQVNIVKKTEVQTGGFSKESILPKRNSDKLIARKKDWDPKKYGGFDSPTVAYSVLVVAKVEKGKSKKLKSVKELLGITIMERSSFEKNPIDFLEAKGYKEVKKDLIIKLPKYSLFELENGRKRMLASAGELQKGNELALPSKYVNFLYLASHYEKLKGSPEDNEQKQLFVEQHKHYLDEIIEQISEFSKRVILADANLDKVLSAYNKHRDKPIREQAENIIHLFTLTNLGAPAAFKYFDTTIDRKRYTSTKEVLDATLIHQSITGLYETRIDLSQLGGDGGPAPAPAPAPAPAPGGTLNIEDEYRLHETSKGPDVPLGSTWLSDFPQAWAETGGMGLAVRQAPLIIPLKATSTPVSIKQYPMSQEARLGIKPHIQRLLDQGILVPCQSPWNTPLLPVKKPGTNDYRPVQDLREVNKRVEDIHPTVPNPYNLLSGLPPSHQWYTVLDLKDAFFCLRLHPTSQSLFAFEWRDPEMGISGQLTWTRLPQGFKNSPTLFNEALHRDLADFRIQHPDLILLQYVDDLLLAATSELDCQQGTRALLQTLGDLGYRASAKKAQICQKQVKYLGYLLKEGQRWLTEARKETVMGQPTPKTPRQLREFLGTAGFCRLWIPGFAEMAAPLYPLTKPGTLFEWGPDQQKAYQEIKQALLTAPALGLPDLTKPFELFVDEKQGYAKGVLTQKLGPWRRPVAYLSKKLDPVAAGWPPCLRMVAAIAVLTKDAGKLTMGQPLVILAPHAVEALVKQPPDRWLSNARMTHYQALLLDTDRVQFGPIVALNPATLLPLPEEGLQHDCLDILAEAHGTRPDLTDQPLPDADHTWYTDGSSFLQEGQRKAGAAVTTETEVVWAKALPAGTSAQRAELIALTQALKMAEGKKLNVYTDSRYAFATAHIHGEIYRRRGWLTSEGKEIKNKDEILALLKALFLPKRLSIIHCPGHQKGNRAEARGNRMADQAAREVATRETPETSTLLAGKRTADGSEFEKRTADGSEFESPKKKAKVE

SEQ ID NO: 2450 - protein, 2092 aa, synthetic construct
MPAAKRVKLDGGDKKYSIGLDIGTNSVGWAVITDEYKVPSKKFKVLGNTDRHSIKKNLIGALLFDSGETAEATRLKRTARRRYTRRKNRICYLQEIFSNEMAKVDDSFFHRLEESFLVEEDKKHERHPIFGNIVDEVAYHEKYPTIYHLRKKLVDSTDKADLRLIYLALAHMIKFRGHFLIEGDLNPDNSDVDKLFIQLVQTYNQLFEENPINASGVDAKAILSARLSKSRRLENLIAQLPGEKKNGLFGNLIALSLGLTPNFKSNFDLAEDAKLQLSKDTYDDDLDNLLAQIGDQYADLFLAAKNLSDAILLSDILRVNTEITKAPLSASMIKRYDEHHQDLTLLKALVRQQLPEKYKEIFFDQSKNGYAGYIDGGASQEEFYKFIKPILEKMDGTEELLVKLNREDLLRKQRTFDNGSIPHQIHLGELHAILRRQEDFYPFLKDNREKIEKILTFRIPYYVGPLARGNSRFAWMTRKSEETITPWNFEEVVDKGASAQSFIERMTNFDKNLPNEKVLPKHSLLYEYFTVYNELTKVKYVTEGMRKPAFLSGEQKKAIVDLLFKTNRKVTVKQLKEDYFKKIECFDSVEISGVEDRFNASLGTYHDLLKIIKDKDFLDNEENEDILEDIVLTLTLFEDREMIEERLKTYAHLFDDKVMKQLKRRRYTGWGRLSRKLINGIRDKQSGKTILDFLKSDGFANRNFMQLIHDDSLTFKEDIQKAQVSGQGDSLHEHIANLAGSPAIKKGILQTVKVVDELVKVMGRHKPENIVIEMARENQTTQKGQKNSRERMKRIEEGIKELGSQILKEHPVENTQLQNEKLYLYYLQNGRDMYVDQELDINRLSDYDVDHIVPQSFLKDDSIDNKVLTRSDKARGKSDNVPSEEVVKKMKNYWRQLLNAKLITQRKFDNLTKAERGGLSELDKAGFIKRQLVETRQITKHVAQILDSRMNTKYDENDKLIREVKVITLKSKLVSDFRKDFQFYKVREINNYHHAHDAYLNAVVGTALIKKYPKLESEFVYGDYKVYDVRKMIAKSEQEIGKATAKYFFYSNIMNFFKTEITLANGEIRKRPLIETNGETGEIVWDKGRDFATVRKVLSMPQVNIVKKTEVQTGGFSKESILPKRNSDKLIARKKDWDPKKYGGFDSPTVAYSVLVVAKVEKGKSKKLKSVKELLGITIMERSSFEKNPIDFLEAKGYKEVKKDLIIKLPKYSLFELENGRKRMLASAGELQKGNELALPSKYVNFLYLASHYEKLKGSPEDNEQKQLFVEQHKHYLDEIIEQISEFSKRVILADANLDKVLSAYNKHRDKPIREQAENIIHLFTLTNLGAPAAFKYFDTTIDRKRYTSTKEVLDATLIHQSITGLYETRIDLSQLGGDGGGGGGGGGGGTLNIEDEYRLHETSKGPDVPLGSTWLSDFPQAWAETGGMGLAVRQAPLIIPLKATSTPVSIKQYPMSQEARLGIKPHIQRLLDQGILVPCQSPWNTPLLPVKKPGTNDYRPVQDLREVNKRVEDIHPTVPNPYNLLSGLPPSHQWYTVLDLKDAFFCLRLHPTSQSLFAFEWRDPEMGISGQLTWTRLPQGFKNSPTLFNEALHRDLADFRIQHPDLILLQYVDDLLLAATSELDCQQGTRALLQTLGDLGYRASAKKAQICQKQVKYLGYLLKEGQRWLTEARKETVMGQPTPKTPRQLREFLGTAGFCRLWIPGFAEMAAPLYPLTKPGTLFEWGPDQQKAYQEIKQALLTAPALGLPDLTKPFELFVDEKQGYAKGVLTQKLGPWRRPVAYLSKKLDPVAAGWPPCLRMVAAIAVLTKDAGKLTMGQPLVILAPHAVEALVKQPPDRWLSNARMTHYQALLLDTDRVQFGPIVALNPATLLPLPEEGLQHDCLDILAEAHGTRPDLTDQPLPDADHTWYTDGSSFLQEGQRKAGAAVTTETEVVWAKALPAGTSAQRAELIALTQALKMAEGKKLNVYTDSRYAFATAHIHGEIYRRRGWLTSEGKEIKNKDEILALLKALFLPKRLSIIHCPGHQKGNRAEARGNRMADQAAREVATRETPETSTLLAGKRTADGSEFEKRTADGSEFESPKKKAKVE

SEQ ID NO: 2451 - protein, 2093 aa, synthetic construct
MPAAKRVKLDGGDKKYSIGLDIGTNSVGWAVITDEYKVPSKKFKVLGNTDRHSIKKNLIGALLFDSGETAEATRLKRTARRRYTRRKNRICYLQEIFSNEMAKVDDSFFHRLEESFLVEEDKKHERHPIFGNIVDEVAYHEKYPTIYHLRKKLVDSTDKADLRLIYLALAHMIKFRGHFLIEGDLNPDNSDVDKLFIQLVQTYNQLFEENPINASGVDAKAILSARLSKSRRLENLIAQLPGEKKNGLFGNLIALSLGLTPNFKSNFDLAEDAKLQLSKDTYDDDLDNLLAQIGDQYADLFLAAKNLSDAILLSDILRVNTEITKAPLSASMIKRYDEHHQDLTLLKALVRQQLPEKYKEIFFDQSKNGYAGYIDGGASQEEFYKFIKPILEKMDGTEELLVKLNREDLLRKQRTFDNGSIPHQIHLGELHAILRRQEDFYPFLKDNREKIEKILTFRIPYYVGPLARGNSRFAWMTRKSEETITPWNFEEVVDKGASAQSFIERMTNFDKNLPNEKVLPKHSLLYEYFTVYNELTKVKYVTEGMRKPAFLSGEQKKAIVDLLFKTNRKVTVKQLKEDYFKKIECFDSVEISGVEDRFNASLGTYHDLLKIIKDKDFLDNEENEDILEDIVLTLTLFEDREMIEERLKTYAHLFDDKVMKQLKRRRYTGWGRLSRKLINGIRDKQSGKTILDFLKSDGFANRNFMQLIHDDSLTFKEDIQKAQVSGQGDSLHEHIANLAGSPAIKKGILQTVKVVDELVKVMGRHKPENIVIEMARENQTTQKGQKNSRERMKRIEEGIKELGSQILKEHPVENTQLQNEKLYLYYLQNGRDMYVDQELDINRLSDYDVDHIVPQSFLKDDSIDNKVLTRSDKARGKSDNVPSEEVVKKMKNYWRQLLNAKLITQRKFDNLTKAERGGLSELDKAGFIKRQLVETRQITKHVAQILDSRMNTKYDENDKLIREVKVITLKSKLVSDFRKDFQFYKVREINNYHHAHDAYLNAVVGTALIKKYPKLESEFVYGDYKVYDVRKMIAKSEQEIGKATAKYFFYSNIMNFFKTEITLANGEIRKRPLIETNGETGEIVWDKGRDFATVRKVLSMPQVNIVKKTEVQTGGFSKESILPKRNSDKLIARKKDWDPKKYGGFDSPTVAYSVLVVAKVEKGKSKKLKSVKELLGITIMERSSFEKNPIDFLEAKGYKEVKKDLIIKLPKYSLFELENGRKRMLASAGELQKGNELALPSKYVNFLYLASHYEKLKGSPEDNEQKQLFVEQHKHYLDEIIEQISEFSKRVILADANLDKVLSAYNKHRDKPIREQAENIIHLFTLTNLGAPAAFKYFDTTIDRKRYTSTKEVLDATLIHQSITGLYETRIDLSQLGGDGGEAAAKGSSGGTLNIEDEYRLHETSKGPDVPLGSTWLSDFPQAWAETGGMGLAVRQAPLIIPLKATSTPVSIKQYPMSQEARLGIKPHIQRLLDQGILVPCQSPWNTPLLPVKKPGTNDYRPVQDLREVNKRVEDIHPTVPNPYNLLSGLPPSHQWYTVLDLKDAFFCLRLHPTSQSLFAFEWRDPEMGISGQLTWTRLPQGFKNSPTLFNEALHRDLADFRIQHPDLILLQYVDDLLLAATSELDCQQGTRALLQTLGDLGYRASAKKAQICQKQVKYLGYLLKEGQRWLTEARKETVMGQPTPKTPRQLREFLGTAGFCRLWIPGFAEMAAPLYPLTKPGTLFEWGPDQQKAYQEIKQALLTAPALGLPDLTKPFELFVDEKQGYAKGVLTQKLGPWRRPVAYLSKKLDPVAAGWPPCLRMVAAIAVLTKDAGKLTMGQPLVILAPHAVEALVKQPPDRWLSNARMTHYQALLLDTDRVQFGPIVALNPATLLPLPEEGLQHDCLDILAEAHGTRPDLTDQPLPDADHTWYTDGSSFLQEGQRKAGAAVTTETEVVWAKALPAGTSAQRAELIALTQALKMAEGKKLNVYTDSRYAFATAHIHGEIYRRRGWLTSEGKEIKNKDEILALLKALFLPKRLSIIHCPGHQKGNRAEARGNRMADQAAREVATRETPETSTLLAGKRTADGSEFEKRTADGSEFESPKKKAKVE

SEQ ID NO: 2452 - protein, 2096 aa, synthetic construct
MPAAKRVKLDGGDKKYSIGLDIGTNSVGWAVITDEYKVPSKKFKVLGNTDRHSIKKNLIGALLFDSGETAEATRLKRTARRRYTRRKNRICYLQEIFSNEMAKVDDSFFHRLEESFLVEEDKKHERHPIFGNIVDEVAYHEKYPTIYHLRKKLVDSTDKADLRLIYLALAHMIKFRGHFLIEGDLNPDNSDVDKLFIQLVQTYNQLFEENPINASGVDAKAILSARLSKSRRLENLIAQLPGEKKNGLFGNLIALSLGLTPNFKSNFDLAEDAKLQLSKDTYDDDLDNLLAQIGDQYADLFLAAKNLSDAILLSDILRVNTEITKAPLSASMIKRYDEHHQDLTLLKALVRQQLPEKYKEIFFDQSKNGYAGYIDGGASQEEFYKFIKPILEKMDGTEELLVKLNREDLLRKQRTFDNGSIPHQIHLGELHAILRRQEDFYPFLKDNREKIEKILTFRIPYYVGPLARGNSRFAWMTRKSEETITPWNFEEVVDKGASAQSFIERMTNFDKNLPNEKVLPKHSLLYEYFTVYNELTKVKYVTEGMRKPAFLSGEQKKAIVDLLFKTNRKVTVKQLKEDYFKKIECFDSVEISGVEDRFNASLGTYHDLLKIIKDKDFLDNEENEDILEDIVLTLTLFEDREMIEERLKTYAHLFDDKVMKQLKRRRYTGWGRLSRKLINGIRDKQSGKTILDFLKSDGFANRNFMQLIHDDSLTFKEDIQKAQVSGQGDSLHEHIANLAGSPAIKKGILQTVKVVDELVKVMGRHKPENIVIEMARENQTTQKGQKNSRERMKRIEEGIKELGSQILKEHPVENTQLQNEKLYLYYLQNGRDMYVDQELDINRLSDYDVDHIVPQSFLKDDSIDNKVLTRSDKARGKSDNVPSEEVVKKMKNYWRQLLNAKLITQRKFDNLTKAERGGLSELDKAGFIKRQLVETRQITKHVAQILDSRMNTKYDENDKLIREVKVITLKSKLVSDFRKDFQFYKVREINNYHHAHDAYLNAVVGTALIKKYPKLESEFVYGDYKVYDVRKMIAKSEQEIGKATAKYFFYSNIMNFFKTEITLANGEIRKRPLIETNGETGEIVWDKGRDFATVRKVLSMPQVNIVKKTEVQTGGFSKESILPKRNSDKLIARKKDWDPKKYGGFDSPTVAYSVLVVAKVEKGKSKKLKSVKELLGITIMERSSFEKNPIDFLEAKGYKEVKKDLIIKLPKYSLFELENGRKRMLASAGELQKGNELALPSKYVNFLYLASHYEKLKGSPEDNEQKQLFVEQHKHYLDEIIEQISEFSKRVILADANLDKVLSAYNKHRDKPIREQAENIIHLFTLTNLGAPAAFKYFDTTIDRKRYTSTKEVLDATLIHQSITGLYETRIDLSQLGGDGGEAAAKGSSGGGGGTLNIEDEYRLHETSKGPDVPLGSTWLSDFPQAWAETGGMGLAVRQAPLIIPLKATSTPVSIKQYPMSQEARLGIKPHIQRLLDQGILVPCQSPWNTPLLPVKKPGTNDYRPVQDLREVNKRVEDIHPTVPNPYNLLSGLPPSHQWYTVLDLKDAFFCLRLHPTSQSLFAFEWRDPEMGISGQLTWTRLPQGFKNSPTLFNEALHRDLADFRIQHPDLILLQYVDDLLLAATSELDCQQGTRALLQTLGDLGYRASAKKAQICQKQVKYLGYLLKEGQRWLTEARKETVMGQPTPKTPRQLREFLGTAGFCRLWIPGFAEMAAPLYPLTKPGTLFEWGPDQQKAYQEIKQALLTAPALGLPDLTKPFELFVDEKQGYAKGVLTQKLGPWRRPVAYLSKKLDPVAAGWPPCLRMVAAIAVLTKDAGKLTMGQPLVILAPHAVEALVKQPPDRWLSNARMTHYQALLLDTDRVQFGPIVALNPATLLPLPEEGLQHDCLDILAEAHGTRPDLTDQPLPDADHTWYTDGSSFLQEGQRKAGAAVTTETEVVWAKALPAGTSAQRAELIALTQALKMAEGKKLNVYTDSRYAFATAHIHGEIYRRRGWLTSEGKEIKNKDEILALLKALFLPKRLSIIHCPGHQKGNRAEARGNRMADQAAREVATRETPETSTLLAGKRTADGSEFEKRTADGSEFESPKKKAKVE

SEQ ID NO: 2453 - protein, 2096 aa, synthetic construct
MPAAKRVKLDGGDKKYSIGLDIGTNSVGWAVITDEYKVPSKKFKVLGNTDRHSIKKNLIGALLFDSGETAEATRLKRTARRRYTRRKNRICYLQEIFSNEMAKVDDSFFHRLEESFLVEEDKKHERHPIFGNIVDEVAYHEKYPTIYHLRKKLVDSTDKADLRLIYLALAHMIKFRGHFLIEGDLNPDNSDVDKLFIQLVQTYNQLFEENPINASGVDAKAILSARLSKSRRLENLIAQLPGEKKNGLFGNLIALSLGLTPNFKSNFDLAEDAKLQLSKDTYDDDLDNLLAQIGDQYADLFLAAKNLSDAILLSDILRVNTEITKAPLSASMIKRYDEHHQDLTLLKALVRQQLPEKYKEIFFDQSKNGYAGYIDGGASQEEFYKFIKPILEKMDGTEELLVKLNREDLLRKQRTFDNGSIPHQIHLGELHAILRRQEDFYPFLKDNREKIEKILTFRIPYYVGPLARGNSRFAWMTRKSEETITPWNFEEVVDKGASAQSFIERMTNFDKNLPNEKVLPKHSLLYEYFTVYNELTKVKYVTEGMRKPAFLSGEQKKAIVDLLFKTNRKVTVKQLKEDYFKKIECFDSVEISGVEDRFNASLGTYHDLLKIIKDKDFLDNEENEDILEDIVLTLTLFEDREMIEERLKTYAHLFDDKVMKQLKRRRYTGWGRLSRKLINGIRDKQSGKTILDFLKSDGFANRNFMQLIHDDSLTFKEDIQKAQVSGQGDSLHEHIANLAGSPAIKKGILQTVKVVDELVKVMGRHKPENIVIEMARENQTTQKGQKNSRERMKRIEEGIKELGSQILKEHPVENTQLQNEKLYLYYLQNGRDMYVDQELDINRLSDYDVDHIVPQSFLKDDSIDNKVLTRSDKARGKSDNVPSEEVVKKMKNYWRQLLNAKLITQRKFDNLTKAERGGLSELDKAGFIKRQLVETRQITKHVAQILDSRMNTKYDENDKLIREVKVITLKSKLVSDFRKDFQFYKVREINNYHHAHDAYLNAVVGTALIKKYPKLESEFVYGDYKVYDVRKMIAKSEQEIGKATAKYFFYSNIMNFFKTEITLANGEIRKRPLIETNGETGEIVWDKGRDFATVRKVLSMPQVNIVKKTEVQTGGFSKESILPKRNSDKLIARKKDWDPKKYGGFDSPTVAYSVLVVAKVEKGKSKKLKSVKELLGITIMERSSFEKNPIDFLEAKGYKEVKKDLIIKLPKYSLFELENGRKRMLASAGELQKGNELALPSKYVNFLYLASHYEKLKGSPEDNEQKQLFVEQHKHYLDEIIEQISEFSKRVILADANLDKVLSAYNKHRDKPIREQAENIIHLFTLTNLGAPAAFKYFDTTIDRKRYTSTKEVLDATLIHQSITGLYETRIDLSQLGGDGGPAPGSSEAAAKGGTLNIEDEYRLHETSKGPDVPLGSTWLSDFPQAWAETGGMGLAVRQAPLIIPLKATSTPVSIKQYPMSQEARLGIKPHIQRLLDQGILVPCQSPWNTPLLPVKKPGTNDYRPVQDLREVNKRVEDIHPTVPNPYNLLSGLPPSHQWYTVLDLKDAFFCLRLHPTSQSLFAFEWRDPEMGISGQLTWTRLPQGFKNSPTLFNEALHRDLADFRIQHPDLILLQYVDDLLLAATSELDCQQGTRALLQTLGDLGYRASAKKAQICQKQVKYLGYLLKEGQRWLTEARKETVMGQPTPKTPRQLREFLGTAGFCRLWIPGFAEMAAPLYPLTKPGTLFEWGPDQQKAYQEIKQALLTAPALGLPDLTKPFELFVDEKQGYAKGVLTQKLGPWRRPVAYLSKKLDPVAAGWPPCLRMVAAIAVLTKDAGKLTMGQPLVILAPHAVEALVKQPPDRWLSNARMTHYQALLLDTDRVQFGPIVALNPATLLPLPEEGLQHDCLDILAEAHGTRPDLTDQPLPDADHTWYTDGSSFLQEGQRKAGAAVTTETEVVWAKALPAGTSAQRAELIALTQALKMAEGKKLNVYTDSRYAFATAHIHGEIYRRRGWLTSEGKEIKNKDEILALLKALFLPKRLSIIHCPGHQKGNRAEARGNRMADQAAREVATRETPETSTLLAGKRTADGSEFEKRTADGSEFESPKKKAKVE

SEQ ID NO: 2454 - protein, 2110 aa, synthetic construct
MPAAKRVKLDGGDKKYSIGLDIGTNSVGWAVITDEYKVPSKKFKVLGNTDRHSIKKNLIGALLFDSGETAEATRLKRTARRRYTRRKNRICYLQEIFSNEMAKVDDSFFHRLEESFLVEEDKKHERHPIFGNIVDEVAYHEKYPTIYHLRKKLVDSTDKADLRLIYLALAHMIKFRGHFLIEGDLNPDNSDVDKLFIQLVQTYNQLFEENPINASGVDAKAILSARLSKSRRLENLIAQLPGEKKNGLFGNLIALSLGLTPNFKSNFDLAEDAKLQLSKDTYDDDLDNLLAQIGDQYADLFLAAKNLSDAILLSDILRVNTEITKAPLSASMIKRYDEHHQDLTLLKALVRQQLPEKYKEIFFDQSKNGYAGYIDGGASQEEFYKFIKPILEKMDGTEELLVKLNREDLLRKQRTFDNGSIPHQIHLGELHAILRRQEDFYPFLKDNREKIEKILTFRIPYYVGPLARGNSRFAWMTRKSEETITPWNFEEVVDKGASAQSFIERMTNFDKNLPNEKVLPKHSLLYEYFTVYNELTKVKYVTEGMRKPAFLSGEQKKAIVDLLFKTNRKVTVKQLKEDYFKKIECFDSVEISGVEDRFNASLGTYHDLLKIIKDKDFLDNEENEDILEDIVLTLTLFEDREMIEERLKTYAHLFDDKVMKQLKRRRYTGWGRLSRKLINGIRDKQSGKTILDFLKSDGFANRNFMQLIHDDSLTFKEDIQKAQVSGQGDSLHEHIANLAGSPAIKKGILQTVKVVDELVKVMGRHKPENIVIEMARENQTTQKGQKNSRERMKRIEEGIKELGSQILKEHPVENTQLQNEKLYLYYLQNGRDMYVDQELDINRLSDYDVDHIVPQSFLKDDSIDNKVLTRSDKARGKSDNVPSEEVVKKMKNYWRQLLNAKLITQRKFDNLTKAERGGLSELDKAGFIKRQLVETRQITKHVAQILDSRMNTKYDENDKLIREVKVITLKSKLVSDFRKDFQFYKVREINNYHHAHDAYLNAVVGTALIKKYPKLESEFVYGDYKVYDVRKMIAKSEQEIGKATAKYFFYSNIMNFFKTEITLANGEIRKRPLIETNGETGEIVWDKGRDFATVRKVLSMPQVNIVKKTEVQTGGFSKESILPKRNSDKLIARKKDWDPKKYGGFDSPTVAYSVLVVAKVEKGKSKKLKSVKELLGITIMERSSFEKNPIDFLEAKGYKEVKKDLIIKLPKYSLFELENGRKRMLASAGELQKGNELALPSKYVNFLYLASHYEKLKGSPEDNEQKQLFVEQHKHYLDEIIEQISEFSKRVILADANLDKVLSAYNKHRDKPIREQAENIIHLFTLTNLGAPAAFKYFDTTIDRKRYTSTKEVLDATLIHQSITGLYETRIDLSQLGGDGGEAAAKEAAAKEAAAKEAAAKEAAAKGGTLNIEDEYRLHETSKGPDVPLGSTWLSDFPQAWAETGGMGLAVRQAPLIIPLKATSTPVSIKQYPMSQEARLGIKPHIQRLLDQGILVPCQSPWNTPLLPVKKPGTNDYRPVQDLREVNKRVEDIHPTVPNPYNLLSGLPPSHQWYTVLDLKDAFFCLRLHPTSQSLFAFEWRDPEMGISGQLTWTRLPQGFKNSPTLFNEALHRDLADFRIQHPDLILLQYVDDLLLAATSELDCQQGTRALLQTLGDLGYRASAKKAQICQKQVKYLGYLLKEGQRWLTEARKETVMGQPTPKTPRQLREFLGTAGFCRLWIPGFAEMAAPLYPLTKPGTLFEWGPDQQKAYQEIKQALLTAPALGLPDLTKPFELFVDEKQGYAKGVLTQKLGPWRRPVAYLSKKLDPVAAGWPPCLRMVAAIAVLTKDAGKLTMGQPLVILAPHAVEALVKQPPDRWLSNARMTHYQALLLDTDRVQFGPIVALNPATLLPLPEEGLQHDCLDILAEAHGTRPDLTDQPLPDADHTWYTDGSSFLQEGQRKAGAAVTTETEVVWAKALPAGTSAQRAELIALTQALKMAEGKKLNVYTDSRYAFATAHIHGEIYRRRGWLTSEGKEIKNKDEILALLKALFLPKRLSIIHCPGHQKGNRAEARGNRMADQAAREVATRETPETSTLLAGKRTADGSEFEKRTADGSEFESPKKKAKVE

SEQ ID NO: 2455 - protein, 2115 aa, synthetic construct
MPAAKRVKLDGGDKKYSIGLDIGTNSVGWAVITDEYKVPSKKFKVLGNTDRHSIKKNLIGALLFDSGETAEATRLKRTARRRYTRRKNRICYLQEIFSNEMAKVDDSFFHRLEESFLVEEDKKHERHPIFGNIVDEVAYHEKYPTIYHLRKKLVDSTDKADLRLIYLALAHMIKFRGHFLIEGDLNPDNSDVDKLFIQLVQTYNQLFEENPINASGVDAKAILSARLSKSRRLENLIAQLPGEKKNGLFGNLIALSLGLTPNFKSNFDLAEDAKLQLSKDTYDDDLDNLLAQIGDQYADLFLAAKNLSDAILLSDILRVNTEITKAPLSASMIKRYDEHHQDLTLLKALVRQQLPEKYKEIFFDQSKNGYAGYIDGGASQEEFYKFIKPILEKMDGTEELLVKLNREDLLRKQRTFDNGSIPHQIHLGELHAILRRQEDFYPFLKDNREKIEKILTFRIPYYVGPLARGNSRFAWMTRKSEETITPWNFEEVVDKGASAQSFIERMTNFDKNLPNEKVLPKHSLLYEYFTVYNELTKVKYVTEGMRKPAFLSGEQKKAIVDLLFKTNRKVTVKQLKEDYFKKIECFDSVEISGVEDRFNASLGTYHDLLKIIKDKDFLDNEENEDILEDIVLTLTLFEDREMIEERLKTYAHLFDDKVMKQLKRRRYTGWGRLSRKLINGIRDKQSGKTILDFLKSDGFANRNFMQLIHDDSLTFKEDIQKAQVSGQGDSLHEHIANLAGSPAIKKGILQTVKVVDELVKVMGRHKPENIVIEMARENQTTQKGQKNSRERMKRIEEGIKELGSQILKEHPVENTQLQNEKLYLYYLQNGRDMYVDQELDINRLSDYDVDHIVPQSFLKDDSIDNKVLTRSDKARGKSDNVPSEEVVKKMKNYWRQLLNAKLITQRKFDNLTKAERGGLSELDKAGFIKRQLVETRQITKHVAQILDSRMNTKYDENDKLIREVKVITLKSKLVSDFRKDFQFYKVREINNYHHAHDAYLNAVVGTALIKKYPKLESEFVYGDYKVYDVRKMIAKSEQEIGKATAKYFFYSNIMNFFKTEITLANGEIRKRPLIETNGETGEIVWDKGRDFATVRKVLSMPQVNIVKKTEVQTGGFSKESILPKRNSDKLIARKKDWDPKKYGGFDSPTVAYSVLVVAKVEKGKSKKLKSVKELLGITIMERSSFEKNPIDFLEAKGYKEVKKDLIIKLPKYSLFELENGRKRMLASAGELQKGNELALPSKYVNFLYLASHYEKLKGSPEDNEQKQLFVEQHKHYLDEIIEQISEFSKRVILADANLDKVLSAYNKHRDKPIREQAENIIHLFTLTNLGAPAAFKYFDTTIDRKRYTSTKEVLDATLIHQSITGLYETRIDLSQLGGDGGEAAAKEAAAKEAAAKEAAAKEAAAKEAAAKGGTLNIEDEYRLHETSKGPDVPLGSTWLSDFPQAWAETGGMGLAVRQAPLIIPLKATSTPVSIKQYPMSQEARLGIKPHIQRLLDQGILVPCQSPWNTPLLPVKKPGTNDYRPVQDLREVNKRVEDIHPTVPNPYNLLSGLPPSHQWYTVLDLKDAFFCLRLHPTSQSLFAFEWRDPEMGISGQLTWTRLPQGFKNSPTLFNEALHRDLADFRIQHPDLILLQYVDDLLLAATSELDCQQGTRALLQTLGDLGYRASAKKAQICQKQVKYLGYLLKEGQRWLTEARKETVMGQPTPKTPRQLREFLGTAGFCRLWIPGFAEMAAPLYPLTKPGTLFEWGPDQQKAYQEIKQALLTAPALGLPDLTKPFELFVDEKQGYAKGVLTQKLGPWRRPVAYLSKKLDPVAAGWPPCLRMVAAIAVLTKDAGKLTMGQPLVILAPHAVEALVKQPPDRWLSNARMTHYQALLLDTDRVQFGPIVALNPATLLPLPEEGLQHDCLDILAEAHGTRPDLTDQPLPDADHTWYTDGSSFLQEGQRKAGAAVTTETEVVWAKALPAGTSAQRAELIALTQALKMAEGKKLNVYTDSRYAFATAHIHGEIYRRRGWLTSEGKEIKNKDEILALLKALFLPKRLSIIHCPGHQKGNRAEARGNRMADQAAREVATRETPETSTLLAGKRTADGSEFEKRTADGSEFESPKKKAKVE

SEQ ID NO: 2456 - protein, 2093 aa, synthetic construct
MPAAKRVKLDGGDKKYSIGLDIGTNSVGWAVITDEYKVPSKKFKVLGNTDRHSIKKNLIGALLFDSGETAEATRLKRTARRRYTRRKNRICYLQEIFSNEMAKVDDSFFHRLEESFLVEEDKKHERHPIFGNIVDEVAYHEKYPTIYHLRKKLVDSTDKADLRLIYLALAHMIKFRGHFLIEGDLNPDNSDVDKLFIQLVQTYNQLFEENPINASGVDAKAILSARLSKSRRLENLIAQLPGEKKNGLFGNLIALSLGLTPNFKSNFDLAEDAKLQLSKDTYDDDLDNLLAQIGDQYADLFLAAKNLSDAILLSDILRVNTEITKAPLSASMIKRYDEHHQDLTLLKALVRQQLPEKYKEIFFDQSKNGYAGYIDGGASQEEFYKFIKPILEKMDGTEELLVKLNREDLLRKQRTFDNGSIPHQIHLGELHAILRRQEDFYPFLKDNREKIEKILTFRIPYYVGPLARGNSRFAWMTRKSEETITPWNFEEVVDKGASAQSFIERMTNFDKNLPNEKVLPKHSLLYEYFTVYNELTKVKYVTEGMRKPAFLSGEQKKAIVDLLFKTNRKVTVKQLKEDYFKKIECFDSVEISGVEDRFNASLGTYHDLLKIIKDKDFLDNEENEDILEDIVLTLTLFEDREMIEERLKTYAHLFDDKVMKQLKRRRYTGWGRLSRKLINGIRDKQSGKTILDFLKSDGFANRNFMQLIHDDSLTFKEDIQKAQVSGQGDSLHEHIANLAGSPAIKKGILQTVKVVDELVKVMGRHKPENIVIEMARENQTTQKGQKNSRERMKRIEEGIKELGSQILKEHPVENTQLQNEKLYLYYLQNGRDMYVDQELDINRLSDYDVDHIVPQSFLKDDSIDNKVLTRSDKARGKSDNVPSEEVVKKMKNYWRQLLNAKLITQRKFDNLTKAERGGLSELDKAGFIKRQLVETRQITKHVAQILDSRMNTKYDENDKLIREVKVITLKSKLVSDFRKDFQFYKVREINNYHHAHDAYLNAVVGTALIKKYPKLESEFVYGDYKVYDVRKMIAKSEQEIGKATAKYFFYSNIMNFFKTEITLANGEIRKRPLIETNGETGEIVWDKGRDFATVRKVLSMPQVNIVKKTEVQTGGFSKESILPKRNSDKLIARKKDWDPKKYGGFDSPTVAYSVLVVAKVEKGKSKKLKSVKELLGITIMERSSFEKNPIDFLEAKGYKEVKKDLIIKLPKYSLFELENGRKRMLASAGELQKGNELALPSKYVNFLYLASHYEKLKGSPEDNEQKQLFVEQHKHYLDEIIEQISEFSKRVILADANLDKVLSAYNKHRDKPIREQAENIIHLFTLTNLGAPAAFKYFDTTIDRKRYTSTKEVLDATLIHQSITGLYETRIDLSQLGGDGGEAAAKGGSGGTLNIEDEYRLHETSKGPDVPLGSTWLSDFPQAWAETGGMGLAVRQAPLIIPLKATSTPVSIKQYPMSQEARLGIKPHIQRLLDQGILVPCQSPWNTPLLPVKKPGTNDYRPVQDLREVNKRVEDIHPTVPNPYNLLSGLPPSHQWYTVLDLKDAFFCLRLHPTSQSLFAFEWRDPEMGISGQLTWTRLPQGFKNSPTLFNEALHRDLADFRIQHPDLILLQYVDDLLLAATSELDCQQGTRALLQTLGDLGYRASAKKAQICQKQVKYLGYLLKEGQRWLTEARKETVMGQPTPKTPRQLREFLGTAGFCRLWIPGFAEMAAPLYPLTKPGTLFEWGPDQQKAYQEIKQALLTAPALGLPDLTKPFELFVDEKQGYAKGVLTQKLGPWRRPVAYLSKKLDPVAAGWPPCLRMVAAIAVLTKDAGKLTMGQPLVILAPHAVEALVKQPPDRWLSNARMTHYQALLLDTDRVQFGPIVALNPATLLPLPEEGLQHDCLDILAEAHGTRPDLTDQPLPDADHTWYTDGSSFLQEGQRKAGAAVTTETEVVWAKALPAGTSAQRAELIALTQALKMAEGKKLNVYTDSRYAFATAHIHGEIYRRRGWLTSEGKEIKNKDEILALLKALFLPKRLSIIHCPGHQKGNRAEARGNRMADQAAREVATRETPETSTLLAGKRTADGSEFEKRTADGSEFESPKKKAKVE

SEQ ID NO: 2457 - protein, 2096 aa, synthetic construct
MPAAKRVKLDGGDKKYSIGLDIGTNSVGWAVITDEYKVPSKKFKVLGNTDRHSIKKNLIGALLFDSGETAEATRLKRTARRRYTRRKNRICYLQEIFSNEMAKVDDSFFHRLEESFLVEEDKKHERHPIFGNIVDEVAYHEKYPTIYHLRKKLVDSTDKADLRLIYLALAHMIKFRGHFLIEGDLNPDNSDVDKLFIQLVQTYNQLFEENPINASGVDAKAILSARLSKSRRLENLIAQLPGEKKNGLFGNLIALSLGLTPNFKSNFDLAEDAKLQLSKDTYDDDLDNLLAQIGDQYADLFLAAKNLSDAILLSDILRVNTEITKAPLSASMIKRYDEHHQDLTLLKALVRQQLPEKYKEIFFDQSKNGYAGYIDGGASQEEFYKFIKPILEKMDGTEELLVKLNREDLLRKQRTFDNGSIPHQIHLGELHAILRRQEDFYPFLKDNREKIEKILTFRIPYYVGPLARGNSRFAWMTRKSEETITPWNFEEVVDKGASAQSFIERMTNFDKNLPNEKVLPKHSLLYEYFTVYNELTKVKYVTEGMRKPAFLSGEQKKAIVDLLFKTNRKVTVKQLKEDYFKKIECFDSVEISGVEDRFNASLGTYHDLLKIIKDKDFLDNEENEDILEDIVLTLTLFEDREMIEERLKTYAHLFDDKVMKQLKRRRYTGWGRLSRKLINGIRDKQSGKTILDFLKSDGFANRNFMQLIHDDSLTFKEDIQKAQVSGQGDSLHEHIANLAGSPAIKKGILQTVKVVDELVKVMGRHKPENIVIEMARENQTTQKGQKNSRERMKRIEEGIKELGSQILKEHPVENTQLQNEKLYLYYLQNGRDMYVDQELDINRLSDYDVDHIVPQSFLKDDSIDNKVLTRSDKARGKSDNVPSEEVVKKMKNYWRQLLNAKLITQRKFDNLTKAERGGLSELDKAGFIKRQLVETRQITKHVAQILDSRMNTKYDENDKLIREVKVITLKSKLVSDFRKDFQFYKVREINNYHHAHDAYLNAVVGTALIKKYPKLESEFVYGDYKVYDVRKMIAKSEQEIGKATAKYFFYSNIMNFFKTEITLANGEIRKRPLIETNGETGEIVWDKGRDFATVRKVLSMPQVNIVKKTEVQTGGFSKESILPKRNSDKLIARKKDWDPKKYGGFDSPTVAYSVLVVAKVEKGKSKKLKSVKELLGITIMERSSFEKNPIDFLEAKGYKEVKKDLIIKLPKYSLFELENGRKRMLASAGELQKGNELALPSKYVNFLYLASHYEKLKGSPEDNEQKQLFVEQHKHYLDEIIEQISEFSKRVILADANLDKVLSAYNKHRDKPIREQAENIIHLFTLTNLGAPAAFKYFDTTIDRKRYTSTKEVLDATLIHQSITGLYETRIDLSQLGGDGGEAAAKGGGPAPGGTLNIEDEYRLHETSKGPDVPLGSTWLSDFPQAWAETGGMGLAVRQAPLIIPLKATSTPVSIKQYPMSQEARLGIKPHIQRLLDQGILVPCQSPWNTPLLPVKKPGTNDYRPVQDLREVNKRVEDIHPTVPNPYNLLSGLPPSHQWYTVLDLKDAFFCLRLHPTSQSLFAFEWRDPEMGISGQLTWTRLPQGFKNSPTLFNEALHRDLADFRIQHPDLILLQYVDDLLLAATSELDCQQGTRALLQTLGDLGYRASAKKAQICQKQVKYLGYLLKEGQRWLTEARKETVMGQPTPKTPRQLREFLGTAGFCRLWIPGFAEMAAPLYPLTKPGTLFEWGPDQQKAYQEIKQALLTAPALGLPDLTKPFELFVDEKQGYAKGVLTQKLGPWRRPVAYLSKKLDPVAAGWPPCLRMVAAIAVLTKDAGKLTMGQPLVILAPHAVEALVKQPPDRWLSNARMTHYQALLLDTDRVQFGPIVALNPATLLPLPEEGLQHDCLDILAEAHGTRPDLTDQPLPDADHTWYTDGSSFLQEGQRKAGAAVTTETEVVWAKALPAGTSAQRAELIALTQALKMAEGKKLNVYTDSRYAFATAHIHGEIYRRRGWLTSEGKEIKNKDEILALLKALFLPKRLSIIHCPGHQKGNRAEARGNRMADQAAREVATRETPETSTLLAGKRTADGSEFEKRTADGSEFESPKKKAKVE

SEQ ID NO: 2458 - protein, 2096 aa, synthetic construct
MPAAKRVKLDGGDKKYSIGLDIGTNSVGWAVITDEYKVPSKKFKVLGNTDRHSIKKNLIGALLFDSGETAEATRLKRTARRRYTRRKNRICYLQEIFSNEMAKVDDSFFHRLEESFLVEEDKKHERHPIFGNIVDEVAYHEKYPTIYHLRKKLVDSTDKADLRLIYLALAHMIKFRGHFLIEGDLNPDNSDVDKLFIQLVQTYNQLFEENPINASGVDAKAILSARLSKSRRLENLIAQLPGEKKNGLFGNLIALSLGLTPNFKSNFDLAEDAKLQLSKDTYDDDLDNLLAQIGDQYADLFLAAKNLSDAILLSDILRVNTEITKAPLSASMIKRYDEHHQDLTLLKALVRQQLPEKYKEIFFDQSKNGYAGYIDGGASQEEFYKFIKPILEKMDGTEELLVKLNREDLLRKQRTFDNGSIPHQIHLGELHAILRRQEDFYPFLKDNREKIEKILTFRIPYYVGPLARGNSRFAWMTRKSEETITPWNFEEVVDKGASAQSFIERMTNFDKNLPNEKVLPKHSLLYEYFTVYNELTKVKYVTEGMRKPAFLSGEQKKAIVDLLFKTNRKVTVKQLKEDYFKKIECFDSVEISGVEDRFNASLGTYHDLLKIIKDKDFLDNEENEDILEDIVLTLTLFEDREMIEERLKTYAHLFDDKVMKQLKRRRYTGWGRLSRKLINGIRDKQSGKTILDFLKSDGFANRNFMQLIHDDSLTFKEDIQKAQVSGQGDSLHEHIANLAGSPAIKKGILQTVKVVDELVKVMGRHKPENIVIEMARENQTTQKGQKNSRERMKRIEEGIKELGSQILKEHPVENTQLQNEKLYLYYLQNGRDMYVDQELDINRLSDYDVDHIVPQSFLKDDSIDNKVLTRSDKARGKSDNVPSEEVVKKMKNYWRQLLNAKLITQRKFDNLTKAERGGLSELDKAGFIKRQLVETRQITKHVAQILDSRMNTKYDENDKLIREVKVITLKSKLVSDFRKDFQFYKVREINNYHHAHDAYLNAVVGTALIKKYPKLESEFVYGDYKVYDVRKMIAKSEQEIGKATAKYFFYSNIMNFFKTEITLANGEIRKRPLIETNGETGEIVWDKGRDFATVRKVLSMPQVNIVKKTEVQTGGFSKESILPKRNSDKLIARKKDWDPKKYGGFDSPTVAYSVLVVAKVEKGKSKKLKSVKELLGITIMERSSFEKNPIDFLEAKGYKEVKKDLIIKLPKYSLFELENGRKRMLASAGELQKGNELALPSKYVNFLYLASHYEKLKGSPEDNEQKQLFVEQHKHYLDEIIEQISEFSKRVILADANLDKVLSAYNKHRDKPIREQAENIIHLFTLTNLGAPAAFKYFDTTIDRKRYTSTKEVLDATLIHQSITGLYETRIDLSQLGGDGGGSSEAAAKGGGGGTLNIEDEYRLHETSKGPDVPLGSTWLSDFPQAWAETGGMGLAVRQAPLIIPLKATSTPVSIKQYPMSQEARLGIKPHIQRLLDQGILVPCQSPWNTPLLPVKKPGTNDYRPVQDLREVNKRVEDIHPTVPNPYNLLSGLPPSHQWYTVLDLKDAFFCLRLHPTSQSLFAFEWRDPEMGISGQLTWTRLPQGFKNSPTLFNEALHRDLADFRIQHPDLILLQYVDDLLLAATSELDCQQGTRALLQTLGDLGYRASAKKAQICQKQVKYLGYLLKEGQRWLTEARKETVMGQPTPKTPRQLREFLGTAGFCRLWIPGFAEMAAPLYPLTKPGTLFEWGPDQQKAYQEIKQALLTAPALGLPDLTKPFELFVDEKQGYAKGVLTQKLGPWRRPVAYLSKKLDPVAAGWPPCLRMVAAIAVLTKDAGKLTMGQPLVILAPHAVEALVKQPPDRWLSNARMTHYQALLLDTDRVQFGPIVALNPATLLPLPEEGLQHDCLDILAEAHGTRPDLTDQPLPDADHTWYTDGSSFLQEGQRKAGAAVTTETEVVWAKALPAGTSAQRAELIALTQALKMAEGKKLNVYTDSRYAFATAHIHGEIYRRRGWLTSEGKEIKNKDEILALLKALFLPKRLSIIHCPGHQKGNRAEARGNRMADQAAREVATRETPETSTLLAGKRTADGSEFEKRTADGSEFESPKKKAKVE

SEQ ID NO: 2459 - protein, 2096 aa, synthetic construct
MPAAKRVKLDGGDKKYSIGLDIGTNSVGWAVITDEYKVPSKKFKVLGNTDRHSIKKNLIGALLFDSGETAEATRLKRTARRRYTRRKNRICYLQEIFSNEMAKVDDSFFHRLEESFLVEEDKKHERHPIFGNIVDEVAYHEKYPTIYHLRKKLVDSTDKADLRLIYLALAHMIKFRGHFLIEGDLNPDNSDVDKLFIQLVQTYNQLFEENPINASGVDAKAILSARLSKSRRLENLIAQLPGEKKNGLFGNLIALSLGLTPNFKSNFDLAEDAKLQLSKDTYDDDLDNLLAQIGDQYADLFLAAKNLSDAILLSDILRVNTEITKAPLSASMIKRYDEHHQDLTLLKALVRQQLPEKYKEIFFDQSKNGYAGYIDGGASQEEFYKFIKPILEKMDGTEELLVKLNREDLLRKQRTFDNGSIPHQIHLGELHAILRRQEDFYPFLKDNREKIEKILTFRIPYYVGPLARGNSRFAWMTRKSEETITPWNFEEVVDKGASAQSFIERMTNFDKNLPNEKVLPKHSLLYEYFTVYNELTKVKYVTEGMRKPAFLSGEQKKAIVDLLFKTNRKVTVKQLKEDYFKKIECFDSVEISGVEDRFNASLGTYHDLLKIIKDKDFLDNEENEDILEDIVLTLTLFEDREMIEERLKTYAHLFDDKVMKQLKRRRYTGWGRLSRKLINGIRDKQSGKTILDFLKSDGFANRNFMQLIHDDSLTFKEDIQKAQVSGQGDSLHEHIANLAGSPAIKKGILQTVKVVDELVKVMGRHKPENIVIEMARENQTTQKGQKNSRERMKRIEEGIKELGSQILKEHPVENTQLQNEKLYLYYLQNGRDMYVDQELDINRLSDYDVDHIVPQSFLKDDSIDNKVLTRSDKARGKSDNVPSEEVVKKMKNYWRQLLNAKLITQRKFDNLTKAERGGLSELDKAGFIKRQLVETRQITKHVAQILDSRMNTKYDENDKLIREVKVITLKSKLVSDFRKDFQFYKVREINNYHHAHDAYLNAVVGTALIKKYPKLESEFVYGDYKVYDVRKMIAKSEQEIGKATAKYFFYSNIMNFFKTEITLANGEIRKRPLIETNGETGEIVWDKGRDFATVRKVLSMPQVNIVKKTEVQTGGFSKESILPKRNSDKLIARKKDWDPKKYGGFDSPTVAYSVLVVAKVEKGKSKKLKSVKELLGITIMERSSFEKNPIDFLEAKGYKEVKKDLIIKLPKYSLFELENGRKRMLASAGELQKGNELALPSKYVNFLYLASHYEKLKGSPEDNEQKQLFVEQHKHYLDEIIEQISEFSKRVILADANLDKVLSAYNKHRDKPIREQAENIIHLFTLTNLGAPAAFKYFDTTIDRKRYTSTKEVLDATLIHQSITGLYETRIDLSQLGGDGGGGSGGGEAAAKGGTLNIEDEYRLHETSKGPDVPLGSTWLSDFPQAWAETGGMGLAVRQAPLIIPLKATSTPVSIKQYPMSQEARLGIKPHIQRLLDQGILVPCQSPWNTPLLPVKKPGTNDYRPVQDLREVNKRVEDIHPTVPNPYNLLSGLPPSHQWYTVLDLKDAFFCLRLHPTSQSLFAFEWRDPEMGISGQLTWTRLPQGFKNSPTLFNEALHRDLADFRIQHPDLILLQYVDDLLLAATSELDCQQGTRALLQTLGDLGYRASAKKAQICQKQVKYLGYLLKEGQRWLTEARKETVMGQPTPKTPRQLREFLGTAGFCRLWIPGFAEMAAPLYPLTKPGTLFEWGPDQQKAYQEIKQALLTAPALGLPDLTKPFELFVDEKQGYAKGVLTQKLGPWRRPVAYLSKKLDPVAAGWPPCLRMVAAIAVLTKDAGKLTMGQPLVILAPHAVEALVKQPPDRWLSNARMTHYQALLLDTDRVQFGPIVALNPATLLPLPEEGLQHDCLDILAEAHGTRPDLTDQPLPDADHTWYTDGSSFLQEGQRKAGAAVTTETEVVWAKALPAGTSAQRAELIALTQALKMAEGKKLNVYTDSRYAFATAHIHGEIYRRRGWLTSEGKEIKNKDEILALLKALFLPKRLSIIHCPGHQKGNRAEARGNRMADQAAREVATRETPETSTLLAGKRTADGSEFEKRTADGSEFESPKKKAKVE

SEQ ID NO: 2460 - protein, 2096 aa, synthetic construct
MPAAKRVKLDGGDKKYSIGLDIGTNSVGWAVITDEYKVPSKKFKVLGNTDRHSIKKNLIGALLFDSGETAEATRLKRTARRRYTRRKNRICYLQEIFSNEMAKVDDSFFHRLEESFLVEEDKKHERHPIFGNIVDEVAYHEKYPTIYHLRKKLVDSTDKADLRLIYLALAHMIKFRGHFLIEGDLNPDNSDVDKLFIQLVQTYNQLFEENPINASGVDAKAILSARLSKSRRLENLIAQLPGEKKNGLFGNLIALSLGLTPNFKSNFDLAEDAKLQLSKDTYDDDLDNLLAQIGDQYADLFLAAKNLSDAILLSDILRVNTEITKAPLSASMIKRYDEHHQDLTLLKALVRQQLPEKYKEIFFDQSKNGYAGYIDGGASQEEFYKFIKPILEKMDGTEELLVKLNREDLLRKQRTFDNGSIPHQIHLGELHAILRRQEDFYPFLKDNREKIEKILTFRIPYYVGPLARGNSRFAWMTRKSEETITPWNFEEVVDKGASAQSFIERMTNFDKNLPNEKVLPKHSLLYEYFTVYNELTKVKYVTEGMRKPAFLSGEQKKAIVDLLFKTNRKVTVKQLKEDYFKKIECFDSVEISGVEDRFNASLGTYHDLLKIIKDKDFLDNEENEDILEDIVLTLTLFEDREMIEERLKTYAHLFDDKVMKQLKRRRYTGWGRLSRKLINGIRDKQSGKTILDFLKSDGFANRNFMQLIHDDSLTFKEDIQKAQVSGQGDSLHEHIANLAGSPAIKKGILQTVKVVDELVKVMGRHKPENIVIEMARENQTTQKGQKNSRERMKRIEEGIKELGSQILKEHPVENTQLQNEKLYLYYLQNGRDMYVDQELDINRLSDYDVDHIVPQSFLKDDSIDNKVLTRSDKARGKSDNVPSEEVVKKMKNYWRQLLNAKLITQRKFDNLTKAERGGLSELDKAGFIKRQLVETRQITKHVAQILDSRMNTKYDENDKLIREVKVITLKSKLVSDFRKDFQFYKVREINNYHHAHDAYLNAVVGTALIKKYPKLESEFVYGDYKVYDVRKMIAKSEQEIGKATAKYFFYSNIMNFFKTEITLANGEIRKRPLIETNGETGEIVWDKGRDFATVRKVLSMPQVNIVKKTEVQTGGFSKESILPKRNSDKLIARKKDWDPKKYGGFDSPTVAYSVLVVAKVEKGKSKKLKSVKELLGITIMERSSFEKNPIDFLEAKGYKEVKKDLIIKLPKYSLFELENGRKRMLASAGELQKGNELALPSKYVNFLYLASHYEKLKGSPEDNEQKQLFVEQHKHYLDEIIEQISEFSKRVILADANLDKVLSAYNKHRDKPIREQAENIIHLFTLTNLGAPAAFKYFDTTIDRKRYTSTKEVLDATLIHQSITGLYETRIDLSQLGGDGGEAAAKGGSGSSGGTLNIEDEYRLHETSKGPDVPLGSTWLSDFPQAWAETGGMGLAVRQAPLIIPLKATSTPVSIKQYPMSQEARLGIKPHIQRLLDQGILVPCQSPWNTPLLPVKKPGTNDYRPVQDLREVNKRVEDIHPTVPNPYNLLSGLPPSHQWYTVLDLKDAFFCLRLHPTSQSLFAFEWRDPEMGISGQLTWTRLPQGFKNSPTLFNEALHRDLADFRIQHPDLILLQYVDDLLLAATSELDCQQGTRALLQTLGDLGYRASAKKAQICQKQVKYLGYLLKEGQRWLTEARKETVMGQPTPKTPRQLREFLGTAGFCRLWIPGFAEMAAPLYPLTKPGTLFEWGPDQQKAYQEIKQALLTAPALGLPDLTKPFELFVDEKQGYAKGVLTQKLGPWRRPVAYLSKKLDPVAAGWPPCLRMVAAIAVLTKDAGKLTMGQPLVILAPHAVEALVKQPPDRWLSNARMTHYQALLLDTDRVQFGPIVALNPATLLPLPEEGLQHDCLDILAEAHGTRPDLTDQPLPDADHTWYTDGSSFLQEGQRKAGAAVTTETEVVWAKALPAGTSAQRAELIALTQALKMAEGKKLNVYTDSRYAFATAHIHGEIYRRRGWLTSEGKEIKNKDEILALLKALFLPKRLSIIHCPGHQKGNRAEARGNRMADQAAREVATRETPETSTLLAGKRTADGSEFEKRTADGSEFESPKKKAKVE

SEQ ID NO: 2461 - protein, 2096 aa, synthetic construct
MPAAKRVKLDGGDKKYSIGLDIGTNSVGWAVITDEYKVPSKKFKVLGNTDRHSIKKNLIGALLFDSGETAEATRLKRTARRRYTRRKNRICYLQEIFSNEMAKVDDSFFHRLEESFLVEEDKKHERHPIFGNIVDEVAYHEKYPTIYHLRKKLVDSTDKADLRLIYLALAHMIKFRGHFLIEGDLNPDNSDVDKLFIQLVQTYNQLFEENPINASGVDAKAILSARLSKSRRLENLIAQLPGEKKNGLFGNLIALSLGLTPNFKSNFDLAEDAKLQLSKDTYDDDLDNLLAQIGDQYADLFLAAKNLSDAILLSDILRVNTEITKAPLSASMIKRYDEHHQDLTLLKALVRQQLPEKYKEIFFDQSKNGYAGYIDGGASQEEFYKFIKPILEKMDGTEELLVKLNREDLLRKQRTFDNGSIPHQIHLGELHAILRRQEDFYPFLKDNREKIEKILTFRIPYYVGPLARGNSRFAWMTRKSEETITPWNFEEVVDKGASAQSFIERMTNFDKNLPNEKVLPKHSLLYEYFTVYNELTKVKYVTEGMRKPAFLSGEQKKAIVDLLFKTNRKVTVKQLKEDYFKKIECFDSVEISGVEDRFNASLGTYHDLLKIIKDKDFLDNEENEDILEDIVLTLTLFEDREMIEERLKTYAHLFDDKVMKQLKRRRYTGWGRLSRKLINGIRDKQSGKTILDFLKSDGFANRNFMQLIHDDSLTFKEDIQKAQVSGQGDSLHEHIANLAGSPAIKKGILQTVKVVDELVKVMGRHKPENIVIEMARENQTTQKGQKNSRERMKRIEEGIKELGSQILKEHPVENTQLQNEKLYLYYLQNGRDMYVDQELDINRLSDYDVDHIVPQSFLKDDSIDNKVLTRSDKARGKSDNVPSEEVVKKMKNYWRQLLNAKLITQRKFDNLTKAERGGLSELDKAGFIKRQLVETRQITKHVAQILDSRMNTKYDENDKLIREVKVITLKSKLVSDFRKDFQFYKVREINNYHHAHDAYLNAVVGTALIKKYPKLESEFVYGDYKVYDVRKMIAKSEQEIGKATAKYFFYSNIMNFFKTEITLANGEIRKRPLIETNGETGEIVWDKGRDFATVRKVLSMPQVNIVKKTEVQTGGFSKESILPKRNSDKLIARKKDWDPKKYGGFDSPTVAYSVLVVAKVEKGKSKKLKSVKELLGITIMERSSFEKNPIDFLEAKGYKEVKKDLIIKLPKYSLFELENGRKRMLASAGELQKGNELALPSKYVNFLYLASHYEKLKGSPEDNEQKQLFVEQHKHYLDEIIEQISEFSKRVILADANLDKVLSAYNKHRDKPIREQAENIIHLFTLTNLGAPAAFKYFDTTIDRKRYTSTKEVLDATLIHQSITGLYETRIDLSQLGGDGGGGGGSSEAAAKGGTLNIEDEYRLHETSKGPDVPLGSTWLSDFPQAWAETGGMGLAVRQAPLIIPLKATSTPVSIKQYPMSQEARLGIKPHIQRLLDQGILVPCQSPWNTPLLPVKKPGTNDYRPVQDLREVNKRVEDIHPTVPNPYNLLSGLPPSHQWYTVLDLKDAFFCLRLHPTSQSLFAFEWRDPEMGISGQLTWTRLPQGFKNSPTLFNEALHRDLADFRIQHPDLILLQYVDDLLLAATSELDCQQGTRALLQTLGDLGYRASAKKAQICQKQVKYLGYLLKEGQRWLTEARKETVMGQPTPKTPRQLREFLGTAGFCRLWIPGFAEMAAPLYPLTKPGTLFEWGPDQQKAYQEIKQALLTAPALGLPDLTKPFELFVDEKQGYAKGVLTQKLGPWRRPVAYLSKKLDPVAAGWPPCLRMVAAIAVLTKDAGKLTMGQPLVILAPHAVEALVKQPPDRWLSNARMTHYQALLLDTDRVQFGPIVALNPATLLPLPEEGLQHDCLDILAEAHGTRPDLTDQPLPDADHTWYTDGSSFLQEGQRKAGAAVTTETEVVWAKALPAGTSAQRAELIALTQALKMAEGKKLNVYTDSRYAFATAHIHGEIYRRRGWLTSEGKEIKNKDEILALLKALFLPKRLSIIHCPGHQKGNRAEARGNRMADQAAREVATRETPETSTLLAGKRTADGSEFEKRTADGSEFESPKKKAKVE

SEQ ID NO: 2462 - protein, 2096 aa, synthetic construct
MPAAKRVKLDGGDKKYSIGLDIGTNSVGWAVITDEYKVPSKKFKVLGNTDRHSIKKNLIGALLFDSGETAEATRLKRTARRRYTRRKNRICYLQEIFSNEMAKVDDSFFHRLEESFLVEEDKKHERHPIFGNIVDEVAYHEKYPTIYHLRKKLVDSTDKADLRLIYLALAHMIKFRGHFLIEGDLNPDNSDVDKLFIQLVQTYNQLFEENPINASGVDAKAILSARLSKSRRLENLIAQLPGEKKNGLFGNLIALSLGLTPNFKSNFDLAEDAKLQLSKDTYDDDLDNLLAQIGDQYADLFLAAKNLSDAILLSDILRVNTEITKAPLSASMIKRYDEHHQDLTLLKALVRQQLPEKYKEIFFDQSKNGYAGYIDGGASQEEFYKFIKPILEKMDGTEELLVKLNREDLLRKQRTFDNGSIPHQIHLGELHAILRRQEDFYPFLKDNREKIEKILTFRIPYYVGPLARGNSRFAWMTRKSEETITPWNFEEVVDKGASAQSFIERMTNFDKNLPNEKVLPKHSLLYEYFTVYNELTKVKYVTEGMRKPAFLSGEQKKAIVDLLFKTNRKVTVKQLKEDYFKKIECFDSVEISGVEDRFNASLGTYHDLLKIIKDKDFLDNEENEDILEDIVLTLTLFEDREMIEERLKTYAHLFDDKVMKQLKRRRYTGWGRLSRKLINGIRDKQSGKTILDFLKSDGFANRNFMQLIHDDSLTFKEDIQKAQVSGQGDSLHEHIANLAGSPAIKKGILQTVKVVDELVKVMGRHKPENIVIEMARENQTTQKGQKNSRERMKRIEEGIKELGSQILKEHPVENTQLQNEKLYLYYLQNGRDMYVDQELDINRLSDYDVDHIVPQSFLKDDSIDNKVLTRSDKARGKSDNVPSEEVVKKMKNYWRQLLNAKLITQRKFDNLTKAERGGLSELDKAGFIKRQLVETRQITKHVAQILDSRMNTKYDENDKLIREVKVITLKSKLVSDFRKDFQFYKVREINNYHHAHDAYLNAVVGTALIKKYPKLESEFVYGDYKVYDVRKMIAKSEQEIGKATAKYFFYSNIMNFFKTEITLANGEIRKRPLIETNGETGEIVWDKGRDFATVRKVLSMPQVNIVKKTEVQTGGFSKESILPKRNSDKLIARKKDWDPKKYGGFDSPTVAYSVLVVAKVEKGKSKKLKSVKELLGITIMERSSFEKNPIDFLEAKGYKEVKKDLIIKLPKYSLFELENGRKRMLASAGELQKGNELALPSKYVNFLYLASHYEKLKGSPEDNEQKQLFVEQHKHYLDEIIEQISEFSKRVILADANLDKVLSAYNKHRDKPIREQAENIIHLFTLTNLGAPAAFKYFDTTIDRKRYTSTKEVLDATLIHQSITGLYETRIDLSQLGGDGGEAAAKGGGGSSGGTLNIEDEYRLHETSKGPDVPLGSTWLSDFPQAWAETGGMGLAVRQAPLIIPLKATSTPVSIKQYPMSQEARLGIKPHIQRLLDQGILVPCQSPWNTPLLPVKKPGTNDYRPVQDLREVNKRVEDIHPTVPNPYNLLSGLPPSHQWYTVLDLKDAFFCLRLHPTSQSLFAFEWRDPEMGISGQLTWTRLPQGFKNSPTLFNEALHRDLADFRIQHPDLILLQYVDDLLLAATSELDCQQGTRALLQTLGDLGYRASAKKAQICQKQVKYLGYLLKEGQRWLTEARKETVMGQPTPKTPRQLREFLGTAGFCRLWIPGFAEMAAPLYPLTKPGTLFEWGPDQQKAYQEIKQALLTAPALGLPDLTKPFELFVDEKQGYAKGVLTQKLGPWRRPVAYLSKKLDPVAAGWPPCLRMVAAIAVLTKDAGKLTMGQPLVILAPHAVEALVKQPPDRWLSNARMTHYQALLLDTDRVQFGPIVALNPATLLPLPEEGLQHDCLDILAEAHGTRPDLTDQPLPDADHTWYTDGSSFLQEGQRKAGAAVTTETEVVWAKALPAGTSAQRAELIALTQALKMAEGKKLNVYTDSRYAFATAHIHGEIYRRRGWLTSEGKEIKNKDEILALLKALFLPKRLSIIHCPGHQKGNRAEARGNRMADQAAREVATRETPETSTLLAGKRTADGSEFEKRTADGSEFESPKKKAKVE

SEQ ID NO: 2463 - protein, 2094 aa, synthetic construct
MPAAKRVKLDGGDKKYSIGLDIGTNSVGWAVITDEYKVPSKKFKVLGNTDRHSIKKNLIGALLFDSGETAEATRLKRTARRRYTRRKNRICYLQEIFSNEMAKVDDSFFHRLEESFLVEEDKKHERHPIFGNIVDEVAYHEKYPTIYHLRKKLVDSTDKADLRLIYLALAHMIKFRGHFLIEGDLNPDNSDVDKLFIQLVQTYNQLFEENPINASGVDAKAILSARLSKSRRLENLIAQLPGEKKNGLFGNLIALSLGLTPNFKSNFDLAEDAKLQLSKDTYDDDLDNLLAQIGDQYADLFLAAKNLSDAILLSDILRVNTEITKAPLSASMIKRYDEHHQDLTLLKALVRQQLPEKYKEIFFDQSKNGYAGYIDGGASQEEFYKFIKPILEKMDGTEELLVKLNREDLLRKQRTFDNGSIPHQIHLGELHAILRRQEDFYPFLKDNREKIEKILTFRIPYYVGPLARGNSRFAWMTRKSEETITPWNFEEVVDKGASAQSFIERMTNFDKNLPNEKVLPKHSLLYEYFTVYNELTKVKYVTEGMRKPAFLSGEQKKAIVDLLFKTNRKVTVKQLKEDYFKKIECFDSVEISGVEDRFNASLGTYHDLLKIIKDKDFLDNEENEDILEDIVLTLTLFEDREMIEERLKTYAHLFDDKVMKQLKRRRYTGWGRLSRKLINGIRDKQSGKTILDFLKSDGFANRNFMQLIHDDSLTFKEDIQKAQVSGQGDSLHEHIANLAGSPAIKKGILQTVKVVDELVKVMGRHKPENIVIEMARENQTTQKGQKNSRERMKRIEEGIKELGSQILKEHPVENTQLQNEKLYLYYLQNGRDMYVDQELDINRLSDYDVDHIVPQSFLKDDSIDNKVLTRSDKARGKSDNVPSEEVVKKMKNYWRQLLNAKLITQRKFDNLTKAERGGLSELDKAGFIKRQLVETRQITKHVAQILDSRMNTKYDENDKLIREVKVITLKSKLVSDFRKDFQFYKVREINNYHHAHDAYLNAVVGTALIKKYPKLESEFVYGDYKVYDVRKMIAKSEQEIGKATAKYFFYSNIMNFFKTEITLANGEIRKRPLIETNGETGEIVWDKGRDFATVRKVLSMPQVNIVKKTEVQTGGFSKESILPKRNSDKLIARKKDWDPKKYGGFDSPTVAYSVLVVAKVEKGKSKKLKSVKELLGITIMERSSFEKNPIDFLEAKGYKEVKKDLIIKLPKYSLFELENGRKRMLASAGELQKGNELALPSKYVNFLYLASHYEKLKGSPEDNEQKQLFVEQHKHYLDEIIEQISEFSKRVILADANLDKVLSAYNKHRDKPIREQAENIIHLFTLTNLGAPAAFKYFDTTIDRKRYTSTKEVLDATLIHQSITGLYETRIDLSQLGGDGGGSSGGSGGGGGTLNIEDEYRLHETSKGPDVPLGSTWLSDFPQAWAETGGMGLAVRQAPLIIPLKATSTPVSIKQYPMSQEARLGIKPHIQRLLDQGILVPCQSPWNTPLLPVKKPGTNDYRPVQDLREVNKRVEDIHPTVPNPYNLLSGLPPSHQWYTVLDLKDAFFCLRLHPTSQSLFAFEWRDPEMGISGQLTWTRLPQGFKNSPTLFNEALHRDLADFRIQHPDLILLQYVDDLLLAATSELDCQQGTRALLQTLGDLGYRASAKKAQICQKQVKYLGYLLKEGQRWLTEARKETVMGQPTPKTPRQLREFLGTAGFCRLWIPGFAEMAAPLYPLTKPGTLFEWGPDQQKAYQEIKQALLTAPALGLPDLTKPFELFVDEKQGYAKGVLTQKLGPWRRPVAYLSKKLDPVAAGWPPCLRMVAAIAVLTKDAGKLTMGQPLVILAPHAVEALVKQPPDRWLSNARMTHYQALLLDTDRVQFGPIVALNPATLLPLPEEGLQHDCLDILAEAHGTRPDLTDQPLPDADHTWYTDGSSFLQEGQRKAGAAVTTETEVVWAKALPAGTSAQRAELIALTQALKMAEGKKLNVYTDSRYAFATAHIHGEIYRRRGWLTSEGKEIKNKDEILALLKALFLPKRLSIIHCPGHQKGNRAEARGNRMADQAAREVATRETPETSTLLAGKRTADGSEFEKRTADGSEFESPKKKAKVE

SEQ ID NO: 2464 - protein, 2105 aa, synthetic construct
MPAAKRVKLDGGDKKYSIGLDIGTNSVGWAVITDEYKVPSKKFKVLGNTDRHSIKKNLIGALLFDSGETAEATRLKRTARRRYTRRKNRICYLQEIFSNEMAKVDDSFFHRLEESFLVEEDKKHERHPIFGNIVDEVAYHEKYPTIYHLRKKLVDSTDKADLRLIYLALAHMIKFRGHFLIEGDLNPDNSDVDKLFIQLVQTYNQLFEENPINASGVDAKAILSARLSKSRRLENLIAQLPGEKKNGLFGNLIALSLGLTPNFKSNFDLAEDAKLQLSKDTYDDDLDNLLAQIGDQYADLFLAAKNLSDAILLSDILRVNTEITKAPLSASMIKRYDEHHQDLTLLKALVRQQLPEKYKEIFFDQSKNGYAGYIDGGASQEEFYKFIKPILEKMDGTEELLVKLNREDLLRKQRTFDNGSIPHQIHLGELHAILRRQEDFYPFLKDNREKIEKILTFRIPYYVGPLARGNSRFAWMTRKSEETITPWNFEEVVDKGASAQSFIERMTNFDKNLPNEKVLPKHSLLYEYFTVYNELTKVKYVTEGMRKPAFLSGEQKKAIVDLLFKTNRKVTVKQLKEDYFKKIECFDSVEISGVEDRFNASLGTYHDLLKIIKDKDFLDNEENEDILEDIVLTLTLFEDREMIEERLKTYAHLFDDKVMKQLKRRRYTGWGRLSRKLINGIRDKQSGKTILDFLKSDGFANRNFMQLIHDDSLTFKEDIQKAQVSGQGDSLHEHIANLAGSPAIKKGILQTVKVVDELVKVMGRHKPENIVIEMARENQTTQKGQKNSRERMKRIEEGIKELGSQILKEHPVENTQLQNEKLYLYYLQNGRDMYVDQELDINRLSDYDVDHIVPQSFLKDDSIDNKVLTRSDKARGKSDNVPSEEVVKKMKNYWRQLLNAKLITQRKFDNLTKAERGGLSELDKAGFIKRQLVETRQITKHVAQILDSRMNTKYDENDKLIREVKVITLKSKLVSDFRKDFQFYKVREINNYHHAHDAYLNAVVGTALIKKYPKLESEFVYGDYKVYDVRKMIAKSEQEIGKATAKYFFYSNIMNFFKTEITLANGEIRKRPLIETNGETGEIVWDKGRDFATVRKVLSMPQVNIVKKTEVQTGGFSKESILPKRNSDKLIARKKDWDPKKYGGFDSPTVAYSVLVVAKVEKGKSKKLKSVKELLGITIMERSSFEKNPIDFLEAKGYKEVKKDLIIKLPKYSLFELENGRKRMLASAGELQKGNELALPSKYVNFLYLASHYEKLKGSPEDNEQKQLFVEQHKHYLDEIIEQISEFSKRVILADANLDKVLSAYNKHRDKPIREQAENIIHLFTLTNLGAPAAFKYFDTTIDRKRYTSTKEVLDATLIHQSITGLYETRIDLSQLGGDGGGGGGSGGGGSGGGGSGGGGSGGTLNIEDEYRLHETSKGPDVPLGSTWLSDFPQAWAETGGMGLAVRQAPLIIPLKATSTPVSIKQYPMSQEARLGIKPHIQRLLDQGILVPCQSPWNTPLLPVKKPGTNDYRPVQDLREVNKRVEDIHPTVPNPYNLLSGLPPSHQWYTVLDLKDAFFCLRLHPTSQSLFAFEWRDPEMGISGQLTWTRLPQGFKNSPTLFNEALHRDLADFRIQHPDLILLQYVDDLLLAATSELDCQQGTRALLQTLGDLGYRASAKKAQICQKQVKYLGYLLKEGQRWLTEARKETVMGQPTPKTPRQLREFLGTAGFCRLWIPGFAEMAAPLYPLTKPGTLFEWGPDQQKAYQEIKQALLTAPALGLPDLTKPFELFVDEKQGYAKGVLTQKLGPWRRPVAYLSKKLDPVAAGWPPCLRMVAAIAVLTKDAGKLTMGQPLVILAPHAVEALVKQPPDRWLSNARMTHYQALLLDTDRVQFGPIVALNPATLLPLPEEGLQHDCLDILAEAHGTRPDLTDQPLPDADHTWYTDGSSFLQEGQRKAGAAVTTETEVVWAKALPAGTSAQRAELIALTQALKMAEGKKLNVYTDSRYAFATAHIHGEIYRRRGWLTSEGKEIKNKDEILALLKALFLPKRLSIIHCPGHQKGNRAEARGNRMADQAAREVATRETPETSTLLAGKRTADGSEFEKRTADGSEFESPKKKAKVE

SEQ ID NO: 2465 - protein, 2100 aa, synthetic construct
MPAAKRVKLDGGDKKYSIGLDIGTNSVGWAVITDEYKVPSKKFKVLGNTDRHSIKKNLIGALLFDSGETAEATRLKRTARRRYTRRKNRICYLQEIFSNEMAKVDDSFFHRLEESFLVEEDKKHERHPIFGNIVDEVAYHEKYPTIYHLRKKLVDSTDKADLRLIYLALAHMIKFRGHFLIEGDLNPDNSDVDKLFIQLVQTYNQLFEENPINASGVDAKAILSARLSKSRRLENLIAQLPGEKKNGLFGNLIALSLGLTPNFKSNFDLAEDAKLQLSKDTYDDDLDNLLAQIGDQYADLFLAAKNLSDAILLSDILRVNTEITKAPLSASMIKRYDEHHQDLTLLKALVRQQLPEKYKEIFFDQSKNGYAGYIDGGASQEEFYKFIKPILEKMDGTEELLVKLNREDLLRKQRTFDNGSIPHQIHLGELHAILRRQEDFYPFLKDNREKIEKILTFRIPYYVGPLARGNSRFAWMTRKSEETITPWNFEEVVDKGASAQSFIERMTNFDKNLPNEKVLPKHSLLYEYFTVYNELTKVKYVTEGMRKPAFLSGEQKKAIVDLLFKTNRKVTVKQLKEDYFKKIECFDSVEISGVEDRFNASLGTYHDLLKIIKDKDFLDNEENEDILEDIVLTLTLFEDREMIEERLKTYAHLFDDKVMKQLKRRRYTGWGRLSRKLINGIRDKQSGKTILDFLKSDGFANRNFMQLIHDDSLTFKEDIQKAQVSGQGDSLHEHIANLAGSPAIKKGILQTVKVVDELVKVMGRHKPENIVIEMARENQTTQKGQKNSRERMKRIEEGIKELGSQILKEHPVENTQLQNEKLYLYYLQNGRDMYVDQELDINRLSDYDVDHIVPQSFLKDDSIDNKVLTRSDKARGKSDNVPSEEVVKKMKNYWRQLLNAKLITQRKFDNLTKAERGGLSELDKAGFIKRQLVETRQITKHVAQILDSRMNTKYDENDKLIREVKVITLKSKLVSDFRKDFQFYKVREINNYHHAHDAYLNAVVGTALIKKYPKLESEFVYGDYKVYDVRKMIAKSEQEIGKATAKYFFYSNIMNFFKTEITLANGEIRKRPLIETNGETGEIVWDKGRDFATVRKVLSMPQVNIVKKTEVQTGGFSKESILPKRNSDKLIARKKDWDPKKYGGFDSPTVAYSVLVVAKVEKGKSKKLKSVKELLGITIMERSSFEKNPIDFLEAKGYKEVKKDLIIKLPKYSLFELENGRKRMLASAGELQKGNELALPSKYVNFLYLASHYEKLKGSPEDNEQKQLFVEQHKHYLDEIIEQISEFSKRVILADANLDKVLSAYNKHRDKPIREQAENIIHLFTLTNLGAPAAFKYFDTTIDRKRYTSTKEVLDATLIHQSITGLYETRIDLSQLGGDGGGGSGGSGGSGGSGGSGGTLNIEDEYRLHETSKGPDVPLGSTWLSDFPQAWAETGGMGLAVRQAPLIIPLKATSTPVSIKQYPMSQEARLGIKPHIQRLLDQGILVPCQSPWNTPLLPVKKPGTNDYRPVQDLREVNKRVEDIHPTVPNPYNLLSGLPPSHQWYTVLDLKDAFFCLRLHPTSQSLFAFEWRDPEMGISGQLTWTRLPQGFKNSPTLFNEALHRDLADFRIQHPDLILLQYVDDLLLAATSELDCQQGTRALLQTLGDLGYRASAKKAQICQKQVKYLGYLLKEGQRWLTEARKETVMGQPTPKTPRQLREFLGTAGFCRLWIPGFAEMAAPLYPLTKPGTLFEWGPDQQKAYQEIKQALLTAPALGLPDLTKPFELFVDEKQGYAKGVLTQKLGPWRRPVAYLSKKLDPVAAGWPPCLRMVAAIAVLTKDAGKLTMGQPLVILAPHAVEALVKQPPDRWLSNARMTHYQALLLDTDRVQFGPIVALNPATLLPLPEEGLQHDCLDILAEAHGTRPDLTDQPLPDADHTWYTDGSSFLQEGQRKAGAAVTTETEVVWAKALPAGTSAQRAELIALTQALKMAEGKKLNVYTDSRYAFATAHIHGEIYRRRGWLTSEGKEIKNKDEILALLKALFLPKRLSIIHCPGHQKGNRAEARGNRMADQAAREVATRETPETSTLLAGKRTADGSEFEKRTADGSEFESPKKKAKVE

SEQ ID NO: 2466 - protein, 2096 aa, synthetic construct
MPAAKRVKLDGGDKKYSIGLDIGTNSVGWAVITDEYKVPSKKFKVLGNTDRHSIKKNLIGALLFDSGETAEATRLKRTARRRYTRRKNRICYLQEIFSNEMAKVDDSFFHRLEESFLVEEDKKHERHPIFGNIVDEVAYHEKYPTIYHLRKKLVDSTDKADLRLIYLALAHMIKFRGHFLIEGDLNPDNSDVDKLFIQLVQTYNQLFEENPINASGVDAKAILSARLSKSRRLENLIAQLPGEKKNGLFGNLIALSLGLTPNFKSNFDLAEDAKLQLSKDTYDDDLDNLLAQIGDQYADLFLAAKNLSDAILLSDILRVNTEITKAPLSASMIKRYDEHHQDLTLLKALVRQQLPEKYKEIFFDQSKNGYAGYIDGGASQEEFYKFIKPILEKMDGTEELLVKLNREDLLRKQRTFDNGSIPHQIHLGELHAILRRQEDFYPFLKDNREKIEKILTFRIPYYVGPLARGNSRFAWMTRKSEETITPWNFEEVVDKGASAQSFIERMTNFDKNLPNEKVLPKHSLLYEYFTVYNELTKVKYVTEGMRKPAFLSGEQKKAIVDLLFKTNRKVTVKQLKEDYFKKIECFDSVEISGVEDRFNASLGTYHDLLKIIKDKDFLDNEENEDILEDIVLTLTLFEDREMIEERLKTYAHLFDDKVMKQLKRRRYTGWGRLSRKLINGIRDKQSGKTILDFLKSDGFANRNFMQLIHDDSLTFKEDIQKAQVSGQGDSLHEHIANLAGSPAIKKGILQTVKVVDELVKVMGRHKPENIVIEMARENQTTQKGQKNSRERMKRIEEGIKELGSQILKEHPVENTQLQNEKLYLYYLQNGRDMYVDQELDINRLSDYDVDHIVPQSFLKDDSIDNKVLTRSDKARGKSDNVPSEEVVKKMKNYWRQLLNAKLITQRKFDNLTKAERGGLSELDKAGFIKRQLVETRQITKHVAQILDSRMNTKYDENDKLIREVKVITLKSKLVSDFRKDFQFYKVREINNYHHAHDAYLNAVVGTALIKKYPKLESEFVYGDYKVYDVRKMIAKSEQEIGKATAKYFFYSNIMNFFKTEITLANGEIRKRPLIETNGETGEIVWDKGRDFATVRKVLSMPQVNIVKKTEVQTGGFSKESILPKRNSDKLIARKKDWDPKKYGGFDSPTVAYSVLVVAKVEKGKSKKLKSVKELLGITIMERSSFEKNPIDFLEAKGYKEVKKDLIIKLPKYSLFELENGRKRMLASAGELQKGNELALPSKYVNFLYLASHYEKLKGSPEDNEQKQLFVEQHKHYLDEIIEQISEFSKRVILADANLDKVLSAYNKHRDKPIREQAENIIHLFTLTNLGAPAAFKYFDTTIDRKRYTSTKEVLDATLIHQSITGLYETRIDLSQLGGDGGPAPEAAAKGSSGGTLNIEDEYRLHETSKGPDVPLGSTWLSDFPQAWAETGGMGLAVRQAPLIIPLKATSTPVSIKQYPMSQEARLGIKPHIQRLLDQGILVPCQSPWNTPLLPVKKPGTNDYRPVQDLREVNKRVEDIHPTVPNPYNLLSGLPPSHQWYTVLDLKDAFFCLRLHPTSQSLFAFEWRDPEMGISGQLTWTRLPQGFKNSPTLFNEALHRDLADFRIQHPDLILLQYVDDLLLAATSELDCQQGTRALLQTLGDLGYRASAKKAQICQKQVKYLGYLLKEGQRWLTEARKETVMGQPTPKTPRQLREFLGTAGFCRLWIPGFAEMAAPLYPLTKPGTLFEWGPDQQKAYQEIKQALLTAPALGLPDLTKPFELFVDEKQGYAKGVLTQKLGPWRRPVAYLSKKLDPVAAGWPPCLRMVAAIAVLTKDAGKLTMGQPLVILAPHAVEALVKQPPDRWLSNARMTHYQALLLDTDRVQFGPIVALNPATLLPLPEEGLQHDCLDILAEAHGTRPDLTDQPLPDADHTWYTDGSSFLQEGQRKAGAAVTTETEVVWAKALPAGTSAQRAELIALTQALKMAEGKKLNVYTDSRYAFATAHIHGEIYRRRGWLTSEGKEIKNKDEILALLKALFLPKRLSIIHCPGHQKGNRAEARGNRMADQAAREVATRETPETSTLLAGKRTADGSEFEKRTADGSEFESPKKKAKVE

SEQ ID NO: 2467 - protein, 2094 aa, synthetic construct
MPAAKRVKLDGGDKKYSIGLDIGTNSVGWAVITDEYKVPSKKFKVLGNTDRHSIKKNLIGALLFDSGETAEATRLKRTARRRYTRRKNRICYLQEIFSNEMAKVDDSFFHRLEESFLVEEDKKHERHPIFGNIVDEVAYHEKYPTIYHLRKKLVDSTDKADLRLIYLALAHMIKFRGHFLIEGDLNPDNSDVDKLFIQLVQTYNQLFEENPINASGVDAKAILSARLSKSRRLENLIAQLPGEKKNGLFGNLIALSLGLTPNFKSNFDLAEDAKLQLSKDTYDDDLDNLLAQIGDQYADLFLAAKNLSDAILLSDILRVNTEITKAPLSASMIKRYDEHHQDLTLLKALVRQQLPEKYKEIFFDQSKNGYAGYIDGGASQEEFYKFIKPILEKMDGTEELLVKLNREDLLRKQRTFDNGSIPHQIHLGELHAILRRQEDFYPFLKDNREKIEKILTFRIPYYVGPLARGNSRFAWMTRKSEETITPWNFEEVVDKGASAQSFIERMTNFDKNLPNEKVLPKHSLLYEYFTVYNELTKVKYVTEGMRKPAFLSGEQKKAIVDLLFKTNRKVTVKQLKEDYFKKIECFDSVEISGVEDRFNASLGTYHDLLKIIKDKDFLDNEENEDILEDIVLTLTLFEDREMIEERLKTYAHLFDDKVMKQLKRRRYTGWGRLSRKLINGIRDKQSGKTILDFLKSDGFANRNFMQLIHDDSLTFKEDIQKAQVSGQGDSLHEHIANLAGSPAIKKGILQTVKVVDELVKVMGRHKPENIVIEMARENQTTQKGQKNSRERMKRIEEGIKELGSQILKEHPVENTQLQNEKLYLYYLQNGRDMYVDQELDINRLSDYDVDHIVPQSFLKDDSIDNKVLTRSDKARGKSDNVPSEEVVKKMKNYWRQLLNAKLITQRKFDNLTKAERGGLSELDKAGFIKRQLVETRQITKHVAQILDSRMNTKYDENDKLIREVKVITLKSKLVSDFRKDFQFYKVREINNYHHAHDAYLNAVVGTALIKKYPKLESEFVYGDYKVYDVRKMIAKSEQEIGKATAKYFFYSNIMNFFKTEITLANGEIRKRPLIETNGETGEIVWDKGRDFATVRKVLSMPQVNIVKKTEVQTGGFSKESILPKRNSDKLIARKKDWDPKKYGGFDSPTVAYSVLVVAKVEKGKSKKLKSVKELLGITIMERSSFEKNPIDFLEAKGYKEVKKDLIIKLPKYSLFELENGRKRMLASAGELQKGNELALPSKYVNFLYLASHYEKLKGSPEDNEQKQLFVEQHKHYLDEIIEQISEFSKRVILADANLDKVLSAYNKHRDKPIREQAENIIHLFTLTNLGAPAAFKYFDTTIDRKRYTSTKEVLDATLIHQSITGLYETRIDLSQLGGDGGPAPGGSGSSGGTLNIEDEYRLHETSKGPDVPLGSTWLSDFPQAWAETGGMGLAVRQAPLIIPLKATSTPVSIKQYPMSQEARLGIKPHIQRLLDQGILVPCQSPWNTPLLPVKKPGTNDYRPVQDLREVNKRVEDIHPTVPNPYNLLSGLPPSHQWYTVLDLKDAFFCLRLHPTSQSLFAFEWRDPEMGISGQLTWTRLPQGFKNSPTLFNEALHRDLADFRIQHPDLILLQYVDDLLLAATSELDCQQGTRALLQTLGDLGYRASAKKAQICQKQVKYLGYLLKEGQRWLTEARKETVMGQPTPKTPRQLREFLGTAGFCRLWIPGFAEMAAPLYPLTKPGTLFEWGPDQQKAYQEIKQALLTAPALGLPDLTKPFELFVDEKQGYAKGVLTQKLGPWRRPVAYLSKKLDPVAAGWPPCLRMVAAIAVLTKDAGKLTMGQPLVILAPHAVEALVKQPPDRWLSNARMTHYQALLLDTDRVQFGPIVALNPATLLPLPEEGLQHDCLDILAEAHGTRPDLTDQPLPDADHTWYTDGSSFLQEGQRKAGAAVTTETEVVWAKALPAGTSAQRAELIALTQALKMAEGKKLNVYTDSRYAFATAHIHGEIYRRRGWLTSEGKEIKNKDEILALLKALFLPKRLSIIHCPGHQKGNRAEARGNRMADQAAREVATRETPETSTLLAGKRTADGSEFEKRTADGSEFESPKKKAKVE

SEQ ID NO: 2468 - protein, 2091 aa, synthetic construct
MPAAKRVKLDGGDKKYSIGLDIGTNSVGWAVITDEYKVPSKKFKVLGNTDRHSIKKNLIGALLFDSGETAEATRLKRTARRRYTRRKNRICYLQEIFSNEMAKVDDSFFHRLEESFLVEEDKKHERHPIFGNIVDEVAYHEKYPTIYHLRKKLVDSTDKADLRLIYLALAHMIKFRGHFLIEGDLNPDNSDVDKLFIQLVQTYNQLFEENPINASGVDAKAILSARLSKSRRLENLIAQLPGEKKNGLFGNLIALSLGLTPNFKSNFDLAEDAKLQLSKDTYDDDLDNLLAQIGDQYADLFLAAKNLSDAILLSDILRVNTEITKAPLSASMIKRYDEHHQDLTLLKALVRQQLPEKYKEIFFDQSKNGYAGYIDGGASQEEFYKFIKPILEKMDGTEELLVKLNREDLLRKQRTFDNGSIPHQIHLGELHAILRRQEDFYPFLKDNREKIEKILTFRIPYYVGPLARGNSRFAWMTRKSEETITPWNFEEVVDKGASAQSFIERMTNFDKNLPNEKVLPKHSLLYEYFTVYNELTKVKYVTEGMRKPAFLSGEQKKAIVDLLFKTNRKVTVKQLKEDYFKKIECFDSVEISGVEDRFNASLGTYHDLLKIIKDKDFLDNEENEDILEDIVLTLTLFEDREMIEERLKTYAHLFDDKVMKQLKRRRYTGWGRLSRKLINGIRDKQSGKTILDFLKSDGFANRNFMQLIHDDSLTFKEDIQKAQVSGQGDSLHEHIANLAGSPAIKKGILQTVKVVDELVKVMGRHKPENIVIEMARENQTTQKGQKNSRERMKRIEEGIKELGSQILKEHPVENTQLQNEKLYLYYLQNGRDMYVDQELDINRLSDYDVDHIVPQSFLKDDSIDNKVLTRSDKARGKSDNVPSEEVVKKMKNYWRQLLNAKLITQRKFDNLTKAERGGLSELDKAGFIKRQLVETRQITKHVAQILDSRMNTKYDENDKLIREVKVITLKSKLVSDFRKDFQFYKVREINNYHHAHDAYLNAVVGTALIKKYPKLESEFVYGDYKVYDVRKMIAKSEQEIGKATAKYFFYSNIMNFFKTEITLANGEIRKRPLIETNGETGEIVWDKGRDFATVRKVLSMPQVNIVKKTEVQTGGFSKESILPKRNSDKLIARKKDWDPKKYGGFDSPTVAYSVLVVAKVEKGKSKKLKSVKELLGITIMERSSFEKNPIDFLEAKGYKEVKKDLIIKLPKYSLFELENGRKRMLASAGELQKGNELALPSKYVNFLYLASHYEKLKGSPEDNEQKQLFVEQHKHYLDEIIEQISEFSKRVILADANLDKVLSAYNKHRDKPIREQAENIIHLFTLTNLGAPAAFKYFDTTIDRKRYTSTKEVLDATLIHQSITGLYETRIDLSQLGGDGGGGGGSSGGTLNIEDEYRLHETSKGPDVPLGSTWLSDFPQAWAETGGMGLAVRQAPLIIPLKATSTPVSIKQYPMSQEARLGIKPHIQRLLDQGILVPCQSPWNTPLLPVKKPGTNDYRPVQDLREVNKRVEDIHPTVPNPYNLLSGLPPSHQWYTVLDLKDAFFCLRLHPTSQSLFAFEWRDPEMGISGQLTWTRLPQGFKNSPTLFNEALHRDLADFRIQHPDLILLQYVDDLLLAATSELDCQQGTRALLQTLGDLGYRASAKKAQICQKQVKYLGYLLKEGQRWLTEARKETVMGQPTPKTPRQLREFLGTAGFCRLWIPGFAEMAAPLYPLTKPGTLFEWGPDQQKAYQEIKQALLTAPALGLPDLTKPFELFVDEKQGYAKGVLTQKLGPWRRPVAYLSKKLDPVAAGWPPCLRMVAAIAVLTKDAGKLTMGQPLVILAPHAVEALVKQPPDRWLSNARMTHYQALLLDTDRVQFGPIVALNPATLLPLPEEGLQHDCLDILAEAHGTRPDLTDQPLPDADHTWYTDGSSFLQEGQRKAGAAVTTETEVVWAKALPAGTSAQRAELIALTQALKMAEGKKLNVYTDSRYAFATAHIHGEIYRRRGWLTSEGKEIKNKDEILALLKALFLPKRLSIIHCPGHQKGNRAEARGNRMADQAAREVATRETPETSTLLAGKRTADGSEFEKRTADGSEFESPKKKAKVE

SEQ ID NO: 2469 - protein, 2096 aa, synthetic construct
MPAAKRVKLDGGDKKYSIGLDIGTNSVGWAVITDEYKVPSKKFKVLGNTDRHSIKKNLIGALLFDSGETAEATRLKRTARRRYTRRKNRICYLQEIFSNEMAKVDDSFFHRLEESFLVEEDKKHERHPIFGNIVDEVAYHEKYPTIYHLRKKLVDSTDKADLRLIYLALAHMIKFRGHFLIEGDLNPDNSDVDKLFIQLVQTYNQLFEENPINASGVDAKAILSARLSKSRRLENLIAQLPGEKKNGLFGNLIALSLGLTPNFKSNFDLAEDAKLQLSKDTYDDDLDNLLAQIGDQYADLFLAAKNLSDAILLSDILRVNTEITKAPLSASMIKRYDEHHQDLTLLKALVRQQLPEKYKEIFFDQSKNGYAGYIDGGASQEEFYKFIKPILEKMDGTEELLVKLNREDLLRKQRTFDNGSIPHQIHLGELHAILRRQEDFYPFLKDNREKIEKILTFRIPYYVGPLARGNSRFAWMTRKSEETITPWNFEEVVDKGASAQSFIERMTNFDKNLPNEKVLPKHSLLYEYFTVYNELTKVKYVTEGMRKPAFLSGEQKKAIVDLLFKTNRKVTVKQLKEDYFKKIECFDSVEISGVEDRFNASLGTYHDLLKIIKDKDFLDNEENEDILEDIVLTLTLFEDREMIEERLKTYAHLFDDKVMKQLKRRRYTGWGRLSRKLINGIRDKQSGKTILDFLKSDGFANRNFMQLIHDDSLTFKEDIQKAQVSGQGDSLHEHIANLAGSPAIKKGILQTVKVVDELVKVMGRHKPENIVIEMARENQTTQKGQKNSRERMKRIEEGIKELGSQILKEHPVENTQLQNEKLYLYYLQNGRDMYVDQELDINRLSDYDVDHIVPQSFLKDDSIDNKVLTRSDKARGKSDNVPSEEVVKKMKNYWRQLLNAKLITQRKFDNLTKAERGGLSELDKAGFIKRQLVETRQITKHVAQILDSRMNTKYDENDKLIREVKVITLKSKLVSDFRKDFQFYKVREINNYHHAHDAYLNAVVGTALIKKYPKLESEFVYGDYKVYDVRKMIAKSEQEIGKATAKYFFYSNIMNFFKTEITLANGEIRKRPLIETNGETGEIVWDKGRDFATVRKVLSMPQVNIVKKTEVQTGGFSKESILPKRNSDKLIARKKDWDPKKYGGFDSPTVAYSVLVVAKVEKGKSKKLKSVKELLGITIMERSSFEKNPIDFLEAKGYKEVKKDLIIKLPKYSLFELENGRKRMLASAGELQKGNELALPSKYVNFLYLASHYEKLKGSPEDNEQKQLFVEQHKHYLDEIIEQISEFSKRVILADANLDKVLSAYNKHRDKPIREQAENIIHLFTLTNLGAPAAFKYFDTTIDRKRYTSTKEVLDATLIHQSITGLYETRIDLSQLGGDGGEAAAKGSSPAPGGTLNIEDEYRLHETSKGPDVPLGSTWLSDFPQAWAETGGMGLAVRQAPLIIPLKATSTPVSIKQYPMSQEARLGIKPHIQRLLDQGILVPCQSPWNTPLLPVKKPGTNDYRPVQDLREVNKRVEDIHPTVPNPYNLLSGLPPSHQWYTVLDLKDAFFCLRLHPTSQSLFAFEWRDPEMGISGQLTWTRLPQGFKNSPTLFNEALHRDLADFRIQHPDLILLQYVDDLLLAATSELDCQQGTRALLQTLGDLGYRASAKKAQICQKQVKYLGYLLKEGQRWLTEARKETVMGQPTPKTPRQLREFLGTAGFCRLWIPGFAEMAAPLYPLTKPGTLFEWGPDQQKAYQEIKQALLTAPALGLPDLTKPFELFVDEKQGYAKGVLTQKLGPWRRPVAYLSKKLDPVAAGWPPCLRMVAAIAVLTKDAGKLTMGQPLVILAPHAVEALVKQPPDRWLSNARMTHYQALLLDTDRVQFGPIVALNPATLLPLPEEGLQHDCLDILAEAHGTRPDLTDQPLPDADHTWYTDGSSFLQEGQRKAGAAVTTETEVVWAKALPAGTSAQRAELIALTQALKMAEGKKLNVYTDSRYAFATAHIHGEIYRRRGWLTSEGKEIKNKDEILALLKALFLPKRLSIIHCPGHQKGNRAEARGNRMADQAAREVATRETPETSTLLAGKRTADGSEFEKRTADGSEFESPKKKAKVE

SEQ ID NO: 2470 - protein, 2096 aa, synthetic construct
MPAAKRVKLDGGDKKYSIGLDIGTNSVGWAVITDEYKVPSKKFKVLGNTDRHSIKKNLIGALLFDSGETAEATRLKRTARRRYTRRKNRICYLQEIFSNEMAKVDDSFFHRLEESFLVEEDKKHERHPIFGNIVDEVAYHEKYPTIYHLRKKLVDSTDKADLRLIYLALAHMIKFRGHFLIEGDLNPDNSDVDKLFIQLVQTYNQLFEENPINASGVDAKAILSARLSKSRRLENLIAQLPGEKKNGLFGNLIALSLGLTPNFKSNFDLAEDAKLQLSKDTYDDDLDNLLAQIGDQYADLFLAAKNLSDAILLSDILRVNTEITKAPLSASMIKRYDEHHQDLTLLKALVRQQLPEKYKEIFFDQSKNGYAGYIDGGASQEEFYKFIKPILEKMDGTEELLVKLNREDLLRKQRTFDNGSIPHQIHLGELHAILRRQEDFYPFLKDNREKIEKILTFRIPYYVGPLARGNSRFAWMTRKSEETITPWNFEEVVDKGASAQSFIERMTNFDKNLPNEKVLPKHSLLYEYFTVYNELTKVKYVTEGMRKPAFLSGEQKKAIVDLLFKTNRKVTVKQLKEDYFKKIECFDSVEISGVEDRFNASLGTYHDLLKIIKDKDFLDNEENEDILEDIVLTLTLFEDREMIEERLKTYAHLFDDKVMKQLKRRRYTGWGRLSRKLINGIRDKQSGKTILDFLKSDGFANRNFMQLIHDDSLTFKEDIQKAQVSGQGDSLHEHIANLAGSPAIKKGILQTVKVVDELVKVMGRHKPENIVIEMARENQTTQKGQKNSRERMKRIEEGIKELGSQILKEHPVENTQLQNEKLYLYYLQNGRDMYVDQELDINRLSDYDVDHIVPQSFLKDDSIDNKVLTRSDKARGKSDNVPSEEVVKKMKNYWRQLLNAKLITQRKFDNLTKAERGGLSELDKAGFIKRQLVETRQITKHVAQILDSRMNTKYDENDKLIREVKVITLKSKLVSDFRKDFQFYKVREINNYHHAHDAYLNAVVGTALIKKYPKLESEFVYGDYKVYDVRKMIAKSEQEIGKATAKYFFYSNIMNFFKTEITLANGEIRKRPLIETNGETGEIVWDKGRDFATVRKVLSMPQVNIVKKTEVQTGGFSKESILPKRNSDKLIARKKDWDPKKYGGFDSPTVAYSVLVVAKVEKGKSKKLKSVKELLGITIMERSSFEKNPIDFLEAKGYKEVKKDLIIKLPKYSLFELENGRKRMLASAGELQKGNELALPSKYVNFLYLASHYEKLKGSPEDNEQKQLFVEQHKHYLDEIIEQISEFSKRVILADANLDKVLSAYNKHRDKPIREQAENIIHLFTLTNLGAPAAFKYFDTTIDRKRYTSTKEVLDATLIHQSITGLYETRIDLSQLGGDGGGGSGSSEAAAKGGTLNIEDEYRLHETSKGPDVPLGSTWLSDFPQAWAETGGMGLAVRQAPLIIPLKATSTPVSIKQYPMSQEARLGIKPHIQRLLDQGILVPCQSPWNTPLLPVKKPGTNDYRPVQDLREVNKRVEDIHPTVPNPYNLLSGLPPSHQWYTVLDLKDAFFCLRLHPTSQSLFAFEWRDPEMGISGQLTWTRLPQGFKNSPTLFNEALHRDLADFRIQHPDLILLQYVDDLLLAATSELDCQQGTRALLQTLGDLGYRASAKKAQICQKQVKYLGYLLKEGQRWLTEARKETVMGQPTPKTPRQLREFLGTAGFCRLWIPGFAEMAAPLYPLTKPGTLFEWGPDQQKAYQEIKQALLTAPALGLPDLTKPFELFVDEKQGYAKGVLTQKLGPWRRPVAYLSKKLDPVAAGWPPCLRMVAAIAVLTKDAGKLTMGQPLVILAPHAVEALVKQPPDRWLSNARMTHYQALLLDTDRVQFGPIVALNPATLLPLPEEGLQHDCLDILAEAHGTRPDLTDQPLPDADHTWYTDGSSFLQEGQRKAGAAVTTETEVVWAKALPAGTSAQRAELIALTQALKMAEGKKLNVYTDSRYAFATAHIHGEIYRRRGWLTSEGKEIKNKDEILALLKALFLPKRLSIIHCPGHQKGNRAEARGNRMADQAAREVATRETPETSTLLAGKRTADGSEFEKRTADGSEFESPKKKAKVE

SEQ ID NO: 2471 - protein, 2094 aa, synthetic construct
MPAAKRVKLDGGDKKYSIGLDIGTNSVGWAVITDEYKVPSKKFKVLGNTDRHSIKKNLIGALLFDSGETAEATRLKRTARRRYTRRKNRICYLQEIFSNEMAKVDDSFFHRLEESFLVEEDKKHERHPIFGNIVDEVAYHEKYPTIYHLRKKLVDSTDKADLRLIYLALAHMIKFRGHFLIEGDLNPDNSDVDKLFIQLVQTYNQLFEENPINASGVDAKAILSARLSKSRRLENLIAQLPGEKKNGLFGNLIALSLGLTPNFKSNFDLAEDAKLQLSKDTYDDDLDNLLAQIGDQYADLFLAAKNLSDAILLSDILRVNTEITKAPLSASMIKRYDEHHQDLTLLKALVRQQLPEKYKEIFFDQSKNGYAGYIDGGASQEEFYKFIKPILEKMDGTEELLVKLNREDLLRKQRTFDNGSIPHQIHLGELHAILRRQEDFYPFLKDNREKIEKILTFRIPYYVGPLARGNSRFAWMTRKSEETITPWNFEEVVDKGASAQSFIERMTNFDKNLPNEKVLPKHSLLYEYFTVYNELTKVKYVTEGMRKPAFLSGEQKKAIVDLLFKTNRKVTVKQLKEDYFKKIECFDSVEISGVEDRFNASLGTYHDLLKIIKDKDFLDNEENEDILEDIVLTLTLFEDREMIEERLKTYAHLFDDKVMKQLKRRRYTGWGRLSRKLINGIRDKQSGKTILDFLKSDGFANRNFMQLIHDDSLTFKEDIQKAQVSGQGDSLHEHIANLAGSPAIKKGILQTVKVVDELVKVMGRHKPENIVIEMARENQTTQKGQKNSRERMKRIEEGIKELGSQILKEHPVENTQLQNEKLYLYYLQNGRDMYVDQELDINRLSDYDVDHIVPQSFLKDDSIDNKVLTRSDKARGKSDNVPSEEVVKKMKNYWRQLLNAKLITQRKFDNLTKAERGGLSELDKAGFIKRQLVETRQITKHVAQILDSRMNTKYDENDKLIREVKVITLKSKLVSDFRKDFQFYKVREINNYHHAHDAYLNAVVGTALIKKYPKLESEFVYGDYKVYDVRKMIAKSEQEIGKATAKYFFYSNIMNFFKTEITLANGEIRKRPLIETNGETGEIVWDKGRDFATVRKVLSMPQVNIVKKTEVQTGGFSKESILPKRNSDKLIARKKDWDPKKYGGFDSPTVAYSVLVVAKVEKGKSKKLKSVKELLGITIMERSSFEKNPIDFLEAKGYKEVKKDLIIKLPKYSLFELENGRKRMLASAGELQKGNELALPSKYVNFLYLASHYEKLKGSPEDNEQKQLFVEQHKHYLDEIIEQISEFSKRVILADANLDKVLSAYNKHRDKPIREQAENIIHLFTLTNLGAPAAFKYFDTTIDRKRYTSTKEVLDATLIHQSITGLYETRIDLSQLGGDGGGSSGSSGSSGGTLNIEDEYRLHETSKGPDVPLGSTWLSDFPQAWAETGGMGLAVRQAPLIIPLKATSTPVSIKQYPMSQEARLGIKPHIQRLLDQGILVPCQSPWNTPLLPVKKPGTNDYRPVQDLREVNKRVEDIHPTVPNPYNLLSGLPPSHQWYTVLDLKDAFFCLRLHPTSQSLFAFEWRDPEMGISGQLTWTRLPQGFKNSPTLFNEALHRDLADFRIQHPDLILLQYVDDLLLAATSELDCQQGTRALLQTLGDLGYRASAKKAQICQKQVKYLGYLLKEGQRWLTEARKETVMGQPTPKTPRQLREFLGTAGFCRLWIPGFAEMAAPLYPLTKPGTLFEWGPDQQKAYQEIKQALLTAPALGLPDLTKPFELFVDEKQGYAKGVLTQKLGPWRRPVAYLSKKLDPVAAGWPPCLRMVAAIAVLTKDAGKLTMGQPLVILAPHAVEALVKQPPDRWLSNARMTHYQALLLDTDRVQFGPIVALNPATLLPLPEEGLQHDCLDILAEAHGTRPDLTDQPLPDADHTWYTDGSSFLQEGQRKAGAAVTTETEVVWAKALPAGTSAQRAELIALTQALKMAEGKKLNVYTDSRYAFATAHIHGEIYRRRGWLTSEGKEIKNKDEILALLKALFLPKRLSIIHCPGHQKGNRAEARGNRMADQAAREVATRETPETSTLLAGKRTADGSEFEKRTADGSEFESPKKKAKVE

SEQ ID NO: 2472 - protein, 2096 aa, synthetic construct
MPAAKRVKLDGGDKKYSIGLDIGTNSVGWAVITDEYKVPSKKFKVLGNTDRHSIKKNLIGALLFDSGETAEATRLKRTARRRYTRRKNRICYLQEIFSNEMAKVDDSFFHRLEESFLVEEDKKHERHPIFGNIVDEVAYHEKYPTIYHLRKKLVDSTDKADLRLIYLALAHMIKFRGHFLIEGDLNPDNSDVDKLFIQLVQTYNQLFEENPINASGVDAKAILSARLSKSRRLENLIAQLPGEKKNGLFGNLIALSLGLTPNFKSNFDLAEDAKLQLSKDTYDDDLDNLLAQIGDQYADLFLAAKNLSDAILLSDILRVNTEITKAPLSASMIKRYDEHHQDLTLLKALVRQQLPEKYKEIFFDQSKNGYAGYIDGGASQEEFYKFIKPILEKMDGTEELLVKLNREDLLRKQRTFDNGSIPHQIHLGELHAILRRQEDFYPFLKDNREKIEKILTFRIPYYVGPLARGNSRFAWMTRKSEETITPWNFEEVVDKGASAQSFIERMTNFDKNLPNEKVLPKHSLLYEYFTVYNELTKVKYVTEGMRKPAFLSGEQKKAIVDLLFKTNRKVTVKQLKEDYFKKIECFDSVEISGVEDRFNASLGTYHDLLKIIKDKDFLDNEENEDILEDIVLTLTLFEDREMIEERLKTYAHLFDDKVMKQLKRRRYTGWGRLSRKLINGIRDKQSGKTILDFLKSDGFANRNFMQLIHDDSLTFKEDIQKAQVSGQGDSLHEHIANLAGSPAIKKGILQTVKVVDELVKVMGRHKPENIVIEMARENQTTQKGQKNSRERMKRIEEGIKELGSQILKEHPVENTQLQNEKLYLYYLQNGRDMYVDQELDINRLSDYDVDHIVPQSFLKDDSIDNKVLTRSDKARGKSDNVPSEEVVKKMKNYWRQLLNAKLITQRKFDNLTKAERGGLSELDKAGFIKRQLVETRQITKHVAQILDSRMNTKYDENDKLIREVKVITLKSKLVSDFRKDFQFYKVREINNYHHAHDAYLNAVVGTALIKKYPKLESEFVYGDYKVYDVRKMIAKSEQEIGKATAKYFFYSNIMNFFKTEITLANGEIRKRPLIETNGETGEIVWDKGRDFATVRKVLSMPQVNIVKKTEVQTGGFSKESILPKRNSDKLIARKKDWDPKKYGGFDSPTVAYSVLVVAKVEKGKSKKLKSVKELLGITIMERSSFEKNPIDFLEAKGYKEVKKDLIIKLPKYSLFELENGRKRMLASAGELQKGNELALPSKYVNFLYLASHYEKLKGSPEDNEQKQLFVEQHKHYLDEIIEQISEFSKRVILADANLDKVLSAYNKHRDKPIREQAENIIHLFTLTNLGAPAAFKYFDTTIDRKRYTSTKEVLDATLIHQSITGLYETRIDLSQLGGDGGGGGPAPEAAAKGGTLNIEDEYRLHETSKGPDVPLGSTWLSDFPQAWAETGGMGLAVRQAPLIIPLKATSTPVSIKQYPMSQEARLGIKPHIQRLLDQGILVPCQSPWNTPLLPVKKPGTNDYRPVQDLREVNKRVEDIHPTVPNPYNLLSGLPPSHQWYTVLDLKDAFFCLRLHPTSQSLFAFEWRDPEMGISGQLTWTRLPQGFKNSPTLFNEALHRDLADFRIQHPDLILLQYVDDLLLAATSELDCQQGTRALLQTLGDLGYRASAKKAQICQKQVKYLGYLLKEGQRWLTEARKETVMGQPTPKTPRQLREFLGTAGFCRLWIPGFAEMAAPLYPLTKPGTLFEWGPDQQKAYQEIKQALLTAPALGLPDLTKPFELFVDEKQGYAKGVLTQKLGPWRRPVAYLSKKLDPVAAGWPPCLRMVAAIAVLTKDAGKLTMGQPLVILAPHAVEALVKQPPDRWLSNARMTHYQALLLDTDRVQFGPIVALNPATLLPLPEEGLQHDCLDILAEAHGTRPDLTDQPLPDADHTWYTDGSSFLQEGQRKAGAAVTTETEVVWAKALPAGTSAQRAELIALTQALKMAEGKKLNVYTDSRYAFATAHIHGEIYRRRGWLTSEGKEIKNKDEILALLKALFLPKRLSIIHCPGHQKGNRAEARGNRMADQAAREVATRETPETSTLLAGKRTADGSEFEKRTADGSEFESPKKKAKVE

SEQ ID NO: 2473 - protein, 2096 aa, synthetic construct
MPAAKRVKLDGGDKKYSIGLDIGTNSVGWAVITDEYKVPSKKFKVLGNTDRHSIKKNLIGALLFDSGETAEATRLKRTARRRYTRRKNRICYLQEIFSNEMAKVDDSFFHRLEESFLVEEDKKHERHPIFGNIVDEVAYHEKYPTIYHLRKKLVDSTDKADLRLIYLALAHMIKFRGHFLIEGDLNPDNSDVDKLFIQLVQTYNQLFEENPINASGVDAKAILSARLSKSRRLENLIAQLPGEKKNGLFGNLIALSLGLTPNFKSNFDLAEDAKLQLSKDTYDDDLDNLLAQIGDQYADLFLAAKNLSDAILLSDILRVNTEITKAPLSASMIKRYDEHHQDLTLLKALVRQQLPEKYKEIFFDQSKNGYAGYIDGGASQEEFYKFIKPILEKMDGTEELLVKLNREDLLRKQRTFDNGSIPHQIHLGELHAILRRQEDFYPFLKDNREKIEKILTFRIPYYVGPLARGNSRFAWMTRKSEETITPWNFEEVVDKGASAQSFIERMTNFDKNLPNEKVLPKHSLLYEYFTVYNELTKVKYVTEGMRKPAFLSGEQKKAIVDLLFKTNRKVTVKQLKEDYFKKIECFDSVEISGVEDRFNASLGTYHDLLKIIKDKDFLDNEENEDILEDIVLTLTLFEDREMIEERLKTYAHLFDDKVMKQLKRRRYTGWGRLSRKLINGIRDKQSGKTILDFLKSDGFANRNFMQLIHDDSLTFKEDIQKAQVSGQGDSLHEHIANLAGSPAIKKGILQTVKVVDELVKVMGRHKPENIVIEMARENQTTQKGQKNSRERMKRIEEGIKELGSQILKEHPVENTQLQNEKLYLYYLQNGRDMYVDQELDINRLSDYDVDHIVPQSFLKDDSIDNKVLTRSDKARGKSDNVPSEEVVKKMKNYWRQLLNAKLITQRKFDNLTKAERGGLSELDKAGFIKRQLVETRQITKHVAQILDSRMNTKYDENDKLIREVKVITLKSKLVSDFRKDFQFYKVREINNYHHAHDAYLNAVVGTALIKKYPKLESEFVYGDYKVYDVRKMIAKSEQEIGKATAKYFFYSNIMNFFKTEITLANGEIRKRPLIETNGETGEIVWDKGRDFATVRKVLSMPQVNIVKKTEVQTGGFSKESILPKRNSDKLIARKKDWDPKKYGGFDSPTVAYSVLVVAKVEKGKSKKLKSVKELLGITIMERSSFEKNPIDFLEAKGYKEVKKDLIIKLPKYSLFELENGRKRMLASAGELQKGNELALPSKYVNFLYLASHYEKLKGSPEDNEQKQLFVEQHKHYLDEIIEQISEFSKRVILADANLDKVLSAYNKHRDKPIREQAENIIHLFTLTNLGAPAAFKYFDTTIDRKRYTSTKEVLDATLIHQSITGLYETRIDLSQLGGDGGEAAAKPAPGSSGGTLNIEDEYRLHETSKGPDVPLGSTWLSDFPQAWAETGGMGLAVRQAPLIIPLKATSTPVSIKQYPMSQEARLGIKPHIQRLLDQGILVPCQSPWNTPLLPVKKPGTNDYRPVQDLREVNKRVEDIHPTVPNPYNLLSGLPPSHQWYTVLDLKDAFFCLRLHPTSQSLFAFEWRDPEMGISGQLTWTRLPQGFKNSPTLFNEALHRDLADFRIQHPDLILLQYVDDLLLAATSELDCQQGTRALLQTLGDLGYRASAKKAQICQKQVKYLGYLLKEGQRWLTEARKETVMGQPTPKTPRQLREFLGTAGFCRLWIPGFAEMAAPLYPLTKPGTLFEWGPDQQKAYQEIKQALLTAPALGLPDLTKPFELFVDEKQGYAKGVLTQKLGPWRRPVAYLSKKLDPVAAGWPPCLRMVAAIAVLTKDAGKLTMGQPLVILAPHAVEALVKQPPDRWLSNARMTHYQALLLDTDRVQFGPIVALNPATLLPLPEEGLQHDCLDILAEAHGTRPDLTDQPLPDADHTWYTDGSSFLQEGQRKAGAAVTTETEVVWAKALPAGTSAQRAELIALTQALKMAEGKKLNVYTDSRYAFATAHIHGEIYRRRGWLTSEGKEIKNKDEILALLKALFLPKRLSIIHCPGHQKGNRAEARGNRMADQAAREVATRETPETSTLLAGKRTADGSEFEKRTADGSEFESPKKKAKVE

SEQ ID NO: 2474 - protein, 2096 aa, synthetic construct
MPAAKRVKLDGGDKKYSIGLDIGTNSVGWAVITDEYKVPSKKFKVLGNTDRHSIKKNLIGALLFDSGETAEATRLKRTARRRYTRRKNRICYLQEIFSNEMAKVDDSFFHRLEESFLVEEDKKHERHPIFGNIVDEVAYHEKYPTIYHLRKKLVDSTDKADLRLIYLALAHMIKFRGHFLIEGDLNPDNSDVDKLFIQLVQTYNQLFEENPINASGVDAKAILSARLSKSRRLENLIAQLPGEKKNGLFGNLIALSLGLTPNFKSNFDLAEDAKLQLSKDTYDDDLDNLLAQIGDQYADLFLAAKNLSDAILLSDILRVNTEITKAPLSASMIKRYDEHHQDLTLLKALVRQQLPEKYKEIFFDQSKNGYAGYIDGGASQEEFYKFIKPILEKMDGTEELLVKLNREDLLRKQRTFDNGSIPHQIHLGELHAILRRQEDFYPFLKDNREKIEKILTFRIPYYVGPLARGNSRFAWMTRKSEETITPWNFEEVVDKGASAQSFIERMTNFDKNLPNEKVLPKHSLLYEYFTVYNELTKVKYVTEGMRKPAFLSGEQKKAIVDLLFKTNRKVTVKQLKEDYFKKIECFDSVEISGVEDRFNASLGTYHDLLKIIKDKDFLDNEENEDILEDIVLTLTLFEDREMIEERLKTYAHLFDDKVMKQLKRRRYTGWGRLSRKLINGIRDKQSGKTILDFLKSDGFANRNFMQLIHDDSLTFKEDIQKAQVSGQGDSLHEHIANLAGSPAIKKGILQTVKVVDELVKVMGRHKPENIVIEMARENQTTQKGQKNSRERMKRIEEGIKELGSQILKEHPVENTQLQNEKLYLYYLQNGRDMYVDQELDINRLSDYDVDHIVPQSFLKDDSIDNKVLTRSDKARGKSDNVPSEEVVKKMKNYWRQLLNAKLITQRKFDNLTKAERGGLSELDKAGFIKRQLVETRQITKHVAQILDSRMNTKYDENDKLIREVKVITLKSKLVSDFRKDFQFYKVREINNYHHAHDAYLNAVVGTALIKKYPKLESEFVYGDYKVYDVRKMIAKSEQEIGKATAKYFFYSNIMNFFKTEITLANGEIRKRPLIETNGETGEIVWDKGRDFATVRKVLSMPQVNIVKKTEVQTGGFSKESILPKRNSDKLIARKKDWDPKKYGGFDSPTVAYSVLVVAKVEKGKSKKLKSVKELLGITIMERSSFEKNPIDFLEAKGYKEVKKDLIIKLPKYSLFELENGRKRMLASAGELQKGNELALPSKYVNFLYLASHYEKLKGSPEDNEQKQLFVEQHKHYLDEIIEQISEFSKRVILADANLDKVLSAYNKHRDKPIREQAENIIHLFTLTNLGAPAAFKYFDTTIDRKRYTSTKEVLDATLIHQSITGLYETRIDLSQLGGDGGEAAAKGGSPAPGGTLNIEDEYRLHETSKGPDVPLGSTWLSDFPQAWAETGGMGLAVRQAPLIIPLKATSTPVSIKQYPMSQEARLGIKPHIQRLLDQGILVPCQSPWNTPLLPVKKPGTNDYRPVQDLREVNKRVEDIHPTVPNPYNLLSGLPPSHQWYTVLDLKDAFFCLRLHPTSQSLFAFEWRDPEMGISGQLTWTRLPQGFKNSPTLFNEALHRDLADFRIQHPDLILLQYVDDLLLAATSELDCQQGTRALLQTLGDLGYRASAKKAQICQKQVKYLGYLLKEGQRWLTEARKETVMGQPTPKTPRQLREFLGTAGFCRLWIPGFAEMAAPLYPLTKPGTLFEWGPDQQKAYQEIKQALLTAPALGLPDLTKPFELFVDEKQGYAKGVLTQKLGPWRRPVAYLSKKLDPVAAGWPPCLRMVAAIAVLTKDAGKLTMGQPLVILAPHAVEALVKQPPDRWLSNARMTHYQALLLDTDRVQFGPIVALNPATLLPLPEEGLQHDCLDILAEAHGTRPDLTDQPLPDADHTWYTDGSSFLQEGQRKAGAAVTTETEVVWAKALPAGTSAQRAELIALTQALKMAEGKKLNVYTDSRYAFATAHIHGEIYRRRGWLTSEGKEIKNKDEILALLKALFLPKRLSIIHCPGHQKGNRAEARGNRMADQAAREVATRETPETSTLLAGKRTADGSEFEKRTADGSEFESPKKKAKVE

SEQ ID NO: 2475 - protein, 2093 aa, synthetic construct
MPAAKRVKLDGGDKKYSIGLDIGTNSVGWAVITDEYKVPSKKFKVLGNTDRHSIKKNLIGALLFDSGETAEATRLKRTARRRYTRRKNRICYLQEIFSNEMAKVDDSFFHRLEESFLVEEDKKHERHPIFGNIVDEVAYHEKYPTIYHLRKKLVDSTDKADLRLIYLALAHMIKFRGHFLIEGDLNPDNSDVDKLFIQLVQTYNQLFEENPINASGVDAKAILSARLSKSRRLENLIAQLPGEKKNGLFGNLIALSLGLTPNFKSNFDLAEDAKLQLSKDTYDDDLDNLLAQIGDQYADLFLAAKNLSDAILLSDILRVNTEITKAPLSASMIKRYDEHHQDLTLLKALVRQQLPEKYKEIFFDQSKNGYAGYIDGGASQEEFYKFIKPILEKMDGTEELLVKLNREDLLRKQRTFDNGSIPHQIHLGELHAILRRQEDFYPFLKDNREKIEKILTFRIPYYVGPLARGNSRFAWMTRKSEETITPWNFEEVVDKGASAQSFIERMTNFDKNLPNEKVLPKHSLLYEYFTVYNELTKVKYVTEGMRKPAFLSGEQKKAIVDLLFKTNRKVTVKQLKEDYFKKIECFDSVEISGVEDRFNASLGTYHDLLKIIKDKDFLDNEENEDILEDIVLTLTLFEDREMIEERLKTYAHLFDDKVMKQLKRRRYTGWGRLSRKLINGIRDKQSGKTILDFLKSDGFANRNFMQLIHDDSLTFKEDIQKAQVSGQGDSLHEHIANLAGSPAIKKGILQTVKVVDELVKVMGRHKPENIVIEMARENQTTQKGQKNSRERMKRIEEGIKELGSQILKEHPVENTQLQNEKLYLYYLQNGRDMYVDQELDINRLSDYDVDHIVPQSFLKDDSIDNKVLTRSDKARGKSDNVPSEEVVKKMKNYWRQLLNAKLITQRKFDNLTKAERGGLSELDKAGFIKRQLVETRQITKHVAQILDSRMNTKYDENDKLIREVKVITLKSKLVSDFRKDFQFYKVREINNYHHAHDAYLNAVVGTALIKKYPKLESEFVYGDYKVYDVRKMIAKSEQEIGKATAKYFFYSNIMNFFKTEITLANGEIRKRPLIETNGETGEIVWDKGRDFATVRKVLSMPQVNIVKKTEVQTGGFSKESILPKRNSDKLIARKKDWDPKKYGGFDSPTVAYSVLVVAKVEKGKSKKLKSVKELLGITIMERSSFEKNPIDFLEAKGYKEVKKDLIIKLPKYSLFELENGRKRMLASAGELQKGNELALPSKYVNFLYLASHYEKLKGSPEDNEQKQLFVEQHKHYLDEIIEQISEFSKRVILADANLDKVLSAYNKHRDKPIREQAENIIHLFTLTNLGAPAAFKYFDTTIDRKRYTSTKEVLDATLIHQSITGLYETRIDLSQLGGDGGGSSEAAAKGGTLNIEDEYRLHETSKGPDVPLGSTWLSDFPQAWAETGGMGLAVRQAPLIIPLKATSTPVSIKQYPMSQEARLGIKPHIQRLLDQGILVPCQSPWNTPLLPVKKPGTNDYRPVQDLREVNKRVEDIHPTVPNPYNLLSGLPPSHQWYTVLDLKDAFFCLRLHPTSQSLFAFEWRDPEMGISGQLTWTRLPQGFKNSPTLFNEALHRDLADFRIQHPDLILLQYVDDLLLAATSELDCQQGTRALLQTLGDLGYRASAKKAQICQKQVKYLGYLLKEGQRWLTEARKETVMGQPTPKTPRQLREFLGTAGFCRLWIPGFAEMAAPLYPLTKPGTLFEWGPDQQKAYQEIKQALLTAPALGLPDLTKPFELFVDEKQGYAKGVLTQKLGPWRRPVAYLSKKLDPVAAGWPPCLRMVAAIAVLTKDAGKLTMGQPLVILAPHAVEALVKQPPDRWLSNARMTHYQALLLDTDRVQFGPIVALNPATLLPLPEEGLQHDCLDILAEAHGTRPDLTDQPLPDADHTWYTDGSSFLQEGQRKAGAAVTTETEVVWAKALPAGTSAQRAELIALTQALKMAEGKKLNVYTDSRYAFATAHIHGEIYRRRGWLTSEGKEIKNKDEILALLKALFLPKRLSIIHCPGHQKGNRAEARGNRMADQAAREVATRETPETSTLLAGKRTADGSEFEKRTADGSEFESPKKKAKVE

SEQ ID NO: 2476 - protein, 2094 aa, synthetic construct
MPAAKRVKLDGGDKKYSIGLDIGTNSVGWAVITDEYKVPSKKFKVLGNTDRHSIKKNLIGALLFDSGETAEATRLKRTARRRYTRRKNRICYLQEIFSNEMAKVDDSFFHRLEESFLVEEDKKHERHPIFGNIVDEVAYHEKYPTIYHLRKKLVDSTDKADLRLIYLALAHMIKFRGHFLIEGDLNPDNSDVDKLFIQLVQTYNQLFEENPINASGVDAKAILSARLSKSRRLENLIAQLPGEKKNGLFGNLIALSLGLTPNFKSNFDLAEDAKLQLSKDTYDDDLDNLLAQIGDQYADLFLAAKNLSDAILLSDILRVNTEITKAPLSASMIKRYDEHHQDLTLLKALVRQQLPEKYKEIFFDQSKNGYAGYIDGGASQEEFYKFIKPILEKMDGTEELLVKLNREDLLRKQRTFDNGSIPHQIHLGELHAILRRQEDFYPFLKDNREKIEKILTFRIPYYVGPLARGNSRFAWMTRKSEETITPWNFEEVVDKGASAQSFIERMTNFDKNLPNEKVLPKHSLLYEYFTVYNELTKVKYVTEGMRKPAFLSGEQKKAIVDLLFKTNRKVTVKQLKEDYFKKIECFDSVEISGVEDRFNASLGTYHDLLKIIKDKDFLDNEENEDILEDIVLTLTLFEDREMIEERLKTYAHLFDDKVMKQLKRRRYTGWGRLSRKLINGIRDKQSGKTILDFLKSDGFANRNFMQLIHDDSLTFKEDIQKAQVSGQGDSLHEHIANLAGSPAIKKGILQTVKVVDELVKVMGRHKPENIVIEMARENQTTQKGQKNSRERMKRIEEGIKELGSQILKEHPVENTQLQNEKLYLYYLQNGRDMYVDQELDINRLSDYDVDHIVPQSFLKDDSIDNKVLTRSDKARGKSDNVPSEEVVKKMKNYWRQLLNAKLITQRKFDNLTKAERGGLSELDKAGFIKRQLVETRQITKHVAQILDSRMNTKYDENDKLIREVKVITLKSKLVSDFRKDFQFYKVREINNYHHAHDAYLNAVVGTALIKKYPKLESEFVYGDYKVYDVRKMIAKSEQEIGKATAKYFFYSNIMNFFKTEITLANGEIRKRPLIETNGETGEIVWDKGRDFATVRKVLSMPQVNIVKKTEVQTGGFSKESILPKRNSDKLIARKKDWDPKKYGGFDSPTVAYSVLVVAKVEKGKSKKLKSVKELLGITIMERSSFEKNPIDFLEAKGYKEVKKDLIIKLPKYSLFELENGRKRMLASAGELQKGNELALPSKYVNFLYLASHYEKLKGSPEDNEQKQLFVEQHKHYLDEIIEQISEFSKRVILADANLDKVLSAYNKHRDKPIREQAENIIHLFTLTNLGAPAAFKYFDTTIDRKRYTSTKEVLDATLIHQSITGLYETRIDLSQLGGDGGGGSPAPGGGGGTLNIEDEYRLHETSKGPDVPLGSTWLSDFPQAWAETGGMGLAVRQAPLIIPLKATSTPVSIKQYPMSQEARLGIKPHIQRLLDQGILVPCQSPWNTPLLPVKKPGTNDYRPVQDLREVNKRVEDIHPTVPNPYNLLSGLPPSHQWYTVLDLKDAFFCLRLHPTSQSLFAFEWRDPEMGISGQLTWTRLPQGFKNSPTLFNEALHRDLADFRIQHPDLILLQYVDDLLLAATSELDCQQGTRALLQTLGDLGYRASAKKAQICQKQVKYLGYLLKEGQRWLTEARKETVMGQPTPKTPRQLREFLGTAGFCRLWIPGFAEMAAPLYPLTKPGTLFEWGPDQQKAYQEIKQALLTAPALGLPDLTKPFELFVDEKQGYAKGVLTQKLGPWRRPVAYLSKKLDPVAAGWPPCLRMVAAIAVLTKDAGKLTMGQPLVILAPHAVEALVKQPPDRWLSNARMTHYQALLLDTDRVQFGPIVALNPATLLPLPEEGLQHDCLDILAEAHGTRPDLTDQPLPDADHTWYTDGSSFLQEGQRKAGAAVTTETEVVWAKALPAGTSAQRAELIALTQALKMAEGKKLNVYTDSRYAFATAHIHGEIYRRRGWLTSEGKEIKNKDEILALLKALFLPKRLSIIHCPGHQKGNRAEARGNRMADQAAREVATRETPETSTLLAGKRTADGSEFEKRTADGSEFESPKKKAKVE

SEQ ID NO: 2477 - protein, 2091 aa, synthetic construct
MPAAKRVKLDGGDKKYSIGLDIGTNSVGWAVITDEYKVPSKKFKVLGNTDRHSIKKNLIGALLFDSGETAEATRLKRTARRRYTRRKNRICYLQEIFSNEMAKVDDSFFHRLEESFLVEEDKKHERHPIFGNIVDEVAYHEKYPTIYHLRKKLVDSTDKADLRLIYLALAHMIKFRGHFLIEGDLNPDNSDVDKLFIQLVQTYNQLFEENPINASGVDAKAILSARLSKSRRLENLIAQLPGEKKNGLFGNLIALSLGLTPNFKSNFDLAEDAKLQLSKDTYDDDLDNLLAQIGDQYADLFLAAKNLSDAILLSDILRVNTEITKAPLSASMIKRYDEHHQDLTLLKALVRQQLPEKYKEIFFDQSKNGYAGYIDGGASQEEFYKFIKPILEKMDGTEELLVKLNREDLLRKQRTFDNGSIPHQIHLGELHAILRRQEDFYPFLKDNREKIEKILTFRIPYYVGPLARGNSRFAWMTRKSEETITPWNFEEVVDKGASAQSFIERMTNFDKNLPNEKVLPKHSLLYEYFTVYNELTKVKYVTEGMRKPAFLSGEQKKAIVDLLFKTNRKVTVKQLKEDYFKKIECFDSVEISGVEDRFNASLGTYHDLLKIIKDKDFLDNEENEDILEDIVLTLTLFEDREMIEERLKTYAHLFDDKVMKQLKRRRYTGWGRLSRKLINGIRDKQSGKTILDFLKSDGFANRNFMQLIHDDSLTFKEDIQKAQVSGQGDSLHEHIANLAGSPAIKKGILQTVKVVDELVKVMGRHKPENIVIEMARENQTTQKGQKNSRERMKRIEEGIKELGSQILKEHPVENTQLQNEKLYLYYLQNGRDMYVDQELDINRLSDYDVDHIVPQSFLKDDSIDNKVLTRSDKARGKSDNVPSEEVVKKMKNYWRQLLNAKLITQRKFDNLTKAERGGLSELDKAGFIKRQLVETRQITKHVAQILDSRMNTKYDENDKLIREVKVITLKSKLVSDFRKDFQFYKVREINNYHHAHDAYLNAVVGTALIKKYPKLESEFVYGDYKVYDVRKMIAKSEQEIGKATAKYFFYSNIMNFFKTEITLANGEIRKRPLIETNGETGEIVWDKGRDFATVRKVLSMPQVNIVKKTEVQTGGFSKESILPKRNSDKLIARKKDWDPKKYGGFDSPTVAYSVLVVAKVEKGKSKKLKSVKELLGITIMERSSFEKNPIDFLEAKGYKEVKKDLIIKLPKYSLFELENGRKRMLASAGELQKGNELALPSKYVNFLYLASHYEKLKGSPEDNEQKQLFVEQHKHYLDEIIEQISEFSKRVILADANLDKVLSAYNKHRDKPIREQAENIIHLFTLTNLGAPAAFKYFDTTIDRKRYTSTKEVLDATLIHQSITGLYETRIDLSQLGGDGGGSSPAPGGTLNIEDEYRLHETSKGPDVPLGSTWLSDFPQAWAETGGMGLAVRQAPLIIPLKATSTPVSIKQYPMSQEARLGIKPHIQRLLDQGILVPCQSPWNTPLLPVKKPGTNDYRPVQDLREVNKRVEDIHPTVPNPYNLLSGLPPSHQWYTVLDLKDAFFCLRLHPTSQSLFAFEWRDPEMGISGQLTWTRLPQGFKNSPTLFNEALHRDLADFRIQHPDLILLQYVDDLLLAATSELDCQQGTRALLQTLGDLGYRASAKKAQICQKQVKYLGYLLKEGQRWLTEARKETVMGQPTPKTPRQLREFLGTAGFCRLWIPGFAEMAAPLYPLTKPGTLFEWGPDQQKAYQEIKQALLTAPALGLPDLTKPFELFVDEKQGYAKGVLTQKLGPWRRPVAYLSKKLDPVAAGWPPCLRMVAAIAVLTKDAGKLTMGQPLVILAPHAVEALVKQPPDRWLSNARMTHYQALLLDTDRVQFGPIVALNPATLLPLPEEGLQHDCLDILAEAHGTRPDLTDQPLPDADHTWYTDGSSFLQEGQRKAGAAVTTETEVVWAKALPAGTSAQRAELIALTQALKMAEGKKLNVYTDSRYAFATAHIHGEIYRRRGWLTSEGKEIKNKDEILALLKALFLPKRLSIIHCPGHQKGNRAEARGNRMADQAAREVATRETPETSTLLAGKRTADGSEFEKRTADGSEFESPKKKAKVE

SEQ ID NO: 2478 - protein, 2091 aa, synthetic construct
MPAAKRVKLDGGDKKYSIGLDIGTNSVGWAVITDEYKVPSKKFKVLGNTDRHSIKKNLIGALLFDSGETAEATRLKRTARRRYTRRKNRICYLQEIFSNEMAKVDDSFFHRLEESFLVEEDKKHERHPIFGNIVDEVAYHEKYPTIYHLRKKLVDSTDKADLRLIYLALAHMIKFRGHFLIEGDLNPDNSDVDKLFIQLVQTYNQLFEENPINASGVDAKAILSARLSKSRRLENLIAQLPGEKKNGLFGNLIALSLGLTPNFKSNFDLAEDAKLQLSKDTYDDDLDNLLAQIGDQYADLFLAAKNLSDAILLSDILRVNTEITKAPLSASMIKRYDEHHQDLTLLKALVRQQLPEKYKEIFFDQSKNGYAGYIDGGASQEEFYKFIKPILEKMDGTEELLVKLNREDLLRKQRTFDNGSIPHQIHLGELHAILRRQEDFYPFLKDNREKIEKILTFRIPYYVGPLARGNSRFAWMTRKSEETITPWNFEEVVDKGASAQSFIERMTNFDKNLPNEKVLPKHSLLYEYFTVYNELTKVKYVTEGMRKPAFLSGEQKKAIVDLLFKTNRKVTVKQLKEDYFKKIECFDSVEISGVEDRFNASLGTYHDLLKIIKDKDFLDNEENEDILEDIVLTLTLFEDREMIEERLKTYAHLFDDKVMKQLKRRRYTGWGRLSRKLINGIRDKQSGKTILDFLKSDGFANRNFMQLIHDDSLTFKEDIQKAQVSGQGDSLHEHIANLAGSPAIKKGILQTVKVVDELVKVMGRHKPENIVIEMARENQTTQKGQKNSRERMKRIEEGIKELGSQILKEHPVENTQLQNEKLYLYYLQNGRDMYVDQELDINRLSDYDVDHIVPQSFLKDDSIDNKVLTRSDKARGKSDNVPSEEVVKKMKNYWRQLLNAKLITQRKFDNLTKAERGGLSELDKAGFIKRQLVETRQITKHVAQILDSRMNTKYDENDKLIREVKVITLKSKLVSDFRKDFQFYKVREINNYHHAHDAYLNAVVGTALIKKYPKLESEFVYGDYKVYDVRKMIAKSEQEIGKATAKYFFYSNIMNFFKTEITLANGEIRKRPLIETNGETGEIVWDKGRDFATVRKVLSMPQVNIVKKTEVQTGGFSKESILPKRNSDKLIARKKDWDPKKYGGFDSPTVAYSVLVVAKVEKGKSKKLKSVKELLGITIMERSSFEKNPIDFLEAKGYKEVKKDLIIKLPKYSLFELENGRKRMLASAGELQKGNELALPSKYVNFLYLASHYEKLKGSPEDNEQKQLFVEQHKHYLDEIIEQISEFSKRVILADANLDKVLSAYNKHRDKPIREQAENIIHLFTLTNLGAPAAFKYFDTTIDRKRYTSTKEVLDATLIHQSITGLYETRIDLSQLGGDGGGGSGGGGGTLNIEDEYRLHETSKGPDVPLGSTWLSDFPQAWAETGGMGLAVRQAPLIIPLKATSTPVSIKQYPMSQEARLGIKPHIQRLLDQGILVPCQSPWNTPLLPVKKPGTNDYRPVQDLREVNKRVEDIHPTVPNPYNLLSGLPPSHQWYTVLDLKDAFFCLRLHPTSQSLFAFEWRDPEMGISGQLTWTRLPQGFKNSPTLFNEALHRDLADFRIQHPDLILLQYVDDLLLAATSELDCQQGTRALLQTLGDLGYRASAKKAQICQKQVKYLGYLLKEGQRWLTEARKETVMGQPTPKTPRQLREFLGTAGFCRLWIPGFAEMAAPLYPLTKPGTLFEWGPDQQKAYQEIKQALLTAPALGLPDLTKPFELFVDEKQGYAKGVLTQKLGPWRRPVAYLSKKLDPVAAGWPPCLRMVAAIAVLTKDAGKLTMGQPLVILAPHAVEALVKQPPDRWLSNARMTHYQALLLDTDRVQFGPIVALNPATLLPLPEEGLQHDCLDILAEAHGTRPDLTDQPLPDADHTWYTDGSSFLQEGQRKAGAAVTTETEVVWAKALPAGTSAQRAELIALTQALKMAEGKKLNVYTDSRYAFATAHIHGEIYRRRGWLTSEGKEIKNKDEILALLKALFLPKRLSIIHCPGHQKGNRAEARGNRMADQAAREVATRETPETSTLLAGKRTADGSEFEKRTADGSEFESPKKKAKVE

SEQ ID NO: 2479 - protein, 2094 aa, synthetic construct
MPAAKRVKLDGGDKKYSIGLDIGTNSVGWAVITDEYKVPSKKFKVLGNTDRHSIKKNLIGALLFDSGETAEATRLKRTARRRYTRRKNRICYLQEIFSNEMAKVDDSFFHRLEESFLVEEDKKHERHPIFGNIVDEVAYHEKYPTIYHLRKKLVDSTDKADLRLIYLALAHMIKFRGHFLIEGDLNPDNSDVDKLFIQLVQTYNQLFEENPINASGVDAKAILSARLSKSRRLENLIAQLPGEKKNGLFGNLIALSLGLTPNFKSNFDLAEDAKLQLSKDTYDDDLDNLLAQIGDQYADLFLAAKNLSDAILLSDILRVNTEITKAPLSASMIKRYDEHHQDLTLLKALVRQQLPEKYKEIFFDQSKNGYAGYIDGGASQEEFYKFIKPILEKMDGTEELLVKLNREDLLRKQRTFDNGSIPHQIHLGELHAILRRQEDFYPFLKDNREKIEKILTFRIPYYVGPLARGNSRFAWMTRKSEETITPWNFEEVVDKGASAQSFIERMTNFDKNLPNEKVLPKHSLLYEYFTVYNELTKVKYVTEGMRKPAFLSGEQKKAIVDLLFKTNRKVTVKQLKEDYFKKIECFDSVEISGVEDRFNASLGTYHDLLKIIKDKDFLDNEENEDILEDIVLTLTLFEDREMIEERLKTYAHLFDDKVMKQLKRRRYTGWGRLSRKLINGIRDKQSGKTILDFLKSDGFANRNFMQLIHDDSLTFKEDIQKAQVSGQGDSLHEHIANLAGSPAIKKGILQTVKVVDELVKVMGRHKPENIVIEMARENQTTQKGQKNSRERMKRIEEGIKELGSQILKEHPVENTQLQNEKLYLYYLQNGRDMYVDQELDINRLSDYDVDHIVPQSFLKDDSIDNKVLTRSDKARGKSDNVPSEEVVKKMKNYWRQLLNAKLITQRKFDNLTKAERGGLSELDKAGFIKRQLVETRQITKHVAQILDSRMNTKYDENDKLIREVKVITLKSKLVSDFRKDFQFYKVREINNYHHAHDAYLNAVVGTALIKKYPKLESEFVYGDYKVYDVRKMIAKSEQEIGKATAKYFFYSNIMNFFKTEITLANGEIRKRPLIETNGETGEIVWDKGRDFATVRKVLSMPQVNIVKKTEVQTGGFSKESILPKRNSDKLIARKKDWDPKKYGGFDSPTVAYSVLVVAKVEKGKSKKLKSVKELLGITIMERSSFEKNPIDFLEAKGYKEVKKDLIIKLPKYSLFELENGRKRMLASAGELQKGNELALPSKYVNFLYLASHYEKLKGSPEDNEQKQLFVEQHKHYLDEIIEQISEFSKRVILADANLDKVLSAYNKHRDKPIREQAENIIHLFTLTNLGAPAAFKYFDTTIDRKRYTSTKEVLDATLIHQSITGLYETRIDLSQLGGDGGGGSGGGGSSGGTLNIEDEYRLHETSKGPDVPLGSTWLSDFPQAWAETGGMGLAVRQAPLIIPLKATSTPVSIKQYPMSQEARLGIKPHIQRLLDQGILVPCQSPWNTPLLPVKKPGTNDYRPVQDLREVNKRVEDIHPTVPNPYNLLSGLPPSHQWYTVLDLKDAFFCLRLHPTSQSLFAFEWRDPEMGISGQLTWTRLPQGFKNSPTLFNEALHRDLADFRIQHPDLILLQYVDDLLLAATSELDCQQGTRALLQTLGDLGYRASAKKAQICQKQVKYLGYLLKEGQRWLTEARKETVMGQPTPKTPRQLREFLGTAGFCRLWIPGFAEMAAPLYPLTKPGTLFEWGPDQQKAYQEIKQALLTAPALGLPDLTKPFELFVDEKQGYAKGVLTQKLGPWRRPVAYLSKKLDPVAAGWPPCLRMVAAIAVLTKDAGKLTMGQPLVILAPHAVEALVKQPPDRWLSNARMTHYQALLLDTDRVQFGPIVALNPATLLPLPEEGLQHDCLDILAEAHGTRPDLTDQPLPDADHTWYTDGSSFLQEGQRKAGAAVTTETEVVWAKALPAGTSAQRAELIALTQALKMAEGKKLNVYTDSRYAFATAHIHGEIYRRRGWLTSEGKEIKNKDEILALLKALFLPKRLSIIHCPGHQKGNRAEARGNRMADQAAREVATRETPETSTLLAGKRTADGSEFEKRTADGSEFESPKKKAKVE

SEQ ID NO: 2480 - protein, 2096 aa, synthetic construct
MPAAKRVKLDGGDKKYSIGLDIGTNSVGWAVITDEYKVPSKKFKVLGNTDRHSIKKNLIGALLFDSGETAEATRLKRTARRRYTRRKNRICYLQEIFSNEMAKVDDSFFHRLEESFLVEEDKKHERHPIFGNIVDEVAYHEKYPTIYHLRKKLVDSTDKADLRLIYLALAHMIKFRGHFLIEGDLNPDNSDVDKLFIQLVQTYNQLFEENPINASGVDAKAILSARLSKSRRLENLIAQLPGEKKNGLFGNLIALSLGLTPNFKSNFDLAEDAKLQLSKDTYDDDLDNLLAQIGDQYADLFLAAKNLSDAILLSDILRVNTEITKAPLSASMIKRYDEHHQDLTLLKALVRQQLPEKYKEIFFDQSKNGYAGYIDGGASQEEFYKFIKPILEKMDGTEELLVKLNREDLLRKQRTFDNGSIPHQIHLGELHAILRRQEDFYPFLKDNREKIEKILTFRIPYYVGPLARGNSRFAWMTRKSEETITPWNFEEVVDKGASAQSFIERMTNFDKNLPNEKVLPKHSLLYEYFTVYNELTKVKYVTEGMRKPAFLSGEQKKAIVDLLFKTNRKVTVKQLKEDYFKKIECFDSVEISGVEDRFNASLGTYHDLLKIIKDKDFLDNEENEDILEDIVLTLTLFEDREMIEERLKTYAHLFDDKVMKQLKRRRYTGWGRLSRKLINGIRDKQSGKTILDFLKSDGFANRNFMQLIHDDSLTFKEDIQKAQVSGQGDSLHEHIANLAGSPAIKKGILQTVKVVDELVKVMGRHKPENIVIEMARENQTTQKGQKNSRERMKRIEEGIKELGSQILKEHPVENTQLQNEKLYLYYLQNGRDMYVDQELDINRLSDYDVDHIVPQSFLKDDSIDNKVLTRSDKARGKSDNVPSEEVVKKMKNYWRQLLNAKLITQRKFDNLTKAERGGLSELDKAGFIKRQLVETRQITKHVAQILDSRMNTKYDENDKLIREVKVITLKSKLVSDFRKDFQFYKVREINNYHHAHDAYLNAVVGTALIKKYPKLESEFVYGDYKVYDVRKMIAKSEQEIGKATAKYFFYSNIMNFFKTEITLANGEIRKRPLIETNGETGEIVWDKGRDFATVRKVLSMPQVNIVKKTEVQTGGFSKESILPKRNSDKLIARKKDWDPKKYGGFDSPTVAYSVLVVAKVEKGKSKKLKSVKELLGITIMERSSFEKNPIDFLEAKGYKEVKKDLIIKLPKYSLFELENGRKRMLASAGELQKGNELALPSKYVNFLYLASHYEKLKGSPEDNEQKQLFVEQHKHYLDEIIEQISEFSKRVILADANLDKVLSAYNKHRDKPIREQAENIIHLFTLTNLGAPAAFKYFDTTIDRKRYTSTKEVLDATLIHQSITGLYETRIDLSQLGGDGGGSSPAPEAAAKGGTLNIEDEYRLHETSKGPDVPLGSTWLSDFPQAWAETGGMGLAVRQAPLIIPLKATSTPVSIKQYPMSQEARLGIKPHIQRLLDQGILVPCQSPWNTPLLPVKKPGTNDYRPVQDLREVNKRVEDIHPTVPNPYNLLSGLPPSHQWYTVLDLKDAFFCLRLHPTSQSLFAFEWRDPEMGISGQLTWTRLPQGFKNSPTLFNEALHRDLADFRIQHPDLILLQYVDDLLLAATSELDCQQGTRALLQTLGDLGYRASAKKAQICQKQVKYLGYLLKEGQRWLTEARKETVMGQPTPKTPRQLREFLGTAGFCRLWIPGFAEMAAPLYPLTKPGTLFEWGPDQQKAYQEIKQALLTAPALGLPDLTKPFELFVDEKQGYAKGVLTQKLGPWRRPVAYLSKKLDPVAAGWPPCLRMVAAIAVLTKDAGKLTMGQPLVILAPHAVEALVKQPPDRWLSNARMTHYQALLLDTDRVQFGPIVALNPATLLPLPEEGLQHDCLDILAEAHGTRPDLTDQPLPDADHTWYTDGSSFLQEGQRKAGAAVTTETEVVWAKALPAGTSAQRAELIALTQALKMAEGKKLNVYTDSRYAFATAHIHGEIYRRRGWLTSEGKEIKNKDEILALLKALFLPKRLSIIHCPGHQKGNRAEARGNRMADQAAREVATRETPETSTLLAGKRTADGSEFEKRTADGSEFESPKKKAKVE

SEQ ID NO: 2481 - protein, 2091 aa, synthetic construct
MPAAKRVKLDGGDKKYSIGLDIGTNSVGWAVITDEYKVPSKKFKVLGNTDRHSIKKNLIGALLFDSGETAEATRLKRTARRRYTRRKNRICYLQEIFSNEMAKVDDSFFHRLEESFLVEEDKKHERHPIFGNIVDEVAYHEKYPTIYHLRKKLVDSTDKADLRLIYLALAHMIKFRGHFLIEGDLNPDNSDVDKLFIQLVQTYNQLFEENPINASGVDAKAILSARLSKSRRLENLIAQLPGEKKNGLFGNLIALSLGLTPNFKSNFDLAEDAKLQLSKDTYDDDLDNLLAQIGDQYADLFLAAKNLSDAILLSDILRVNTEITKAPLSASMIKRYDEHHQDLTLLKALVRQQLPEKYKEIFFDQSKNGYAGYIDGGASQEEFYKFIKPILEKMDGTEELLVKLNREDLLRKQRTFDNGSIPHQIHLGELHAILRRQEDFYPFLKDNREKIEKILTFRIPYYVGPLARGNSRFAWMTRKSEETITPWNFEEVVDKGASAQSFIERMTNFDKNLPNEKVLPKHSLLYEYFTVYNELTKVKYVTEGMRKPAFLSGEQKKAIVDLLFKTNRKVTVKQLKEDYFKKIECFDSVEISGVEDRFNASLGTYHDLLKIIKDKDFLDNEENEDILEDIVLTLTLFEDREMIEERLKTYAHLFDDKVMKQLKRRRYTGWGRLSRKLINGIRDKQSGKTILDFLKSDGFANRNFMQLIHDDSLTFKEDIQKAQVSGQGDSLHEHIANLAGSPAIKKGILQTVKVVDELVKVMGRHKPENIVIEMARENQTTQKGQKNSRERMKRIEEGIKELGSQILKEHPVENTQLQNEKLYLYYLQNGRDMYVDQELDINRLSDYDVDHIVPQSFLKDDSIDNKVLTRSDKARGKSDNVPSEEVVKKMKNYWRQLLNAKLITQRKFDNLTKAERGGLSELDKAGFIKRQLVETRQITKHVAQILDSRMNTKYDENDKLIREVKVITLKSKLVSDFRKDFQFYKVREINNYHHAHDAYLNAVVGTALIKKYPKLESEFVYGDYKVYDVRKMIAKSEQEIGKATAKYFFYSNIMNFFKTEITLANGEIRKRPLIETNGETGEIVWDKGRDFATVRKVLSMPQVNIVKKTEVQTGGFSKESILPKRNSDKLIARKKDWDPKKYGGFDSPTVAYSVLVVAKVEKGKSKKLKSVKELLGITIMERSSFEKNPIDFLEAKGYKEVKKDLIIKLPKYSLFELENGRKRMLASAGELQKGNELALPSKYVNFLYLASHYEKLKGSPEDNEQKQLFVEQHKHYLDEIIEQISEFSKRVILADANLDKVLSAYNKHRDKPIREQAENIIHLFTLTNLGAPAAFKYFDTTIDRKRYTSTKEVLDATLIHQSITGLYETRIDLSQLGGDGGGGSPAPGGTLNIEDEYRLHETSKGPDVPLGSTWLSDFPQAWAETGGMGLAVRQAPLIIPLKATSTPVSIKQYPMSQEARLGIKPHIQRLLDQGILVPCQSPWNTPLLPVKKPGTNDYRPVQDLREVNKRVEDIHPTVPNPYNLLSGLPPSHQWYTVLDLKDAFFCLRLHPTSQSLFAFEWRDPEMGISGQLTWTRLPQGFKNSPTLFNEALHRDLADFRIQHPDLILLQYVDDLLLAATSELDCQQGTRALLQTLGDLGYRASAKKAQICQKQVKYLGYLLKEGQRWLTEARKETVMGQPTPKTPRQLREFLGTAGFCRLWIPGFAEMAAPLYPLTKPGTLFEWGPDQQKAYQEIKQALLTAPALGLPDLTKPFELFVDEKQGYAKGVLTQKLGPWRRPVAYLSKKLDPVAAGWPPCLRMVAAIAVLTKDAGKLTMGQPLVILAPHAVEALVKQPPDRWLSNARMTHYQALLLDTDRVQFGPIVALNPATLLPLPEEGLQHDCLDILAEAHGTRPDLTDQPLPDADHTWYTDGSSFLQEGQRKAGAAVTTETEVVWAKALPAGTSAQRAELIALTQALKMAEGKKLNVYTDSRYAFATAHIHGEIYRRRGWLTSEGKEIKNKDEILALLKALFLPKRLSIIHCPGHQKGNRAEARGNRMADQAAREVATRETPETSTLLAGKRTADGSEFEKRTADGSEFESPKKKAKVE

SEQ ID NO: 2482 - protein, 2090 aa, synthetic construct
MPAAKRVKLDGGDKKYSIGLDIGTNSVGWAVITDEYKVPSKKFKVLGNTDRHSIKKNLIGALLFDSGETAEATRLKRTARRRYTRRKNRICYLQEIFSNEMAKVDDSFFHRLEESFLVEEDKKHERHPIFGNIVDEVAYHEKYPTIYHLRKKLVDSTDKADLRLIYLALAHMIKFRGHFLIEGDLNPDNSDVDKLFIQLVQTYNQLFEENPINASGVDAKAILSARLSKSRRLENLIAQLPGEKKNGLFGNLIALSLGLTPNFKSNFDLAEDAKLQLSKDTYDDDLDNLLAQIGDQYADLFLAAKNLSDAILLSDILRVNTEITKAPLSASMIKRYDEHHQDLTLLKALVRQQLPEKYKEIFFDQSKNGYAGYIDGGASQEEFYKFIKPILEKMDGTEELLVKLNREDLLRKQRTFDNGSIPHQIHLGELHAILRRQEDFYPFLKDNREKIEKILTFRIPYYVGPLARGNSRFAWMTRKSEETITPWNFEEVVDKGASAQSFIERMTNFDKNLPNEKVLPKHSLLYEYFTVYNELTKVKYVTEGMRKPAFLSGEQKKAIVDLLFKTNRKVTVKQLKEDYFKKIECFDSVEISGVEDRFNASLGTYHDLLKIIKDKDFLDNEENEDILEDIVLTLTLFEDREMIEERLKTYAHLFDDKVMKQLKRRRYTGWGRLSRKLINGIRDKQSGKTILDFLKSDGFANRNFMQLIHDDSLTFKEDIQKAQVSGQGDSLHEHIANLAGSPAIKKGILQTVKVVDELVKVMGRHKPENIVIEMARENQTTQKGQKNSRERMKRIEEGIKELGSQILKEHPVENTQLQNEKLYLYYLQNGRDMYVDQELDINRLSDYDVDHIVPQSFLKDDSIDNKVLTRSDKARGKSDNVPSEEVVKKMKNYWRQLLNAKLITQRKFDNLTKAERGGLSELDKAGFIKRQLVETRQITKHVAQILDSRMNTKYDENDKLIREVKVITLKSKLVSDFRKDFQFYKVREINNYHHAHDAYLNAVVGTALIKKYPKLESEFVYGDYKVYDVRKMIAKSEQEIGKATAKYFFYSNIMNFFKTEITLANGEIRKRPLIETNGETGEIVWDKGRDFATVRKVLSMPQVNIVKKTEVQTGGFSKESILPKRNSDKLIARKKDWDPKKYGGFDSPTVAYSVLVVAKVEKGKSKKLKSVKELLGITIMERSSFEKNPIDFLEAKGYKEVKKDLIIKLPKYSLFELENGRKRMLASAGELQKGNELALPSKYVNFLYLASHYEKLKGSPEDNEQKQLFVEQHKHYLDEIIEQISEFSKRVILADANLDKVLSAYNKHRDKPIREQAENIIHLFTLTNLGAPAAFKYFDTTIDRKRYTSTKEVLDATLIHQSITGLYETRIDLSQLGGDGGGGGGSGGTLNIEDEYRLHETSKGPDVPLGSTWLSDFPQAWAETGGMGLAVRQAPLIIPLKATSTPVSIKQYPMSQEARLGIKPHIQRLLDQGILVPCQSPWNTPLLPVKKPGTNDYRPVQDLREVNKRVEDIHPTVPNPYNLLSGLPPSHQWYTVLDLKDAFFCLRLHPTSQSLFAFEWRDPEMGISGQLTWTRLPQGFKNSPTLFNEALHRDLADFRIQHPDLILLQYVDDLLLAATSELDCQQGTRALLQTLGDLGYRASAKKAQICQKQVKYLGYLLKEGQRWLTEARKETVMGQPTPKTPRQLREFLGTAGFCRLWIPGFAEMAAPLYPLTKPGTLFEWGPDQQKAYQEIKQALLTAPALGLPDLTKPFELFVDEKQGYAKGVLTQKLGPWRRPVAYLSKKLDPVAAGWPPCLRMVAAIAVLTKDAGKLTMGQPLVILAPHAVEALVKQPPDRWLSNARMTHYQALLLDTDRVQFGPIVALNPATLLPLPEEGLQHDCLDILAEAHGTRPDLTDQPLPDADHTWYTDGSSFLQEGQRKAGAAVTTETEVVWAKALPAGTSAQRAELIALTQALKMAEGKKLNVYTDSRYAFATAHIHGEIYRRRGWLTSEGKEIKNKDEILALLKALFLPKRLSIIHCPGHQKGNRAEARGNRMADQAAREVATRETPETSTLLAGKRTADGSEFEKRTADGSEFESPKKKAKVE

SEQ ID NO: 2483 - protein, 2096 aa, synthetic construct
MPAAKRVKLDGGDKKYSIGLDIGTNSVGWAVITDEYKVPSKKFKVLGNTDRHSIKKNLIGALLFDSGETAEATRLKRTARRRYTRRKNRICYLQEIFSNEMAKVDDSFFHRLEESFLVEEDKKHERHPIFGNIVDEVAYHEKYPTIYHLRKKLVDSTDKADLRLIYLALAHMIKFRGHFLIEGDLNPDNSDVDKLFIQLVQTYNQLFEENPINASGVDAKAILSARLSKSRRLENLIAQLPGEKKNGLFGNLIALSLGLTPNFKSNFDLAEDAKLQLSKDTYDDDLDNLLAQIGDQYADLFLAAKNLSDAILLSDILRVNTEITKAPLSASMIKRYDEHHQDLTLLKALVRQQLPEKYKEIFFDQSKNGYAGYIDGGASQEEFYKFIKPILEKMDGTEELLVKLNREDLLRKQRTFDNGSIPHQIHLGELHAILRRQEDFYPFLKDNREKIEKILTFRIPYYVGPLARGNSRFAWMTRKSEETITPWNFEEVVDKGASAQSFIERMTNFDKNLPNEKVLPKHSLLYEYFTVYNELTKVKYVTEGMRKPAFLSGEQKKAIVDLLFKTNRKVTVKQLKEDYFKKIECFDSVEISGVEDRFNASLGTYHDLLKIIKDKDFLDNEENEDILEDIVLTLTLFEDREMIEERLKTYAHLFDDKVMKQLKRRRYTGWGRLSRKLINGIRDKQSGKTILDFLKSDGFANRNFMQLIHDDSLTFKEDIQKAQVSGQGDSLHEHIANLAGSPAIKKGILQTVKVVDELVKVMGRHKPENIVIEMARENQTTQKGQKNSRERMKRIEEGIKELGSQILKEHPVENTQLQNEKLYLYYLQNGRDMYVDQELDINRLSDYDVDHIVPQSFLKDDSIDNKVLTRSDKARGKSDNVPSEEVVKKMKNYWRQLLNAKLITQRKFDNLTKAERGGLSELDKAGFIKRQLVETRQITKHVAQILDSRMNTKYDENDKLIREVKVITLKSKLVSDFRKDFQFYKVREINNYHHAHDAYLNAVVGTALIKKYPKLESEFVYGDYKVYDVRKMIAKSEQEIGKATAKYFFYSNIMNFFKTEITLANGEIRKRPLIETNGETGEIVWDKGRDFATVRKVLSMPQVNIVKKTEVQTGGFSKESILPKRNSDKLIARKKDWDPKKYGGFDSPTVAYSVLVVAKVEKGKSKKLKSVKELLGITIMERSSFEKNPIDFLEAKGYKEVKKDLIIKLPKYSLFELENGRKRMLASAGELQKGNELALPSKYVNFLYLASHYEKLKGSPEDNEQKQLFVEQHKHYLDEIIEQISEFSKRVILADANLDKVLSAYNKHRDKPIREQAENIIHLFTLTNLGAPAAFKYFDTTIDRKRYTSTKEVLDATLIHQSITGLYETRIDLSQLGGDGGEAAAKGGGGGSGGTLNIEDEYRLHETSKGPDVPLGSTWLSDFPQAWAETGGMGLAVRQAPLIIPLKATSTPVSIKQYPMSQEARLGIKPHIQRLLDQGILVPCQSPWNTPLLPVKKPGTNDYRPVQDLREVNKRVEDIHPTVPNPYNLLSGLPPSHQWYTVLDLKDAFFCLRLHPTSQSLFAFEWRDPEMGISGQLTWTRLPQGFKNSPTLFNEALHRDLADFRIQHPDLILLQYVDDLLLAATSELDCQQGTRALLQTLGDLGYRASAKKAQICQKQVKYLGYLLKEGQRWLTEARKETVMGQPTPKTPRQLREFLGTAGFCRLWIPGFAEMAAPLYPLTKPGTLFEWGPDQQKAYQEIKQALLTAPALGLPDLTKPFELFVDEKQGYAKGVLTQKLGPWRRPVAYLSKKLDPVAAGWPPCLRMVAAIAVLTKDAGKLTMGQPLVILAPHAVEALVKQPPDRWLSNARMTHYQALLLDTDRVQFGPIVALNPATLLPLPEEGLQHDCLDILAEAHGTRPDLTDQPLPDADHTWYTDGSSFLQEGQRKAGAAVTTETEVVWAKALPAGTSAQRAELIALTQALKMAEGKKLNVYTDSRYAFATAHIHGEIYRRRGWLTSEGKEIKNKDEILALLKALFLPKRLSIIHCPGHQKGNRAEARGNRMADQAAREVATRETPETSTLLAGKRTADGSEFEKRTADGSEFESPKKKAKVE

SEQ ID NO: 2484 - protein, 2095 aa, synthetic construct
MPAAKRVKLDGGDKKYSIGLDIGTNSVGWAVITDEYKVPSKKFKVLGNTDRHSIKKNLIGALLFDSGETAEATRLKRTARRRYTRRKNRICYLQEIFSNEMAKVDDSFFHRLEESFLVEEDKKHERHPIFGNIVDEVAYHEKYPTIYHLRKKLVDSTDKADLRLIYLALAHMIKFRGHFLIEGDLNPDNSDVDKLFIQLVQTYNQLFEENPINASGVDAKAILSARLSKSRRLENLIAQLPGEKKNGLFGNLIALSLGLTPNFKSNFDLAEDAKLQLSKDTYDDDLDNLLAQIGDQYADLFLAAKNLSDAILLSDILRVNTEITKAPLSASMIKRYDEHHQDLTLLKALVRQQLPEKYKEIFFDQSKNGYAGYIDGGASQEEFYKFIKPILEKMDGTEELLVKLNREDLLRKQRTFDNGSIPHQIHLGELHAILRRQEDFYPFLKDNREKIEKILTFRIPYYVGPLARGNSRFAWMTRKSEETITPWNFEEVVDKGASAQSFIERMTNFDKNLPNEKVLPKHSLLYEYFTVYNELTKVKYVTEGMRKPAFLSGEQKKAIVDLLFKTNRKVTVKQLKEDYFKKIECFDSVEISGVEDRFNASLGTYHDLLKIIKDKDFLDNEENEDILEDIVLTLTLFEDREMIEERLKTYAHLFDDKVMKQLKRRRYTGWGRLSRKLINGIRDKQSGKTILDFLKSDGFANRNFMQLIHDDSLTFKEDIQKAQVSGQGDSLHEHIANLAGSPAIKKGILQTVKVVDELVKVMGRHKPENIVIEMARENQTTQKGQKNSRERMKRIEEGIKELGSQILKEHPVENTQLQNEKLYLYYLQNGRDMYVDQELDINRLSDYDVDHIVPQSFLKDDSIDNKVLTRSDKARGKSDNVPSEEVVKKMKNYWRQLLNAKLITQRKFDNLTKAERGGLSELDKAGFIKRQLVETRQITKHVAQILDSRMNTKYDENDKLIREVKVITLKSKLVSDFRKDFQFYKVREINNYHHAHDAYLNAVVGTALIKKYPKLESEFVYGDYKVYDVRKMIAKSEQEIGKATAKYFFYSNIMNFFKTEITLANGEIRKRPLIETNGETGEIVWDKGRDFATVRKVLSMPQVNIVKKTEVQTGGFSKESILPKRNSDKLIARKKDWDPKKYGGFDSPTVAYSVLVVAKVEKGKSKKLKSVKELLGITIMERSSFEKNPIDFLEAKGYKEVKKDLIIKLPKYSLFELENGRKRMLASAGELQKGNELALPSKYVNFLYLASHYEKLKGSPEDNEQKQLFVEQHKHYLDEIIEQISEFSKRVILADANLDKVLSAYNKHRDKPIREQAENIIHLFTLTNLGAPAAFKYFDTTIDRKRYTSTKEVLDATLIHQSITGLYETRIDLSQLGGDGGEAAAKEAAAKGGTLNIEDEYRLHETSKGPDVPLGSTWLSDFPQAWAETGGMGLAVRQAPLIIPLKATSTPVSIKQYPMSQEARLGIKPHIQRLLDQGILVPCQSPWNTPLLPVKKPGTNDYRPVQDLREVNKRVEDIHPTVPNPYNLLSGLPPSHQWYTVLDLKDAFFCLRLHPTSQSLFAFEWRDPEMGISGQLTWTRLPQGFKNSPTLFNEALHRDLADFRIQHPDLILLQYVDDLLLAATSELDCQQGTRALLQTLGDLGYRASAKKAQICQKQVKYLGYLLKEGQRWLTEARKETVMGQPTPKTPRQLREFLGTAGFCRLWIPGFAEMAAPLYPLTKPGTLFEWGPDQQKAYQEIKQALLTAPALGLPDLTKPFELFVDEKQGYAKGVLTQKLGPWRRPVAYLSKKLDPVAAGWPPCLRMVAAIAVLTKDAGKLTMGQPLVILAPHAVEALVKQPPDRWLSNARMTHYQALLLDTDRVQFGPIVALNPATLLPLPEEGLQHDCLDILAEAHGTRPDLTDQPLPDADHTWYTDGSSFLQEGQRKAGAAVTTETEVVWAKALPAGTSAQRAELIALTQALKMAEGKKLNVYTDSRYAFATAHIHGEIYRRRGWLTSEGKEIKNKDEILALLKALFLPKRLSIIHCPGHQKGNRAEARGNRMADQAAREVATRETPETSTLLAGKRTADGSEFEKRTADGSEFESPKKKAKVE

SEQ ID NO: 2485 - protein, 2096 aa, synthetic construct
MPAAKRVKLDGGDKKYSIGLDIGTNSVGWAVITDEYKVPSKKFKVLGNTDRHSIKKNLIGALLFDSGETAEATRLKRTARRRYTRRKNRICYLQEIFSNEMAKVDDSFFHRLEESFLVEEDKKHERHPIFGNIVDEVAYHEKYPTIYHLRKKLVDSTDKADLRLIYLALAHMIKFRGHFLIEGDLNPDNSDVDKLFIQLVQTYNQLFEENPINASGVDAKAILSARLSKSRRLENLIAQLPGEKKNGLFGNLIALSLGLTPNFKSNFDLAEDAKLQLSKDTYDDDLDNLLAQIGDQYADLFLAAKNLSDAILLSDILRVNTEITKAPLSASMIKRYDEHHQDLTLLKALVRQQLPEKYKEIFFDQSKNGYAGYIDGGASQEEFYKFIKPILEKMDGTEELLVKLNREDLLRKQRTFDNGSIPHQIHLGELHAILRRQEDFYPFLKDNREKIEKILTFRIPYYVGPLARGNSRFAWMTRKSEETITPWNFEEVVDKGASAQSFIERMTNFDKNLPNEKVLPKHSLLYEYFTVYNELTKVKYVTEGMRKPAFLSGEQKKAIVDLLFKTNRKVTVKQLKEDYFKKIECFDSVEISGVEDRFNASLGTYHDLLKIIKDKDFLDNEENEDILEDIVLTLTLFEDREMIEERLKTYAHLFDDKVMKQLKRRRYTGWGRLSRKLINGIRDKQSGKTILDFLKSDGFANRNFMQLIHDDSLTFKEDIQKAQVSGQGDSLHEHIANLAGSPAIKKGILQTVKVVDELVKVMGRHKPENIVIEMARENQTTQKGQKNSRERMKRIEEGIKELGSQILKEHPVENTQLQNEKLYLYYLQNGRDMYVDQELDINRLSDYDVDHIVPQSFLKDDSIDNKVLTRSDKARGKSDNVPSEEVVKKMKNYWRQLLNAKLITQRKFDNLTKAERGGLSELDKAGFIKRQLVETRQITKHVAQILDSRMNTKYDENDKLIREVKVITLKSKLVSDFRKDFQFYKVREINNYHHAHDAYLNAVVGTALIKKYPKLESEFVYGDYKVYDVRKMIAKSEQEIGKATAKYFFYSNIMNFFKTEITLANGEIRKRPLIETNGETGEIVWDKGRDFATVRKVLSMPQVNIVKKTEVQTGGFSKESILPKRNSDKLIARKKDWDPKKYGGFDSPTVAYSVLVVAKVEKGKSKKLKSVKELLGITIMERSSFEKNPIDFLEAKGYKEVKKDLIIKLPKYSLFELENGRKRMLASAGELQKGNELALPSKYVNFLYLASHYEKLKGSPEDNEQKQLFVEQHKHYLDEIIEQISEFSKRVILADANLDKVLSAYNKHRDKPIREQAENIIHLFTLTNLGAPAAFKYFDTTIDRKRYTSTKEVLDATLIHQSITGLYETRIDLSQLGGDGGGSSEAAAKPAPGGTLNIEDEYRLHETSKGPDVPLGSTWLSDFPQAWAETGGMGLAVRQAPLIIPLKATSTPVSIKQYPMSQEARLGIKPHIQRLLDQGILVPCQSPWNTPLLPVKKPGTNDYRPVQDLREVNKRVEDIHPTVPNPYNLLSGLPPSHQWYTVLDLKDAFFCLRLHPTSQSLFAFEWRDPEMGISGQLTWTRLPQGFKNSPTLFNEALHRDLADFRIQHPDLILLQYVDDLLLAATSELDCQQGTRALLQTLGDLGYRASAKKAQICQKQVKYLGYLLKEGQRWLTEARKETVMGQPTPKTPRQLREFLGTAGFCRLWIPGFAEMAAPLYPLTKPGTLFEWGPDQQKAYQEIKQALLTAPALGLPDLTKPFELFVDEKQGYAKGVLTQKLGPWRRPVAYLSKKLDPVAAGWPPCLRMVAAIAVLTKDAGKLTMGQPLVILAPHAVEALVKQPPDRWLSNARMTHYQALLLDTDRVQFGPIVALNPATLLPLPEEGLQHDCLDILAEAHGTRPDLTDQPLPDADHTWYTDGSSFLQEGQRKAGAAVTTETEVVWAKALPAGTSAQRAELIALTQALKMAEGKKLNVYTDSRYAFATAHIHGEIYRRRGWLTSEGKEIKNKDEILALLKALFLPKRLSIIHCPGHQKGNRAEARGNRMADQAAREVATRETPETSTLLAGKRTADGSEFEKRTADGSEFESPKKKAKVE

SEQ ID NO: 2486 - protein, 2096 aa, synthetic construct
MPAAKRVKLDGGDKKYSIGLDIGTNSVGWAVITDEYKVPSKKFKVLGNTDRHSIKKNLIGALLFDSGETAEATRLKRTARRRYTRRKNRICYLQEIFSNEMAKVDDSFFHRLEESFLVEEDKKHERHPIFGNIVDEVAYHEKYPTIYHLRKKLVDSTDKADLRLIYLALAHMIKFRGHFLIEGDLNPDNSDVDKLFIQLVQTYNQLFEENPINASGVDAKAILSARLSKSRRLENLIAQLPGEKKNGLFGNLIALSLGLTPNFKSNFDLAEDAKLQLSKDTYDDDLDNLLAQIGDQYADLFLAAKNLSDAILLSDILRVNTEITKAPLSASMIKRYDEHHQDLTLLKALVRQQLPEKYKEIFFDQSKNGYAGYIDGGASQEEFYKFIKPILEKMDGTEELLVKLNREDLLRKQRTFDNGSIPHQIHLGELHAILRRQEDFYPFLKDNREKIEKILTFRIPYYVGPLARGNSRFAWMTRKSEETITPWNFEEVVDKGASAQSFIERMTNFDKNLPNEKVLPKHSLLYEYFTVYNELTKVKYVTEGMRKPAFLSGEQKKAIVDLLFKTNRKVTVKQLKEDYFKKIECFDSVEISGVEDRFNASLGTYHDLLKIIKDKDFLDNEENEDILEDIVLTLTLFEDREMIEERLKTYAHLFDDKVMKQLKRRRYTGWGRLSRKLINGIRDKQSGKTILDFLKSDGFANRNFMQLIHDDSLTFKEDIQKAQVSGQGDSLHEHIANLAGSPAIKKGILQTVKVVDELVKVMGRHKPENIVIEMARENQTTQKGQKNSRERMKRIEEGIKELGSQILKEHPVENTQLQNEKLYLYYLQNGRDMYVDQELDINRLSDYDVDHIVPQSFLKDDSIDNKVLTRSDKARGKSDNVPSEEVVKKMKNYWRQLLNAKLITQRKFDNLTKAERGGLSELDKAGFIKRQLVETRQITKHVAQILDSRMNTKYDENDKLIREVKVITLKSKLVSDFRKDFQFYKVREINNYHHAHDAYLNAVVGTALIKKYPKLESEFVYGDYKVYDVRKMIAKSEQEIGKATAKYFFYSNIMNFFKTEITLANGEIRKRPLIETNGETGEIVWDKGRDFATVRKVLSMPQVNIVKKTEVQTGGFSKESILPKRNSDKLIARKKDWDPKKYGGFDSPTVAYSVLVVAKVEKGKSKKLKSVKELLGITIMERSSFEKNPIDFLEAKGYKEVKKDLIIKLPKYSLFELENGRKRMLASAGELQKGNELALPSKYVNFLYLASHYEKLKGSPEDNEQKQLFVEQHKHYLDEIIEQISEFSKRVILADANLDKVLSAYNKHRDKPIREQAENIIHLFTLTNLGAPAAFKYFDTTIDRKRYTSTKEVLDATLIHQSITGLYETRIDLSQLGGDGGGGSEAAAKPAPGGTLNIEDEYRLHETSKGPDVPLGSTWLSDFPQAWAETGGMGLAVRQAPLIIPLKATSTPVSIKQYPMSQEARLGIKPHIQRLLDQGILVPCQSPWNTPLLPVKKPGTNDYRPVQDLREVNKRVEDIHPTVPNPYNLLSGLPPSHQWYTVLDLKDAFFCLRLHPTSQSLFAFEWRDPEMGISGQLTWTRLPQGFKNSPTLFNEALHRDLADFRIQHPDLILLQYVDDLLLAATSELDCQQGTRALLQTLGDLGYRASAKKAQICQKQVKYLGYLLKEGQRWLTEARKETVMGQPTPKTPRQLREFLGTAGFCRLWIPGFAEMAAPLYPLTKPGTLFEWGPDQQKAYQEIKQALLTAPALGLPDLTKPFELFVDEKQGYAKGVLTQKLGPWRRPVAYLSKKLDPVAAGWPPCLRMVAAIAVLTKDAGKLTMGQPLVILAPHAVEALVKQPPDRWLSNARMTHYQALLLDTDRVQFGPIVALNPATLLPLPEEGLQHDCLDILAEAHGTRPDLTDQPLPDADHTWYTDGSSFLQEGQRKAGAAVTTETEVVWAKALPAGTSAQRAELIALTQALKMAEGKKLNVYTDSRYAFATAHIHGEIYRRRGWLTSEGKEIKNKDEILALLKALFLPKRLSIIHCPGHQKGNRAEARGNRMADQAAREVATRETPETSTLLAGKRTADGSEFEKRTADGSEFESPKKKAKVE

SEQ ID NO: 2487 - protein, 2091 aa, synthetic construct
MPAAKRVKLDGGDKKYSIGLDIGTNSVGWAVITDEYKVPSKKFKVLGNTDRHSIKKNLIGALLFDSGETAEATRLKRTARRRYTRRKNRICYLQEIFSNEMAKVDDSFFHRLEESFLVEEDKKHERHPIFGNIVDEVAYHEKYPTIYHLRKKLVDSTDKADLRLIYLALAHMIKFRGHFLIEGDLNPDNSDVDKLFIQLVQTYNQLFEENPINASGVDAKAILSARLSKSRRLENLIAQLPGEKKNGLFGNLIALSLGLTPNFKSNFDLAEDAKLQLSKDTYDDDLDNLLAQIGDQYADLFLAAKNLSDAILLSDILRVNTEITKAPLSASMIKRYDEHHQDLTLLKALVRQQLPEKYKEIFFDQSKNGYAGYIDGGASQEEFYKFIKPILEKMDGTEELLVKLNREDLLRKQRTFDNGSIPHQIHLGELHAILRRQEDFYPFLKDNREKIEKILTFRIPYYVGPLARGNSRFAWMTRKSEETITPWNFEEVVDKGASAQSFIERMTNFDKNLPNEKVLPKHSLLYEYFTVYNELTKVKYVTEGMRKPAFLSGEQKKAIVDLLFKTNRKVTVKQLKEDYFKKIECFDSVEISGVEDRFNASLGTYHDLLKIIKDKDFLDNEENEDILEDIVLTLTLFEDREMIEERLKTYAHLFDDKVMKQLKRRRYTGWGRLSRKLINGIRDKQSGKTILDFLKSDGFANRNFMQLIHDDSLTFKEDIQKAQVSGQGDSLHEHIANLAGSPAIKKGILQTVKVVDELVKVMGRHKPENIVIEMARENQTTQKGQKNSRERMKRIEEGIKELGSQILKEHPVENTQLQNEKLYLYYLQNGRDMYVDQELDINRLSDYDVDHIVPQSFLKDDSIDNKVLTRSDKARGKSDNVPSEEVVKKMKNYWRQLLNAKLITQRKFDNLTKAERGGLSELDKAGFIKRQLVETRQITKHVAQILDSRMNTKYDENDKLIREVKVITLKSKLVSDFRKDFQFYKVREINNYHHAHDAYLNAVVGTALIKKYPKLESEFVYGDYKVYDVRKMIAKSEQEIGKATAKYFFYSNIMNFFKTEITLANGEIRKRPLIETNGETGEIVWDKGRDFATVRKVLSMPQVNIVKKTEVQTGGFSKESILPKRNSDKLIARKKDWDPKKYGGFDSPTVAYSVLVVAKVEKGKSKKLKSVKELLGITIMERSSFEKNPIDFLEAKGYKEVKKDLIIKLPKYSLFELENGRKRMLASAGELQKGNELALPSKYVNFLYLASHYEKLKGSPEDNEQKQLFVEQHKHYLDEIIEQISEFSKRVILADANLDKVLSAYNKHRDKPIREQAENIIHLFTLTNLGAPAAFKYFDTTIDRKRYTSTKEVLDATLIHQSITGLYETRIDLSQLGGDGGGGSGSSGGTLNIEDEYRLHETSKGPDVPLGSTWLSDFPQAWAETGGMGLAVRQAPLIIPLKATSTPVSIKQYPMSQEARLGIKPHIQRLLDQGILVPCQSPWNTPLLPVKKPGTNDYRPVQDLREVNKRVEDIHPTVPNPYNLLSGLPPSHQWYTVLDLKDAFFCLRLHPTSQSLFAFEWRDPEMGISGQLTWTRLPQGFKNSPTLFNEALHRDLADFRIQHPDLILLQYVDDLLLAATSELDCQQGTRALLQTLGDLGYRASAKKAQICQKQVKYLGYLLKEGQRWLTEARKETVMGQPTPKTPRQLREFLGTAGFCRLWIPGFAEMAAPLYPLTKPGTLFEWGPDQQKAYQEIKQALLTAPALGLPDLTKPFELFVDEKQGYAKGVLTQKLGPWRRPVAYLSKKLDPVAAGWPPCLRMVAAIAVLTKDAGKLTMGQPLVILAPHAVEALVKQPPDRWLSNARMTHYQALLLDTDRVQFGPIVALNPATLLPLPEEGLQHDCLDILAEAHGTRPDLTDQPLPDADHTWYTDGSSFLQEGQRKAGAAVTTETEVVWAKALPAGTSAQRAELIALTQALKMAEGKKLNVYTDSRYAFATAHIHGEIYRRRGWLTSEGKEIKNKDEILALLKALFLPKRLSIIHCPGHQKGNRAEARGNRMADQAAREVATRETPETSTLLAGKRTADGSEFEKRTADGSEFESPKKKAKVE

SEQ ID NO: 2488 - protein, 2096 aa, synthetic construct
MPAAKRVKLDGGDKKYSIGLDIGTNSVGWAVITDEYKVPSKKFKVLGNTDRHSIKKNLIGALLFDSGETAEATRLKRTARRRYTRRKNRICYLQEIFSNEMAKVDDSFFHRLEESFLVEEDKKHERHPIFGNIVDEVAYHEKYPTIYHLRKKLVDSTDKADLRLIYLALAHMIKFRGHFLIEGDLNPDNSDVDKLFIQLVQTYNQLFEENPINASGVDAKAILSARLSKSRRLENLIAQLPGEKKNGLFGNLIALSLGLTPNFKSNFDLAEDAKLQLSKDTYDDDLDNLLAQIGDQYADLFLAAKNLSDAILLSDILRVNTEITKAPLSASMIKRYDEHHQDLTLLKALVRQQLPEKYKEIFFDQSKNGYAGYIDGGASQEEFYKFIKPILEKMDGTEELLVKLNREDLLRKQRTFDNGSIPHQIHLGELHAILRRQEDFYPFLKDNREKIEKILTFRIPYYVGPLARGNSRFAWMTRKSEETITPWNFEEVVDKGASAQSFIERMTNFDKNLPNEKVLPKHSLLYEYFTVYNELTKVKYVTEGMRKPAFLSGEQKKAIVDLLFKTNRKVTVKQLKEDYFKKIECFDSVEISGVEDRFNASLGTYHDLLKIIKDKDFLDNEENEDILEDIVLTLTLFEDREMIEERLKTYAHLFDDKVMKQLKRRRYTGWGRLSRKLINGIRDKQSGKTILDFLKSDGFANRNFMQLIHDDSLTFKEDIQKAQVSGQGDSLHEHIANLAGSPAIKKGILQTVKVVDELVKVMGRHKPENIVIEMARENQTTQKGQKNSRERMKRIEEGIKELGSQILKEHPVENTQLQNEKLYLYYLQNGRDMYVDQELDINRLSDYDVDHIVPQSFLKDDSIDNKVLTRSDKARGKSDNVPSEEVVKKMKNYWRQLLNAKLITQRKFDNLTKAERGGLSELDKAGFIKRQLVETRQITKHVAQILDSRMNTKYDENDKLIREVKVITLKSKLVSDFRKDFQFYKVREINNYHHAHDAYLNAVVGTALIKKYPKLESEFVYGDYKVYDVRKMIAKSEQEIGKATAKYFFYSNIMNFFKTEITLANGEIRKRPLIETNGETGEIVWDKGRDFATVRKVLSMPQVNIVKKTEVQTGGFSKESILPKRNSDKLIARKKDWDPKKYGGFDSPTVAYSVLVVAKVEKGKSKKLKSVKELLGITIMERSSFEKNPIDFLEAKGYKEVKKDLIIKLPKYSLFELENGRKRMLASAGELQKGNELALPSKYVNFLYLASHYEKLKGSPEDNEQKQLFVEQHKHYLDEIIEQISEFSKRVILADANLDKVLSAYNKHRDKPIREQAENIIHLFTLTNLGAPAAFKYFDTTIDRKRYTSTKEVLDATLIHQSITGLYETRIDLSQLGGDGGGSSGGSEAAAKGGTLNIEDEYRLHETSKGPDVPLGSTWLSDFPQAWAETGGMGLAVRQAPLIIPLKATSTPVSIKQYPMSQEARLGIKPHIQRLLDQGILVPCQSPWNTPLLPVKKPGTNDYRPVQDLREVNKRVEDIHPTVPNPYNLLSGLPPSHQWYTVLDLKDAFFCLRLHPTSQSLFAFEWRDPEMGISGQLTWTRLPQGFKNSPTLFNEALHRDLADFRIQHPDLILLQYVDDLLLAATSELDCQQGTRALLQTLGDLGYRASAKKAQICQKQVKYLGYLLKEGQRWLTEARKETVMGQPTPKTPRQLREFLGTAGFCRLWIPGFAEMAAPLYPLTKPGTLFEWGPDQQKAYQEIKQALLTAPALGLPDLTKPFELFVDEKQGYAKGVLTQKLGPWRRPVAYLSKKLDPVAAGWPPCLRMVAAIAVLTKDAGKLTMGQPLVILAPHAVEALVKQPPDRWLSNARMTHYQALLLDTDRVQFGPIVALNPATLLPLPEEGLQHDCLDILAEAHGTRPDLTDQPLPDADHTWYTDGSSFLQEGQRKAGAAVTTETEVVWAKALPAGTSAQRAELIALTQALKMAEGKKLNVYTDSRYAFATAHIHGEIYRRRGWLTSEGKEIKNKDEILALLKALFLPKRLSIIHCPGHQKGNRAEARGNRMADQAAREVATRETPETSTLLAGKRTADGSEFEKRTADGSEFESPKKKAKVE

SEQ ID NO: 2489 - protein, 2101 aa, synthetic construct
MPAAKRVKLDGGDKKYSIGLDIGTNSVGWAVITDEYKVPSKKFKVLGNTDRHSIKKNLIGALLFDSGETAEATRLKRTARRRYTRRKNRICYLQEIFSNEMAKVDDSFFHRLEESFLVEEDKKHERHPIFGNIVDEVAYHEKYPTIYHLRKKLVDSTDKADLRLIYLALAHMIKFRGHFLIEGDLNPDNSDVDKLFIQLVQTYNQLFEENPINASGVDAKAILSARLSKSRRLENLIAQLPGEKKNGLFGNLIALSLGLTPNFKSNFDLAEDAKLQLSKDTYDDDLDNLLAQIGDQYADLFLAAKNLSDAILLSDILRVNTEITKAPLSASMIKRYDEHHQDLTLLKALVRQQLPEKYKEIFFDQSKNGYAGYIDGGASQEEFYKFIKPILEKMDGTEELLVKLNREDLLRKQRTFDNGSIPHQIHLGELHAILRRQEDFYPFLKDNREKIEKILTFRIPYYVGPLARGNSRFAWMTRKSEETITPWNFEEVVDKGASAQSFIERMTNFDKNLPNEKVLPKHSLLYEYFTVYNELTKVKYVTEGMRKPAFLSGEQKKAIVDLLFKTNRKVTVKQLKEDYFKKIECFDSVEISGVEDRFNASLGTYHDLLKIIKDKDFLDNEENEDILEDIVLTLTLFEDREMIEERLKTYAHLFDDKVMKQLKRRRYTGWGRLSRKLINGIRDKQSGKTILDFLKSDGFANRNFMQLIHDDSLTFKEDIQKAQVSGQGDSLHEHIANLAGSPAIKKGILQTVKVVDELVKVMGRHKPENIVIEMARENQTTQKGQKNSRERMKRIEEGIKELGSQILKEHPVENTQLQNEKLYLYYLQNGRDMYVDQELDINRLSDYDVDHIVPQSFLKDDSIDNKVLTRSDKARGKSDNVPSEEVVKKMKNYWRQLLNAKLITQRKFDNLTKAERGGLSELDKAGFIKRQLVETRQITKHVAQILDSRMNTKYDENDKLIREVKVITLKSKLVSDFRKDFQFYKVREINNYHHAHDAYLNAVVGTALIKKYPKLESEFVYGDYKVYDVRKMIAKSEQEIGKATAKYFFYSNIMNFFKTEITLANGEIRKRPLIETNGETGEIVWDKGRDFATVRKVLSMPQVNIVKKTEVQTGGFSKESILPKRNSDKLIARKKDWDPKKYGGFDSPTVAYSVLVVAKVEKGKSKKLKSVKELLGITIMERSSFEKNPIDFLEAKGYKEVKKDLIIKLPKYSLFELENGRKRMLASAGELQKGNELALPSKYVNFLYLASHYEKLKGSPEDNEQKQLFVEQHKHYLDEIIEQISEFSKRVILADANLDKVLSAYNKHRDKPIREQAENIIHLFTLTNLGAPAAFKYFDTTIDRKRYTSTKEVLDATLIHQSITGLYETRIDLSQLGGDGGSGSETPGTSESATPESGGTLNIEDEYRLHETSKGPDVPLGSTWLSDFPQAWAETGGMGLAVRQAPLIIPLKATSTPVSIKQYPMSQEARLGIKPHIQRLLDQGILVPCQSPWNTPLLPVKKPGTNDYRPVQDLREVNKRVEDIHPTVPNPYNLLSGLPPSHQWYTVLDLKDAFFCLRLHPTSQSLFAFEWRDPEMGISGQLTWTRLPQGFKNSPTLFNEALHRDLADFRIQHPDLILLQYVDDLLLAATSELDCQQGTRALLQTLGDLGYRASAKKAQICQKQVKYLGYLLKEGQRWLTEARKETVMGQPTPKTPRQLREFLGTAGFCRLWIPGFAEMAAPLYPLTKPGTLFEWGPDQQKAYQEIKQALLTAPALGLPDLTKPFELFVDEKQGYAKGVLTQKLGPWRRPVAYLSKKLDPVAAGWPPCLRMVAAIAVLTKDAGKLTMGQPLVILAPHAVEALVKQPPDRWLSNARMTHYQALLLDTDRVQFGPIVALNPATLLPLPEEGLQHDCLDILAEAHGTRPDLTDQPLPDADHTWYTDGSSFLQEGQRKAGAAVTTETEVVWAKALPAGTSAQRAELIALTQALKMAEGKKLNVYTDSRYAFATAHIHGEIYRRRGWLTSEGKEIKNKDEILALLKALFLPKRLSIIHCPGHQKGNRAEARGNRMADQAAREVATRETPETSTLLAGKRTADGSEFEKRTADGSEFESPKKKAKVE

SEQ ID NO: 2490 - protein, 2097 aa, synthetic construct
MPAAKRVKLDGGDKKYSIGLDIGTNSVGWAVITDEYKVPSKKFKVLGNTDRHSIKKNLIGALLFDSGETAEATRLKRTARRRYTRRKNRICYLQEIFSNEMAKVDDSFFHRLEESFLVEEDKKHERHPIFGNIVDEVAYHEKYPTIYHLRKKLVDSTDKADLRLIYLALAHMIKFRGHFLIEGDLNPDNSDVDKLFIQLVQTYNQLFEENPINASGVDAKAILSARLSKSRRLENLIAQLPGEKKNGLFGNLIALSLGLTPNFKSNFDLAEDAKLQLSKDTYDDDLDNLLAQIGDQYADLFLAAKNLSDAILLSDILRVNTEITKAPLSASMIKRYDEHHQDLTLLKALVRQQLPEKYKEIFFDQSKNGYAGYIDGGASQEEFYKFIKPILEKMDGTEELLVKLNREDLLRKQRTFDNGSIPHQIHLGELHAILRRQEDFYPFLKDNREKIEKILTFRIPYYVGPLARGNSRFAWMTRKSEETITPWNFEEVVDKGASAQSFIERMTNFDKNLPNEKVLPKHSLLYEYFTVYNELTKVKYVTEGMRKPAFLSGEQKKAIVDLLFKTNRKVTVKQLKEDYFKKIECFDSVEISGVEDRFNASLGTYHDLLKIIKDKDFLDNEENEDILEDIVLTLTLFEDREMIEERLKTYAHLFDDKVMKQLKRRRYTGWGRLSRKLINGIRDKQSGKTILDFLKSDGFANRNFMQLIHDDSLTFKEDIQKAQVSGQGDSLHEHIANLAGSPAIKKGILQTVKVVDELVKVMGRHKPENIVIEMARENQTTQKGQKNSRERMKRIEEGIKELGSQILKEHPVENTQLQNEKLYLYYLQNGRDMYVDQELDINRLSDYDVDHIVPQSFLKDDSIDNKVLTRSDKARGKSDNVPSEEVVKKMKNYWRQLLNAKLITQRKFDNLTKAERGGLSELDKAGFIKRQLVETRQITKHVAQILDSRMNTKYDENDKLIREVKVITLKSKLVSDFRKDFQFYKVREINNYHHAHDAYLNAVVGTALIKKYPKLESEFVYGDYKVYDVRKMIAKSEQEIGKATAKYFFYSNIMNFFKTEITLANGEIRKRPLIETNGETGEIVWDKGRDFATVRKVLSMPQVNIVKKTEVQTGGFSKESILPKRNSDKLIARKKDWDPKKYGGFDSPTVAYSVLVVAKVEKGKSKKLKSVKELLGITIMERSSFEKNPIDFLEAKGYKEVKKDLIIKLPKYSLFELENGRKRMLASAGELQKGNELALPSKYVNFLYLASHYEKLKGSPEDNEQKQLFVEQHKHYLDEIIEQISEFSKRVILADANLDKVLSAYNKHRDKPIREQAENIIHLFTLTNLGAPAAFKYFDTTIDRKRYTSTKEVLDATLIHQSITGLYETRIDLSQLGGDGGGSAGSAAGSGEFGGTLNIEDEYRLHETSKGPDVPLGSTWLSDFPQAWAETGGMGLAVRQAPLIIPLKATSTPVSIKQYPMSQEARLGIKPHIQRLLDQGILVPCQSPWNTPLLPVKKPGTNDYRPVQDLREVNKRVEDIHPTVPNPYNLLSGLPPSHQWYTVLDLKDAFFCLRLHPTSQSLFAFEWRDPEMGISGQLTWTRLPQGFKNSPTLFNEALHRDLADFRIQHPDLILLQYVDDLLLAATSELDCQQGTRALLQTLGDLGYRASAKKAQICQKQVKYLGYLLKEGQRWLTEARKETVMGQPTPKTPRQLREFLGTAGFCRLWIPGFAEMAAPLYPLTKPGTLFEWGPDQQKAYQEIKQALLTAPALGLPDLTKPFELFVDEKQGYAKGVLTQKLGPWRRPVAYLSKKLDPVAAGWPPCLRMVAAIAVLTKDAGKLTMGQPLVILAPHAVEALVKQPPDRWLSNARMTHYQALLLDTDRVQFGPIVALNPATLLPLPEEGLQHDCLDILAEAHGTRPDLTDQPLPDADHTWYTDGSSFLQEGQRKAGAAVTTETEVVWAKALPAGTSAQRAELIALTQALKMAEGKKLNVYTDSRYAFATAHIHGEIYRRRGWLTSEGKEIKNKDEILALLKALFLPKRLSIIHCPGHQKGNRAEARGNRMADQAAREVATRETPETSTLLAGKRTADGSEFEKRTADGSEFESPKKKAKVE

SEQ ID NO: 2491 - protein, 2094 aa, synthetic construct
MPAAKRVKLDGGDKKYSIGLDIGTNSVGWAVITDEYKVPSKKFKVLGNTDRHSIKKNLIGALLFDSGETAEATRLKRTARRRYTRRKNRICYLQEIFSNEMAKVDDSFFHRLEESFLVEEDKKHERHPIFGNIVDEVAYHEKYPTIYHLRKKLVDSTDKADLRLIYLALAHMIKFRGHFLIEGDLNPDNSDVDKLFIQLVQTYNQLFEENPINASGVDAKAILSARLSKSRRLENLIAQLPGEKKNGLFGNLIALSLGLTPNFKSNFDLAEDAKLQLSKDTYDDDLDNLLAQIGDQYADLFLAAKNLSDAILLSDILRVNTEITKAPLSASMIKRYDEHHQDLTLLKALVRQQLPEKYKEIFFDQSKNGYAGYIDGGASQEEFYKFIKPILEKMDGTEELLVKLNREDLLRKQRTFDNGSIPHQIHLGELHAILRRQEDFYPFLKDNREKIEKILTFRIPYYVGPLARGNSRFAWMTRKSEETITPWNFEEVVDKGASAQSFIERMTNFDKNLPNEKVLPKHSLLYEYFTVYNELTKVKYVTEGMRKPAFLSGEQKKAIVDLLFKTNRKVTVKQLKEDYFKKIECFDSVEISGVEDRFNASLGTYHDLLKIIKDKDFLDNEENEDILEDIVLTLTLFEDREMIEERLKTYAHLFDDKVMKQLKRRRYTGWGRLSRKLINGIRDKQSGKTILDFLKSDGFANRNFMQLIHDDSLTFKEDIQKAQVSGQGDSLHEHIANLAGSPAIKKGILQTVKVVDELVKVMGRHKPENIVIEMARENQTTQKGQKNSRERMKRIEEGIKELGSQILKEHPVENTQLQNEKLYLYYLQNGRDMYVDQELDINRLSDYDVDHIVPQSFLKDDSIDNKVLTRSDKARGKSDNVPSEEVVKKMKNYWRQLLNAKLITQRKFDNLTKAERGGLSELDKAGFIKRQLVETRQITKHVAQILDSRMNTKYDENDKLIREVKVITLKSKLVSDFRKDFQFYKVREINNYHHAHDAYLNAVVGTALIKKYPKLESEFVYGDYKVYDVRKMIAKSEQEIGKATAKYFFYSNIMNFFKTEITLANGEIRKRPLIETNGETGEIVWDKGRDFATVRKVLSMPQVNIVKKTEVQTGGFSKESILPKRNSDKLIARKKDWDPKKYGGFDSPTVAYSVLVVAKVEKGKSKKLKSVKELLGITIMERSSFEKNPIDFLEAKGYKEVKKDLIIKLPKYSLFELENGRKRMLASAGELQKGNELALPSKYVNFLYLASHYEKLKGSPEDNEQKQLFVEQHKHYLDEIIEQISEFSKRVILADANLDKVLSAYNKHRDKPIREQAENIIHLFTLTNLGAPAAFKYFDTTIDRKRYTSTKEVLDATLIHQSITGLYETRIDLSQLGGDGGGSSGGSPAPGGTLNIEDEYRLHETSKGPDVPLGSTWLSDFPQAWAETGGMGLAVRQAPLIIPLKATSTPVSIKQYPMSQEARLGIKPHIQRLLDQGILVPCQSPWNTPLLPVKKPGTNDYRPVQDLREVNKRVEDIHPTVPNPYNLLSGLPPSHQWYTVLDLKDAFFCLRLHPTSQSLFAFEWRDPEMGISGQLTWTRLPQGFKNSPTLFNEALHRDLADFRIQHPDLILLQYVDDLLLAATSELDCQQGTRALLQTLGDLGYRASAKKAQICQKQVKYLGYLLKEGQRWLTEARKETVMGQPTPKTPRQLREFLGTAGFCRLWIPGFAEMAAPLYPLTKPGTLFEWGPDQQKAYQEIKQALLTAPALGLPDLTKPFELFVDEKQGYAKGVLTQKLGPWRRPVAYLSKKLDPVAAGWPPCLRMVAAIAVLTKDAGKLTMGQPLVILAPHAVEALVKQPPDRWLSNARMTHYQALLLDTDRVQFGPIVALNPATLLPLPEEGLQHDCLDILAEAHGTRPDLTDQPLPDADHTWYTDGSSFLQEGQRKAGAAVTTETEVVWAKALPAGTSAQRAELIALTQALKMAEGKKLNVYTDSRYAFATAHIHGEIYRRRGWLTSEGKEIKNKDEILALLKALFLPKRLSIIHCPGHQKGNRAEARGNRMADQAAREVATRETPETSTLLAGKRTADGSEFEKRTADGSEFESPKKKAKVE

SEQ ID NO: 2492 - protein, 2091 aa, synthetic construct
MPAAKRVKLDGGDKKYSIGLDIGTNSVGWAVITDEYKVPSKKFKVLGNTDRHSIKKNLIGALLFDSGETAEATRLKRTARRRYTRRKNRICYLQEIFSNEMAKVDDSFFHRLEESFLVEEDKKHERHPIFGNIVDEVAYHEKYPTIYHLRKKLVDSTDKADLRLIYLALAHMIKFRGHFLIEGDLNPDNSDVDKLFIQLVQTYNQLFEENPINASGVDAKAILSARLSKSRRLENLIAQLPGEKKNGLFGNLIALSLGLTPNFKSNFDLAEDAKLQLSKDTYDDDLDNLLAQIGDQYADLFLAAKNLSDAILLSDILRVNTEITKAPLSASMIKRYDEHHQDLTLLKALVRQQLPEKYKEIFFDQSKNGYAGYIDGGASQEEFYKFIKPILEKMDGTEELLVKLNREDLLRKQRTFDNGSIPHQIHLGELHAILRRQEDFYPFLKDNREKIEKILTFRIPYYVGPLARGNSRFAWMTRKSEETITPWNFEEVVDKGASAQSFIERMTNFDKNLPNEKVLPKHSLLYEYFTVYNELTKVKYVTEGMRKPAFLSGEQKKAIVDLLFKTNRKVTVKQLKEDYFKKIECFDSVEISGVEDRFNASLGTYHDLLKIIKDKDFLDNEENEDILEDIVLTLTLFEDREMIEERLKTYAHLFDDKVMKQLKRRRYTGWGRLSRKLINGIRDKQSGKTILDFLKSDGFANRNFMQLIHDDSLTFKEDIQKAQVSGQGDSLHEHIANLAGSPAIKKGILQTVKVVDELVKVMGRHKPENIVIEMARENQTTQKGQKNSRERMKRIEEGIKELGSQILKEHPVENTQLQNEKLYLYYLQNGRDMYVDQELDINRLSDYDVDHIVPQSFLKDDSIDNKVLTRSDKARGKSDNVPSEEVVKKMKNYWRQLLNAKLITQRKFDNLTKAERGGLSELDKAGFIKRQLVETRQITKHVAQILDSRMNTKYDENDKLIREVKVITLKSKLVSDFRKDFQFYKVREINNYHHAHDAYLNAVVGTALIKKYPKLESEFVYGDYKVYDVRKMIAKSEQEIGKATAKYFFYSNIMNFFKTEITLANGEIRKRPLIETNGETGEIVWDKGRDFATVRKVLSMPQVNIVKKTEVQTGGFSKESILPKRNSDKLIARKKDWDPKKYGGFDSPTVAYSVLVVAKVEKGKSKKLKSVKELLGITIMERSSFEKNPIDFLEAKGYKEVKKDLIIKLPKYSLFELENGRKRMLASAGELQKGNELALPSKYVNFLYLASHYEKLKGSPEDNEQKQLFVEQHKHYLDEIIEQISEFSKRVILADANLDKVLSAYNKHRDKPIREQAENIIHLFTLTNLGAPAAFKYFDTTIDRKRYTSTKEVLDATLIHQSITGLYETRIDLSQLGGDGGPAPGGGGGTLNIEDEYRLHETSKGPDVPLGSTWLSDFPQAWAETGGMGLAVRQAPLIIPLKATSTPVSIKQYPMSQEARLGIKPHIQRLLDQGILVPCQSPWNTPLLPVKKPGTNDYRPVQDLREVNKRVEDIHPTVPNPYNLLSGLPPSHQWYTVLDLKDAFFCLRLHPTSQSLFAFEWRDPEMGISGQLTWTRLPQGFKNSPTLFNEALHRDLADFRIQHPDLILLQYVDDLLLAATSELDCQQGTRALLQTLGDLGYRASAKKAQICQKQVKYLGYLLKEGQRWLTEARKETVMGQPTPKTPRQLREFLGTAGFCRLWIPGFAEMAAPLYPLTKPGTLFEWGPDQQKAYQEIKQALLTAPALGLPDLTKPFELFVDEKQGYAKGVLTQKLGPWRRPVAYLSKKLDPVAAGWPPCLRMVAAIAVLTKDAGKLTMGQPLVILAPHAVEALVKQPPDRWLSNARMTHYQALLLDTDRVQFGPIVALNPATLLPLPEEGLQHDCLDILAEAHGTRPDLTDQPLPDADHTWYTDGSSFLQEGQRKAGAAVTTETEVVWAKALPAGTSAQRAELIALTQALKMAEGKKLNVYTDSRYAFATAHIHGEIYRRRGWLTSEGKEIKNKDEILALLKALFLPKRLSIIHCPGHQKGNRAEARGNRMADQAAREVATRETPETSTLLAGKRTADGSEFEKRTADGSEFESPKKKAKVE

SEQ ID NO: 2493 - protein, 2094 aa, synthetic construct
MPAAKRVKLDGGDKKYSIGLDIGTNSVGWAVITDEYKVPSKKFKVLGNTDRHSIKKNLIGALLFDSGETAEATRLKRTARRRYTRRKNRICYLQEIFSNEMAKVDDSFFHRLEESFLVEEDKKHERHPIFGNIVDEVAYHEKYPTIYHLRKKLVDSTDKADLRLIYLALAHMIKFRGHFLIEGDLNPDNSDVDKLFIQLVQTYNQLFEENPINASGVDAKAILSARLSKSRRLENLIAQLPGEKKNGLFGNLIALSLGLTPNFKSNFDLAEDAKLQLSKDTYDDDLDNLLAQIGDQYADLFLAAKNLSDAILLSDILRVNTEITKAPLSASMIKRYDEHHQDLTLLKALVRQQLPEKYKEIFFDQSKNGYAGYIDGGASQEEFYKFIKPILEKMDGTEELLVKLNREDLLRKQRTFDNGSIPHQIHLGELHAILRRQEDFYPFLKDNREKIEKILTFRIPYYVGPLARGNSRFAWMTRKSEETITPWNFEEVVDKGASAQSFIERMTNFDKNLPNEKVLPKHSLLYEYFTVYNELTKVKYVTEGMRKPAFLSGEQKKAIVDLLFKTNRKVTVKQLKEDYFKKIECFDSVEISGVEDRFNASLGTYHDLLKIIKDKDFLDNEENEDILEDIVLTLTLFEDREMIEERLKTYAHLFDDKVMKQLKRRRYTGWGRLSRKLINGIRDKQSGKTILDFLKSDGFANRNFMQLIHDDSLTFKEDIQKAQVSGQGDSLHEHIANLAGSPAIKKGILQTVKVVDELVKVMGRHKPENIVIEMARENQTTQKGQKNSRERMKRIEEGIKELGSQILKEHPVENTQLQNEKLYLYYLQNGRDMYVDQELDINRLSDYDVDHIVPQSFLKDDSIDNKVLTRSDKARGKSDNVPSEEVVKKMKNYWRQLLNAKLITQRKFDNLTKAERGGLSELDKAGFIKRQLVETRQITKHVAQILDSRMNTKYDENDKLIREVKVITLKSKLVSDFRKDFQFYKVREINNYHHAHDAYLNAVVGTALIKKYPKLESEFVYGDYKVYDVRKMIAKSEQEIGKATAKYFFYSNIMNFFKTEITLANGEIRKRPLIETNGETGEIVWDKGRDFATVRKVLSMPQVNIVKKTEVQTGGFSKESILPKRNSDKLIARKKDWDPKKYGGFDSPTVAYSVLVVAKVEKGKSKKLKSVKELLGITIMERSSFEKNPIDFLEAKGYKEVKKDLIIKLPKYSLFELENGRKRMLASAGELQKGNELALPSKYVNFLYLASHYEKLKGSPEDNEQKQLFVEQHKHYLDEIIEQISEFSKRVILADANLDKVLSAYNKHRDKPIREQAENIIHLFTLTNLGAPAAFKYFDTTIDRKRYTSTKEVLDATLIHQSITGLYETRIDLSQLGGDGGPAPGGSGGGGGTLNIEDEYRLHETSKGPDVPLGSTWLSDFPQAWAETGGMGLAVRQAPLIIPLKATSTPVSIKQYPMSQEARLGIKPHIQRLLDQGILVPCQSPWNTPLLPVKKPGTNDYRPVQDLREVNKRVEDIHPTVPNPYNLLSGLPPSHQWYTVLDLKDAFFCLRLHPTSQSLFAFEWRDPEMGISGQLTWTRLPQGFKNSPTLFNEALHRDLADFRIQHPDLILLQYVDDLLLAATSELDCQQGTRALLQTLGDLGYRASAKKAQICQKQVKYLGYLLKEGQRWLTEARKETVMGQPTPKTPRQLREFLGTAGFCRLWIPGFAEMAAPLYPLTKPGTLFEWGPDQQKAYQEIKQALLTAPALGLPDLTKPFELFVDEKQGYAKGVLTQKLGPWRRPVAYLSKKLDPVAAGWPPCLRMVAAIAVLTKDAGKLTMGQPLVILAPHAVEALVKQPPDRWLSNARMTHYQALLLDTDRVQFGPIVALNPATLLPLPEEGLQHDCLDILAEAHGTRPDLTDQPLPDADHTWYTDGSSFLQEGQRKAGAAVTTETEVVWAKALPAGTSAQRAELIALTQALKMAEGKKLNVYTDSRYAFATAHIHGEIYRRRGWLTSEGKEIKNKDEILALLKALFLPKRLSIIHCPGHQKGNRAEARGNRMADQAAREVATRETPETSTLLAGKRTADGSEFEKRTADGSEFESPKKKAKVE

SEQ ID NO: 2494 - protein, 2096 aa, synthetic construct
MPAAKRVKLDGGDKKYSIGLDIGTNSVGWAVITDEYKVPSKKFKVLGNTDRHSIKKNLIGALLFDSGETAEATRLKRTARRRYTRRKNRICYLQEIFSNEMAKVDDSFFHRLEESFLVEEDKKHERHPIFGNIVDEVAYHEKYPTIYHLRKKLVDSTDKADLRLIYLALAHMIKFRGHFLIEGDLNPDNSDVDKLFIQLVQTYNQLFEENPINASGVDAKAILSARLSKSRRLENLIAQLPGEKKNGLFGNLIALSLGLTPNFKSNFDLAEDAKLQLSKDTYDDDLDNLLAQIGDQYADLFLAAKNLSDAILLSDILRVNTEITKAPLSASMIKRYDEHHQDLTLLKALVRQQLPEKYKEIFFDQSKNGYAGYIDGGASQEEFYKFIKPILEKMDGTEELLVKLNREDLLRKQRTFDNGSIPHQIHLGELHAILRRQEDFYPFLKDNREKIEKILTFRIPYYVGPLARGNSRFAWMTRKSEETITPWNFEEVVDKGASAQSFIERMTNFDKNLPNEKVLPKHSLLYEYFTVYNELTKVKYVTEGMRKPAFLSGEQKKAIVDLLFKTNRKVTVKQLKEDYFKKIECFDSVEISGVEDRFNASLGTYHDLLKIIKDKDFLDNEENEDILEDIVLTLTLFEDREMIEERLKTYAHLFDDKVMKQLKRRRYTGWGRLSRKLINGIRDKQSGKTILDFLKSDGFANRNFMQLIHDDSLTFKEDIQKAQVSGQGDSLHEHIANLAGSPAIKKGILQTVKVVDELVKVMGRHKPENIVIEMARENQTTQKGQKNSRERMKRIEEGIKELGSQILKEHPVENTQLQNEKLYLYYLQNGRDMYVDQELDINRLSDYDVDHIVPQSFLKDDSIDNKVLTRSDKARGKSDNVPSEEVVKKMKNYWRQLLNAKLITQRKFDNLTKAERGGLSELDKAGFIKRQLVETRQITKHVAQILDSRMNTKYDENDKLIREVKVITLKSKLVSDFRKDFQFYKVREINNYHHAHDAYLNAVVGTALIKKYPKLESEFVYGDYKVYDVRKMIAKSEQEIGKATAKYFFYSNIMNFFKTEITLANGEIRKRPLIETNGETGEIVWDKGRDFATVRKVLSMPQVNIVKKTEVQTGGFSKESILPKRNSDKLIARKKDWDPKKYGGFDSPTVAYSVLVVAKVEKGKSKKLKSVKELLGITIMERSSFEKNPIDFLEAKGYKEVKKDLIIKLPKYSLFELENGRKRMLASAGELQKGNELALPSKYVNFLYLASHYEKLKGSPEDNEQKQLFVEQHKHYLDEIIEQISEFSKRVILADANLDKVLSAYNKHRDKPIREQAENIIHLFTLTNLGAPAAFKYFDTTIDRKRYTSTKEVLDATLIHQSITGLYETRIDLSQLGGDGGPAPEAAAKGGGGGTLNIEDEYRLHETSKGPDVPLGSTWLSDFPQAWAETGGMGLAVRQAPLIIPLKATSTPVSIKQYPMSQEARLGIKPHIQRLLDQGILVPCQSPWNTPLLPVKKPGTNDYRPVQDLREVNKRVEDIHPTVPNPYNLLSGLPPSHQWYTVLDLKDAFFCLRLHPTSQSLFAFEWRDPEMGISGQLTWTRLPQGFKNSPTLFNEALHRDLADFRIQHPDLILLQYVDDLLLAATSELDCQQGTRALLQTLGDLGYRASAKKAQICQKQVKYLGYLLKEGQRWLTEARKETVMGQPTPKTPRQLREFLGTAGFCRLWIPGFAEMAAPLYPLTKPGTLFEWGPDQQKAYQEIKQALLTAPALGLPDLTKPFELFVDEKQGYAKGVLTQKLGPWRRPVAYLSKKLDPVAAGWPPCLRMVAAIAVLTKDAGKLTMGQPLVILAPHAVEALVKQPPDRWLSNARMTHYQALLLDTDRVQFGPIVALNPATLLPLPEEGLQHDCLDILAEAHGTRPDLTDQPLPDADHTWYTDGSSFLQEGQRKAGAAVTTETEVVWAKALPAGTSAQRAELIALTQALKMAEGKKLNVYTDSRYAFATAHIHGEIYRRRGWLTSEGKEIKNKDEILALLKALFLPKRLSIIHCPGHQKGNRAEARGNRMADQAAREVATRETPETSTLLAGKRTADGSEFEKRTADGSEFESPKKKAKVE

SEQ ID NO: 2495 - protein, 2096 aa, synthetic construct
MPAAKRVKLDGGDKKYSIGLDIGTNSVGWAVITDEYKVPSKKFKVLGNTDRHSIKKNLIGALLFDSGETAEATRLKRTARRRYTRRKNRICYLQEIFSNEMAKVDDSFFHRLEESFLVEEDKKHERHPIFGNIVDEVAYHEKYPTIYHLRKKLVDSTDKADLRLIYLALAHMIKFRGHFLIEGDLNPDNSDVDKLFIQLVQTYNQLFEENPINASGVDAKAILSARLSKSRRLENLIAQLPGEKKNGLFGNLIALSLGLTPNFKSNFDLAEDAKLQLSKDTYDDDLDNLLAQIGDQYADLFLAAKNLSDAILLSDILRVNTEITKAPLSASMIKRYDEHHQDLTLLKALVRQQLPEKYKEIFFDQSKNGYAGYIDGGASQEEFYKFIKPILEKMDGTEELLVKLNREDLLRKQRTFDNGSIPHQIHLGELHAILRRQEDFYPFLKDNREKIEKILTFRIPYYVGPLARGNSRFAWMTRKSEETITPWNFEEVVDKGASAQSFIERMTNFDKNLPNEKVLPKHSLLYEYFTVYNELTKVKYVTEGMRKPAFLSGEQKKAIVDLLFKTNRKVTVKQLKEDYFKKIECFDSVEISGVEDRFNASLGTYHDLLKIIKDKDFLDNEENEDILEDIVLTLTLFEDREMIEERLKTYAHLFDDKVMKQLKRRRYTGWGRLSRKLINGIRDKQSGKTILDFLKSDGFANRNFMQLIHDDSLTFKEDIQKAQVSGQGDSLHEHIANLAGSPAIKKGILQTVKVVDELVKVMGRHKPENIVIEMARENQTTQKGQKNSRERMKRIEEGIKELGSQILKEHPVENTQLQNEKLYLYYLQNGRDMYVDQELDINRLSDYDVDHIVPQSFLKDDSIDNKVLTRSDKARGKSDNVPSEEVVKKMKNYWRQLLNAKLITQRKFDNLTKAERGGLSELDKAGFIKRQLVETRQITKHVAQILDSRMNTKYDENDKLIREVKVITLKSKLVSDFRKDFQFYKVREINNYHHAHDAYLNAVVGTALIKKYPKLESEFVYGDYKVYDVRKMIAKSEQEIGKATAKYFFYSNIMNFFKTEITLANGEIRKRPLIETNGETGEIVWDKGRDFATVRKVLSMPQVNIVKKTEVQTGGFSKESILPKRNSDKLIARKKDWDPKKYGGFDSPTVAYSVLVVAKVEKGKSKKLKSVKELLGITIMERSSFEKNPIDFLEAKGYKEVKKDLIIKLPKYSLFELENGRKRMLASAGELQKGNELALPSKYVNFLYLASHYEKLKGSPEDNEQKQLFVEQHKHYLDEIIEQISEFSKRVILADANLDKVLSAYNKHRDKPIREQAENIIHLFTLTNLGAPAAFKYFDTTIDRKRYTSTKEVLDATLIHQSITGLYETRIDLSQLGGDGGEAAAKPAPGGSGGTLNIEDEYRLHETSKGPDVPLGSTWLSDFPQAWAETGGMGLAVRQAPLIIPLKATSTPVSIKQYPMSQEARLGIKPHIQRLLDQGILVPCQSPWNTPLLPVKKPGTNDYRPVQDLREVNKRVEDIHPTVPNPYNLLSGLPPSHQWYTVLDLKDAFFCLRLHPTSQSLFAFEWRDPEMGISGQLTWTRLPQGFKNSPTLFNEALHRDLADFRIQHPDLILLQYVDDLLLAATSELDCQQGTRALLQTLGDLGYRASAKKAQICQKQVKYLGYLLKEGQRWLTEARKETVMGQPTPKTPRQLREFLGTAGFCRLWIPGFAEMAAPLYPLTKPGTLFEWGPDQQKAYQEIKQALLTAPALGLPDLTKPFELFVDEKQGYAKGVLTQKLGPWRRPVAYLSKKLDPVAAGWPPCLRMVAAIAVLTKDAGKLTMGQPLVILAPHAVEALVKQPPDRWLSNARMTHYQALLLDTDRVQFGPIVALNPATLLPLPEEGLQHDCLDILAEAHGTRPDLTDQPLPDADHTWYTDGSSFLQEGQRKAGAAVTTETEVVWAKALPAGTSAQRAELIALTQALKMAEGKKLNVYTDSRYAFATAHIHGEIYRRRGWLTSEGKEIKNKDEILALLKALFLPKRLSIIHCPGHQKGNRAEARGNRMADQAAREVATRETPETSTLLAGKRTADGSEFEKRTADGSEFESPKKKAKVE

SEQ ID NO: 2496 - protein, 2094 aa, synthetic construct
MPAAKRVKLDGGDKKYSIGLDIGTNSVGWAVITDEYKVPSKKFKVLGNTDRHSIKKNLIGALLFDSGETAEATRLKRTARRRYTRRKNRICYLQEIFSNEMAKVDDSFFHRLEESFLVEEDKKHERHPIFGNIVDEVAYHEKYPTIYHLRKKLVDSTDKADLRLIYLALAHMIKFRGHFLIEGDLNPDNSDVDKLFIQLVQTYNQLFEENPINASGVDAKAILSARLSKSRRLENLIAQLPGEKKNGLFGNLIALSLGLTPNFKSNFDLAEDAKLQLSKDTYDDDLDNLLAQIGDQYADLFLAAKNLSDAILLSDILRVNTEITKAPLSASMIKRYDEHHQDLTLLKALVRQQLPEKYKEIFFDQSKNGYAGYIDGGASQEEFYKFIKPILEKMDGTEELLVKLNREDLLRKQRTFDNGSIPHQIHLGELHAILRRQEDFYPFLKDNREKIEKILTFRIPYYVGPLARGNSRFAWMTRKSEETITPWNFEEVVDKGASAQSFIERMTNFDKNLPNEKVLPKHSLLYEYFTVYNELTKVKYVTEGMRKPAFLSGEQKKAIVDLLFKTNRKVTVKQLKEDYFKKIECFDSVEISGVEDRFNASLGTYHDLLKIIKDKDFLDNEENEDILEDIVLTLTLFEDREMIEERLKTYAHLFDDKVMKQLKRRRYTGWGRLSRKLINGIRDKQSGKTILDFLKSDGFANRNFMQLIHDDSLTFKEDIQKAQVSGQGDSLHEHIANLAGSPAIKKGILQTVKVVDELVKVMGRHKPENIVIEMARENQTTQKGQKNSRERMKRIEEGIKELGSQILKEHPVENTQLQNEKLYLYYLQNGRDMYVDQELDINRLSDYDVDHIVPQSFLKDDSIDNKVLTRSDKARGKSDNVPSEEVVKKMKNYWRQLLNAKLITQRKFDNLTKAERGGLSELDKAGFIKRQLVETRQITKHVAQILDSRMNTKYDENDKLIREVKVITLKSKLVSDFRKDFQFYKVREINNYHHAHDAYLNAVVGTALIKKYPKLESEFVYGDYKVYDVRKMIAKSEQEIGKATAKYFFYSNIMNFFKTEITLANGEIRKRPLIETNGETGEIVWDKGRDFATVRKVLSMPQVNIVKKTEVQTGGFSKESILPKRNSDKLIARKKDWDPKKYGGFDSPTVAYSVLVVAKVEKGKSKKLKSVKELLGITIMERSSFEKNPIDFLEAKGYKEVKKDLIIKLPKYSLFELENGRKRMLASAGELQKGNELALPSKYVNFLYLASHYEKLKGSPEDNEQKQLFVEQHKHYLDEIIEQISEFSKRVILADANLDKVLSAYNKHRDKPIREQAENIIHLFTLTNLGAPAAFKYFDTTIDRKRYTSTKEVLDATLIHQSITGLYETRIDLSQLGGDGGGGGPAPGGSGGTLNIEDEYRLHETSKGPDVPLGSTWLSDFPQAWAETGGMGLAVRQAPLIIPLKATSTPVSIKQYPMSQEARLGIKPHIQRLLDQGILVPCQSPWNTPLLPVKKPGTNDYRPVQDLREVNKRVEDIHPTVPNPYNLLSGLPPSHQWYTVLDLKDAFFCLRLHPTSQSLFAFEWRDPEMGISGQLTWTRLPQGFKNSPTLFNEALHRDLADFRIQHPDLILLQYVDDLLLAATSELDCQQGTRALLQTLGDLGYRASAKKAQICQKQVKYLGYLLKEGQRWLTEARKETVMGQPTPKTPRQLREFLGTAGFCRLWIPGFAEMAAPLYPLTKPGTLFEWGPDQQKAYQEIKQALLTAPALGLPDLTKPFELFVDEKQGYAKGVLTQKLGPWRRPVAYLSKKLDPVAAGWPPCLRMVAAIAVLTKDAGKLTMGQPLVILAPHAVEALVKQPPDRWLSNARMTHYQALLLDTDRVQFGPIVALNPATLLPLPEEGLQHDCLDILAEAHGTRPDLTDQPLPDADHTWYTDGSSFLQEGQRKAGAAVTTETEVVWAKALPAGTSAQRAELIALTQALKMAEGKKLNVYTDSRYAFATAHIHGEIYRRRGWLTSEGKEIKNKDEILALLKALFLPKRLSIIHCPGHQKGNRAEARGNRMADQAAREVATRETPETSTLLAGKRTADGSEFEKRTADGSEFESPKKKAKVE

SEQ ID NO: 2497 - protein, 2091 aa, synthetic construct
MPAAKRVKLDGGDKKYSIGLDIGTNSVGWAVITDEYKVPSKKFKVLGNTDRHSIKKNLIGALLFDSGETAEATRLKRTARRRYTRRKNRICYLQEIFSNEMAKVDDSFFHRLEESFLVEEDKKHERHPIFGNIVDEVAYHEKYPTIYHLRKKLVDSTDKADLRLIYLALAHMIKFRGHFLIEGDLNPDNSDVDKLFIQLVQTYNQLFEENPINASGVDAKAILSARLSKSRRLENLIAQLPGEKKNGLFGNLIALSLGLTPNFKSNFDLAEDAKLQLSKDTYDDDLDNLLAQIGDQYADLFLAAKNLSDAILLSDILRVNTEITKAPLSASMIKRYDEHHQDLTLLKALVRQQLPEKYKEIFFDQSKNGYAGYIDGGASQEEFYKFIKPILEKMDGTEELLVKLNREDLLRKQRTFDNGSIPHQIHLGELHAILRRQEDFYPFLKDNREKIEKILTFRIPYYVGPLARGNSRFAWMTRKSEETITPWNFEEVVDKGASAQSFIERMTNFDKNLPNEKVLPKHSLLYEYFTVYNELTKVKYVTEGMRKPAFLSGEQKKAIVDLLFKTNRKVTVKQLKEDYFKKIECFDSVEISGVEDRFNASLGTYHDLLKIIKDKDFLDNEENEDILEDIVLTLTLFEDREMIEERLKTYAHLFDDKVMKQLKRRRYTGWGRLSRKLINGIRDKQSGKTILDFLKSDGFANRNFMQLIHDDSLTFKEDIQKAQVSGQGDSLHEHIANLAGSPAIKKGILQTVKVVDELVKVMGRHKPENIVIEMARENQTTQKGQKNSRERMKRIEEGIKELGSQILKEHPVENTQLQNEKLYLYYLQNGRDMYVDQELDINRLSDYDVDHIVPQSFLKDDSIDNKVLTRSDKARGKSDNVPSEEVVKKMKNYWRQLLNAKLITQRKFDNLTKAERGGLSELDKAGFIKRQLVETRQITKHVAQILDSRMNTKYDENDKLIREVKVITLKSKLVSDFRKDFQFYKVREINNYHHAHDAYLNAVVGTALIKKYPKLESEFVYGDYKVYDVRKMIAKSEQEIGKATAKYFFYSNIMNFFKTEITLANGEIRKRPLIETNGETGEIVWDKGRDFATVRKVLSMPQVNIVKKTEVQTGGFSKESILPKRNSDKLIARKKDWDPKKYGGFDSPTVAYSVLVVAKVEKGKSKKLKSVKELLGITIMERSSFEKNPIDFLEAKGYKEVKKDLIIKLPKYSLFELENGRKRMLASAGELQKGNELALPSKYVNFLYLASHYEKLKGSPEDNEQKQLFVEQHKHYLDEIIEQISEFSKRVILADANLDKVLSAYNKHRDKPIREQAENIIHLFTLTNLGAPAAFKYFDTTIDRKRYTSTKEVLDATLIHQSITGLYETRIDLSQLGGDGGPAPGGSGGTLNIEDEYRLHETSKGPDVPLGSTWLSDFPQAWAETGGMGLAVRQAPLIIPLKATSTPVSIKQYPMSQEARLGIKPHIQRLLDQGILVPCQSPWNTPLLPVKKPGTNDYRPVQDLREVNKRVEDIHPTVPNPYNLLSGLPPSHQWYTVLDLKDAFFCLRLHPTSQSLFAFEWRDPEMGISGQLTWTRLPQGFKNSPTLFNEALHRDLADFRIQHPDLILLQYVDDLLLAATSELDCQQGTRALLQTLGDLGYRASAKKAQICQKQVKYLGYLLKEGQRWLTEARKETVMGQPTPKTPRQLREFLGTAGFCRLWIPGFAEMAAPLYPLTKPGTLFEWGPDQQKAYQEIKQALLTAPALGLPDLTKPFELFVDEKQGYAKGVLTQKLGPWRRPVAYLSKKLDPVAAGWPPCLRMVAAIAVLTKDAGKLTMGQPLVILAPHAVEALVKQPPDRWLSNARMTHYQALLLDTDRVQFGPIVALNPATLLPLPEEGLQHDCLDILAEAHGTRPDLTDQPLPDADHTWYTDGSSFLQEGQRKAGAAVTTETEVVWAKALPAGTSAQRAELIALTQALKMAEGKKLNVYTDSRYAFATAHIHGEIYRRRGWLTSEGKEIKNKDEILALLKALFLPKRLSIIHCPGHQKGNRAEARGNRMADQAAREVATRETPETSTLLAGKRTADGSEFEKRTADGSEFESPKKKAKVE

SEQ ID NO: 2498 - protein, 2094 aa, synthetic construct
MPAAKRVKLDGGDKKYSIGLDIGTNSVGWAVITDEYKVPSKKFKVLGNTDRHSIKKNLIGALLFDSGETAEATRLKRTARRRYTRRKNRICYLQEIFSNEMAKVDDSFFHRLEESFLVEEDKKHERHPIFGNIVDEVAYHEKYPTIYHLRKKLVDSTDKADLRLIYLALAHMIKFRGHFLIEGDLNPDNSDVDKLFIQLVQTYNQLFEENPINASGVDAKAILSARLSKSRRLENLIAQLPGEKKNGLFGNLIALSLGLTPNFKSNFDLAEDAKLQLSKDTYDDDLDNLLAQIGDQYADLFLAAKNLSDAILLSDILRVNTEITKAPLSASMIKRYDEHHQDLTLLKALVRQQLPEKYKEIFFDQSKNGYAGYIDGGASQEEFYKFIKPILEKMDGTEELLVKLNREDLLRKQRTFDNGSIPHQIHLGELHAILRRQEDFYPFLKDNREKIEKILTFRIPYYVGPLARGNSRFAWMTRKSEETITPWNFEEVVDKGASAQSFIERMTNFDKNLPNEKVLPKHSLLYEYFTVYNELTKVKYVTEGMRKPAFLSGEQKKAIVDLLFKTNRKVTVKQLKEDYFKKIECFDSVEISGVEDRFNASLGTYHDLLKIIKDKDFLDNEENEDILEDIVLTLTLFEDREMIEERLKTYAHLFDDKVMKQLKRRRYTGWGRLSRKLINGIRDKQSGKTILDFLKSDGFANRNFMQLIHDDSLTFKEDIQKAQVSGQGDSLHEHIANLAGSPAIKKGILQTVKVVDELVKVMGRHKPENIVIEMARENQTTQKGQKNSRERMKRIEEGIKELGSQILKEHPVENTQLQNEKLYLYYLQNGRDMYVDQELDINRLSDYDVDHIVPQSFLKDDSIDNKVLTRSDKARGKSDNVPSEEVVKKMKNYWRQLLNAKLITQRKFDNLTKAERGGLSELDKAGFIKRQLVETRQITKHVAQILDSRMNTKYDENDKLIREVKVITLKSKLVSDFRKDFQFYKVREINNYHHAHDAYLNAVVGTALIKKYPKLESEFVYGDYKVYDVRKMIAKSEQEIGKATAKYFFYSNIMNFFKTEITLANGEIRKRPLIETNGETGEIVWDKGRDFATVRKVLSMPQVNIVKKTEVQTGGFSKESILPKRNSDKLIARKKDWDPKKYGGFDSPTVAYSVLVVAKVEKGKSKKLKSVKELLGITIMERSSFEKNPIDFLEAKGYKEVKKDLIIKLPKYSLFELENGRKRMLASAGELQKGNELALPSKYVNFLYLASHYEKLKGSPEDNEQKQLFVEQHKHYLDEIIEQISEFSKRVILADANLDKVLSAYNKHRDKPIREQAENIIHLFTLTNLGAPAAFKYFDTTIDRKRYTSTKEVLDATLIHQSITGLYETRIDLSQLGGDGGGGGGGSPAPGGTLNIEDEYRLHETSKGPDVPLGSTWLSDFPQAWAETGGMGLAVRQAPLIIPLKATSTPVSIKQYPMSQEARLGIKPHIQRLLDQGILVPCQSPWNTPLLPVKKPGTNDYRPVQDLREVNKRVEDIHPTVPNPYNLLSGLPPSHQWYTVLDLKDAFFCLRLHPTSQSLFAFEWRDPEMGISGQLTWTRLPQGFKNSPTLFNEALHRDLADFRIQHPDLILLQYVDDLLLAATSELDCQQGTRALLQTLGDLGYRASAKKAQICQKQVKYLGYLLKEGQRWLTEARKETVMGQPTPKTPRQLREFLGTAGFCRLWIPGFAEMAAPLYPLTKPGTLFEWGPDQQKAYQEIKQALLTAPALGLPDLTKPFELFVDEKQGYAKGVLTQKLGPWRRPVAYLSKKLDPVAAGWPPCLRMVAAIAVLTKDAGKLTMGQPLVILAPHAVEALVKQPPDRWLSNARMTHYQALLLDTDRVQFGPIVALNPATLLPLPEEGLQHDCLDILAEAHGTRPDLTDQPLPDADHTWYTDGSSFLQEGQRKAGAAVTTETEVVWAKALPAGTSAQRAELIALTQALKMAEGKKLNVYTDSRYAFATAHIHGEIYRRRGWLTSEGKEIKNKDEILALLKALFLPKRLSIIHCPGHQKGNRAEARGNRMADQAAREVATRETPETSTLLAGKRTADGSEFEKRTADGSEFESPKKKAKVE

SEQ ID NO: 2499 - protein, 2094 aa, synthetic construct
MPAAKRVKLDGGDKKYSIGLDIGTNSVGWAVITDEYKVPSKKFKVLGNTDRHSIKKNLIGALLFDSGETAEATRLKRTARRRYTRRKNRICYLQEIFSNEMAKVDDSFFHRLEESFLVEEDKKHERHPIFGNIVDEVAYHEKYPTIYHLRKKLVDSTDKADLRLIYLALAHMIKFRGHFLIEGDLNPDNSDVDKLFIQLVQTYNQLFEENPINASGVDAKAILSARLSKSRRLENLIAQLPGEKKNGLFGNLIALSLGLTPNFKSNFDLAEDAKLQLSKDTYDDDLDNLLAQIGDQYADLFLAAKNLSDAILLSDILRVNTEITKAPLSASMIKRYDEHHQDLTLLKALVRQQLPEKYKEIFFDQSKNGYAGYIDGGASQEEFYKFIKPILEKMDGTEELLVKLNREDLLRKQRTFDNGSIPHQIHLGELHAILRRQEDFYPFLKDNREKIEKILTFRIPYYVGPLARGNSRFAWMTRKSEETITPWNFEEVVDKGASAQSFIERMTNFDKNLPNEKVLPKHSLLYEYFTVYNELTKVKYVTEGMRKPAFLSGEQKKAIVDLLFKTNRKVTVKQLKEDYFKKIECFDSVEISGVEDRFNASLGTYHDLLKIIKDKDFLDNEENEDILEDIVLTLTLFEDREMIEERLKTYAHLFDDKVMKQLKRRRYTGWGRLSRKLINGIRDKQSGKTILDFLKSDGFANRNFMQLIHDDSLTFKEDIQKAQVSGQGDSLHEHIANLAGSPAIKKGILQTVKVVDELVKVMGRHKPENIVIEMARENQTTQKGQKNSRERMKRIEEGIKELGSQILKEHPVENTQLQNEKLYLYYLQNGRDMYVDQELDINRLSDYDVDHIVPQSFLKDDSIDNKVLTRSDKARGKSDNVPSEEVVKKMKNYWRQLLNAKLITQRKFDNLTKAERGGLSELDKAGFIKRQLVETRQITKHVAQILDSRMNTKYDENDKLIREVKVITLKSKLVSDFRKDFQFYKVREINNYHHAHDAYLNAVVGTALIKKYPKLESEFVYGDYKVYDVRKMIAKSEQEIGKATAKYFFYSNIMNFFKTEITLANGEIRKRPLIETNGETGEIVWDKGRDFATVRKVLSMPQVNIVKKTEVQTGGFSKESILPKRNSDKLIARKKDWDPKKYGGFDSPTVAYSVLVVAKVEKGKSKKLKSVKELLGITIMERSSFEKNPIDFLEAKGYKEVKKDLIIKLPKYSLFELENGRKRMLASAGELQKGNELALPSKYVNFLYLASHYEKLKGSPEDNEQKQLFVEQHKHYLDEIIEQISEFSKRVILADANLDKVLSAYNKHRDKPIREQAENIIHLFTLTNLGAPAAFKYFDTTIDRKRYTSTKEVLDATLIHQSITGLYETRIDLSQLGGDGGGGSGGSGGSGGTLNIEDEYRLHETSKGPDVPLGSTWLSDFPQAWAETGGMGLAVRQAPLIIPLKATSTPVSIKQYPMSQEARLGIKPHIQRLLDQGILVPCQSPWNTPLLPVKKPGTNDYRPVQDLREVNKRVEDIHPTVPNPYNLLSGLPPSHQWYTVLDLKDAFFCLRLHPTSQSLFAFEWRDPEMGISGQLTWTRLPQGFKNSPTLFNEALHRDLADFRIQHPDLILLQYVDDLLLAATSELDCQQGTRALLQTLGDLGYRASAKKAQICQKQVKYLGYLLKEGQRWLTEARKETVMGQPTPKTPRQLREFLGTAGFCRLWIPGFAEMAAPLYPLTKPGTLFEWGPDQQKAYQEIKQALLTAPALGLPDLTKPFELFVDEKQGYAKGVLTQKLGPWRRPVAYLSKKLDPVAAGWPPCLRMVAAIAVLTKDAGKLTMGQPLVILAPHAVEALVKQPPDRWLSNARMTHYQALLLDTDRVQFGPIVALNPATLLPLPEEGLQHDCLDILAEAHGTRPDLTDQPLPDADHTWYTDGSSFLQEGQRKAGAAVTTETEVVWAKALPAGTSAQRAELIALTQALKMAEGKKLNVYTDSRYAFATAHIHGEIYRRRGWLTSEGKEIKNKDEILALLKALFLPKRLSIIHCPGHQKGNRAEARGNRMADQAAREVATRETPETSTLLAGKRTADGSEFEKRTADGSEFESPKKKAKVE

SEQ ID NO: 2500 - protein, 2093 aa, synthetic construct
MPAAKRVKLDGGDKKYSIGLDIGTNSVGWAVITDEYKVPSKKFKVLGNTDRHSIKKNLIGALLFDSGETAEATRLKRTARRRYTRRKNRICYLQEIFSNEMAKVDDSFFHRLEESFLVEEDKKHERHPIFGNIVDEVAYHEKYPTIYHLRKKLVDSTDKADLRLIYLALAHMIKFRGHFLIEGDLNPDNSDVDKLFIQLVQTYNQLFEENPINASGVDAKAILSARLSKSRRLENLIAQLPGEKKNGLFGNLIALSLGLTPNFKSNFDLAEDAKLQLSKDTYDDDLDNLLAQIGDQYADLFLAAKNLSDAILLSDILRVNTEITKAPLSASMIKRYDEHHQDLTLLKALVRQQLPEKYKEIFFDQSKNGYAGYIDGGASQEEFYKFIKPILEKMDGTEELLVKLNREDLLRKQRTFDNGSIPHQIHLGELHAILRRQEDFYPFLKDNREKIEKILTFRIPYYVGPLARGNSRFAWMTRKSEETITPWNFEEVVDKGASAQSFIERMTNFDKNLPNEKVLPKHSLLYEYFTVYNELTKVKYVTEGMRKPAFLSGEQKKAIVDLLFKTNRKVTVKQLKEDYFKKIECFDSVEISGVEDRFNASLGTYHDLLKIIKDKDFLDNEENEDILEDIVLTLTLFEDREMIEERLKTYAHLFDDKVMKQLKRRRYTGWGRLSRKLINGIRDKQSGKTILDFLKSDGFANRNFMQLIHDDSLTFKEDIQKAQVSGQGDSLHEHIANLAGSPAIKKGILQTVKVVDELVKVMGRHKPENIVIEMARENQTTQKGQKNSRERMKRIEEGIKELGSQILKEHPVENTQLQNEKLYLYYLQNGRDMYVDQELDINRLSDYDVDHIVPQSFLKDDSIDNKVLTRSDKARGKSDNVPSEEVVKKMKNYWRQLLNAKLITQRKFDNLTKAERGGLSELDKAGFIKRQLVETRQITKHVAQILDSRMNTKYDENDKLIREVKVITLKSKLVSDFRKDFQFYKVREINNYHHAHDAYLNAVVGTALIKKYPKLESEFVYGDYKVYDVRKMIAKSEQEIGKATAKYFFYSNIMNFFKTEITLANGEIRKRPLIETNGETGEIVWDKGRDFATVRKVLSMPQVNIVKKTEVQTGGFSKESILPKRNSDKLIARKKDWDPKKYGGFDSPTVAYSVLVVAKVEKGKSKKLKSVKELLGITIMERSSFEKNPIDFLEAKGYKEVKKDLIIKLPKYSLFELENGRKRMLASAGELQKGNELALPSKYVNFLYLASHYEKLKGSPEDNEQKQLFVEQHKHYLDEIIEQISEFSKRVILADANLDKVLSAYNKHRDKPIREQAENIIHLFTLTNLGAPAAFKYFDTTIDRKRYTSTKEVLDATLIHQSITGLYETRIDLSQLGGDGGGGGGGGGGGGTLNIEDEYRLHETSKGPDVPLGSTWLSDFPQAWAETGGMGLAVRQAPLIIPLKATSTPVSIKQYPMSQEARLGIKPHIQRLLDQGILVPCQSPWNTPLLPVKKPGTNDYRPVQDLREVNKRVEDIHPTVPNPYNLLSGLPPSHQWYTVLDLKDAFFCLRLHPTSQSLFAFEWRDPEMGISGQLTWTRLPQGFKNSPTLFNEALHRDLADFRIQHPDLILLQYVDDLLLAATSELDCQQGTRALLQTLGDLGYRASAKKAQICQKQVKYLGYLLKEGQRWLTEARKETVMGQPTPKTPRQLREFLGTAGFCRLWIPGFAEMAAPLYPLTKPGTLFEWGPDQQKAYQEIKQALLTAPALGLPDLTKPFELFVDEKQGYAKGVLTQKLGPWRRPVAYLSKKLDPVAAGWPPCLRMVAAIAVLTKDAGKLTMGQPLVILAPHAVEALVKQPPDRWLSNARMTHYQALLLDTDRVQFGPIVALNPATLLPLPEEGLQHDCLDILAEAHGTRPDLTDQPLPDADHTWYTDGSSFLQEGQRKAGAAVTTETEVVWAKALPAGTSAQRAELIALTQALKMAEGKKLNVYTDSRYAFATAHIHGEIYRRRGWLTSEGKEIKNKDEILALLKALFLPKRLSIIHCPGHQKGNRAEARGNRMADQAAREVATRETPETSTLLAGKRTADGSEFEKRTADGSEFESPKKKAKVE

SEQ ID NO: 2501 - protein, 2094 aa, synthetic construct
MPAAKRVKLDGGDKKYSIGLDIGTNSVGWAVITDEYKVPSKKFKVLGNTDRHSIKKNLIGALLFDSGETAEATRLKRTARRRYTRRKNRICYLQEIFSNEMAKVDDSFFHRLEESFLVEEDKKHERHPIFGNIVDEVAYHEKYPTIYHLRKKLVDSTDKADLRLIYLALAHMIKFRGHFLIEGDLNPDNSDVDKLFIQLVQTYNQLFEENPINASGVDAKAILSARLSKSRRLENLIAQLPGEKKNGLFGNLIALSLGLTPNFKSNFDLAEDAKLQLSKDTYDDDLDNLLAQIGDQYADLFLAAKNLSDAILLSDILRVNTEITKAPLSASMIKRYDEHHQDLTLLKALVRQQLPEKYKEIFFDQSKNGYAGYIDGGASQEEFYKFIKPILEKMDGTEELLVKLNREDLLRKQRTFDNGSIPHQIHLGELHAILRRQEDFYPFLKDNREKIEKILTFRIPYYVGPLARGNSRFAWMTRKSEETITPWNFEEVVDKGASAQSFIERMTNFDKNLPNEKVLPKHSLLYEYFTVYNELTKVKYVTEGMRKPAFLSGEQKKAIVDLLFKTNRKVTVKQLKEDYFKKIECFDSVEISGVEDRFNASLGTYHDLLKIIKDKDFLDNEENEDILEDIVLTLTLFEDREMIEERLKTYAHLFDDKVMKQLKRRRYTGWGRLSRKLINGIRDKQSGKTILDFLKSDGFANRNFMQLIHDDSLTFKEDIQKAQVSGQGDSLHEHIANLAGSPAIKKGILQTVKVVDELVKVMGRHKPENIVIEMARENQTTQKGQKNSRERMKRIEEGIKELGSQILKEHPVENTQLQNEKLYLYYLQNGRDMYVDQELDINRLSDYDVDHIVPQSFLKDDSIDNKVLTRSDKARGKSDNVPSEEVVKKMKNYWRQLLNAKLITQRKFDNLTKAERGGLSELDKAGFIKRQLVETRQITKHVAQILDSRMNTKYDENDKLIREVKVITLKSKLVSDFRKDFQFYKVREINNYHHAHDAYLNAVVGTALIKKYPKLESEFVYGDYKVYDVRKMIAKSEQEIGKATAKYFFYSNIMNFFKTEITLANGEIRKRPLIETNGETGEIVWDKGRDFATVRKVLSMPQVNIVKKTEVQTGGFSKESILPKRNSDKLIARKKDWDPKKYGGFDSPTVAYSVLVVAKVEKGKSKKLKSVKELLGITIMERSSFEKNPIDFLEAKGYKEVKKDLIIKLPKYSLFELENGRKRMLASAGELQKGNELALPSKYVNFLYLASHYEKLKGSPEDNEQKQLFVEQHKHYLDEIIEQISEFSKRVILADANLDKVLSAYNKHRDKPIREQAENIIHLFTLTNLGAPAAFKYFDTTIDRKRYTSTKEVLDATLIHQSITGLYETRIDLSQLGGDGGGSSPAPGGSGGTLNIEDEYRLHETSKGPDVPLGSTWLSDFPQAWAETGGMGLAVRQAPLIIPLKATSTPVSIKQYPMSQEARLGIKPHIQRLLDQGILVPCQSPWNTPLLPVKKPGTNDYRPVQDLREVNKRVEDIHPTVPNPYNLLSGLPPSHQWYTVLDLKDAFFCLRLHPTSQSLFAFEWRDPEMGISGQLTWTRLPQGFKNSPTLFNEALHRDLADFRIQHPDLILLQYVDDLLLAATSELDCQQGTRALLQTLGDLGYRASAKKAQICQKQVKYLGYLLKEGQRWLTEARKETVMGQPTPKTPRQLREFLGTAGFCRLWIPGFAEMAAPLYPLTKPGTLFEWGPDQQKAYQEIKQALLTAPALGLPDLTKPFELFVDEKQGYAKGVLTQKLGPWRRPVAYLSKKLDPVAAGWPPCLRMVAAIAVLTKDAGKLTMGQPLVILAPHAVEALVKQPPDRWLSNARMTHYQALLLDTDRVQFGPIVALNPATLLPLPEEGLQHDCLDILAEAHGTRPDLTDQPLPDADHTWYTDGSSFLQEGQRKAGAAVTTETEVVWAKALPAGTSAQRAELIALTQALKMAEGKKLNVYTDSRYAFATAHIHGEIYRRRGWLTSEGKEIKNKDEILALLKALFLPKRLSIIHCPGHQKGNRAEARGNRMADQAAREVATRETPETSTLLAGKRTADGSEFEKRTADGSEFESPKKKAKVE

SEQ ID NO: 2502 - protein, 2094 aa, synthetic construct
MPAAKRVKLDGGDKKYSIGLDIGTNSVGWAVITDEYKVPSKKFKVLGNTDRHSIKKNLIGALLFDSGETAEATRLKRTARRRYTRRKNRICYLQEIFSNEMAKVDDSFFHRLEESFLVEEDKKHERHPIFGNIVDEVAYHEKYPTIYHLRKKLVDSTDKADLRLIYLALAHMIKFRGHFLIEGDLNPDNSDVDKLFIQLVQTYNQLFEENPINASGVDAKAILSARLSKSRRLENLIAQLPGEKKNGLFGNLIALSLGLTPNFKSNFDLAEDAKLQLSKDTYDDDLDNLLAQIGDQYADLFLAAKNLSDAILLSDILRVNTEITKAPLSASMIKRYDEHHQDLTLLKALVRQQLPEKYKEIFFDQSKNGYAGYIDGGASQEEFYKFIKPILEKMDGTEELLVKLNREDLLRKQRTFDNGSIPHQIHLGELHAILRRQEDFYPFLKDNREKIEKILTFRIPYYVGPLARGNSRFAWMTRKSEETITPWNFEEVVDKGASAQSFIERMTNFDKNLPNEKVLPKHSLLYEYFTVYNELTKVKYVTEGMRKPAFLSGEQKKAIVDLLFKTNRKVTVKQLKEDYFKKIECFDSVEISGVEDRFNASLGTYHDLLKIIKDKDFLDNEENEDILEDIVLTLTLFEDREMIEERLKTYAHLFDDKVMKQLKRRRYTGWGRLSRKLINGIRDKQSGKTILDFLKSDGFANRNFMQLIHDDSLTFKEDIQKAQVSGQGDSLHEHIANLAGSPAIKKGILQTVKVVDELVKVMGRHKPENIVIEMARENQTTQKGQKNSRERMKRIEEGIKELGSQILKEHPVENTQLQNEKLYLYYLQNGRDMYVDQELDINRLSDYDVDHIVPQSFLKDDSIDNKVLTRSDKARGKSDNVPSEEVVKKMKNYWRQLLNAKLITQRKFDNLTKAERGGLSELDKAGFIKRQLVETRQITKHVAQILDSRMNTKYDENDKLIREVKVITLKSKLVSDFRKDFQFYKVREINNYHHAHDAYLNAVVGTALIKKYPKLESEFVYGDYKVYDVRKMIAKSEQEIGKATAKYFFYSNIMNFFKTEITLANGEIRKRPLIETNGETGEIVWDKGRDFATVRKVLSMPQVNIVKKTEVQTGGFSKESILPKRNSDKLIARKKDWDPKKYGGFDSPTVAYSVLVVAKVEKGKSKKLKSVKELLGITIMERSSFEKNPIDFLEAKGYKEVKKDLIIKLPKYSLFELENGRKRMLASAGELQKGNELALPSKYVNFLYLASHYEKLKGSPEDNEQKQLFVEQHKHYLDEIIEQISEFSKRVILADANLDKVLSAYNKHRDKPIREQAENIIHLFTLTNLGAPAAFKYFDTTIDRKRYTSTKEVLDATLIHQSITGLYETRIDLSQLGGDGGPAPGGGGGSGGTLNIEDEYRLHETSKGPDVPLGSTWLSDFPQAWAETGGMGLAVRQAPLIIPLKATSTPVSIKQYPMSQEARLGIKPHIQRLLDQGILVPCQSPWNTPLLPVKKPGTNDYRPVQDLREVNKRVEDIHPTVPNPYNLLSGLPPSHQWYTVLDLKDAFFCLRLHPTSQSLFAFEWRDPEMGISGQLTWTRLPQGFKNSPTLFNEALHRDLADFRIQHPDLILLQYVDDLLLAATSELDCQQGTRALLQTLGDLGYRASAKKAQICQKQVKYLGYLLKEGQRWLTEARKETVMGQPTPKTPRQLREFLGTAGFCRLWIPGFAEMAAPLYPLTKPGTLFEWGPDQQKAYQEIKQALLTAPALGLPDLTKPFELFVDEKQGYAKGVLTQKLGPWRRPVAYLSKKLDPVAAGWPPCLRMVAAIAVLTKDAGKLTMGQPLVILAPHAVEALVKQPPDRWLSNARMTHYQALLLDTDRVQFGPIVALNPATLLPLPEEGLQHDCLDILAEAHGTRPDLTDQPLPDADHTWYTDGSSFLQEGQRKAGAAVTTETEVVWAKALPAGTSAQRAELIALTQALKMAEGKKLNVYTDSRYAFATAHIHGEIYRRRGWLTSEGKEIKNKDEILALLKALFLPKRLSIIHCPGHQKGNRAEARGNRMADQAAREVATRETPETSTLLAGKRTADGSEFEKRTADGSEFESPKKKAKVE

SEQ ID NO: 2503 - protein, 2093 aa, synthetic construct
MPAAKRVKLDGGDKKYSIGLDIGTNSVGWAVITDEYKVPSKKFKVLGNTDRHSIKKNLIGALLFDSGETAEATRLKRTARRRYTRRKNRICYLQEIFSNEMAKVDDSFFHRLEESFLVEEDKKHERHPIFGNIVDEVAYHEKYPTIYHLRKKLVDSTDKADLRLIYLALAHMIKFRGHFLIEGDLNPDNSDVDKLFIQLVQTYNQLFEENPINASGVDAKAILSARLSKSRRLENLIAQLPGEKKNGLFGNLIALSLGLTPNFKSNFDLAEDAKLQLSKDTYDDDLDNLLAQIGDQYADLFLAAKNLSDAILLSDILRVNTEITKAPLSASMIKRYDEHHQDLTLLKALVRQQLPEKYKEIFFDQSKNGYAGYIDGGASQEEFYKFIKPILEKMDGTEELLVKLNREDLLRKQRTFDNGSIPHQIHLGELHAILRRQEDFYPFLKDNREKIEKILTFRIPYYVGPLARGNSRFAWMTRKSEETITPWNFEEVVDKGASAQSFIERMTNFDKNLPNEKVLPKHSLLYEYFTVYNELTKVKYVTEGMRKPAFLSGEQKKAIVDLLFKTNRKVTVKQLKEDYFKKIECFDSVEISGVEDRFNASLGTYHDLLKIIKDKDFLDNEENEDILEDIVLTLTLFEDREMIEERLKTYAHLFDDKVMKQLKRRRYTGWGRLSRKLINGIRDKQSGKTILDFLKSDGFANRNFMQLIHDDSLTFKEDIQKAQVSGQGDSLHEHIANLAGSPAIKKGILQTVKVVDELVKVMGRHKPENIVIEMARENQTTQKGQKNSRERMKRIEEGIKELGSQILKEHPVENTQLQNEKLYLYYLQNGRDMYVDQELDINRLSDYDVDHIVPQSFLKDDSIDNKVLTRSDKARGKSDNVPSEEVVKKMKNYWRQLLNAKLITQRKFDNLTKAERGGLSELDKAGFIKRQLVETRQITKHVAQILDSRMNTKYDENDKLIREVKVITLKSKLVSDFRKDFQFYKVREINNYHHAHDAYLNAVVGTALIKKYPKLESEFVYGDYKVYDVRKMIAKSEQEIGKATAKYFFYSNIMNFFKTEITLANGEIRKRPLIETNGETGEIVWDKGRDFATVRKVLSMPQVNIVKKTEVQTGGFSKESILPKRNSDKLIARKKDWDPKKYGGFDSPTVAYSVLVVAKVEKGKSKKLKSVKELLGITIMERSSFEKNPIDFLEAKGYKEVKKDLIIKLPKYSLFELENGRKRMLASAGELQKGNELALPSKYVNFLYLASHYEKLKGSPEDNEQKQLFVEQHKHYLDEIIEQISEFSKRVILADANLDKVLSAYNKHRDKPIREQAENIIHLFTLTNLGAPAAFKYFDTTIDRKRYTSTKEVLDATLIHQSITGLYETRIDLSQLGGDGGGSSEAAAKGGTLNIEDEYRLHETSKGPDVPLGSTWLSDFPQAWAETGGMGLAVRQAPLIIPLKATSTPVSIKQYPMSQEARLGIKPHIQRLLDQGILVPCQSPWNTPLLPVKKPGTNDYRPVQDLREVNKRVEDIHPTVPNPYNLLSGLPPSHQWYTVLDLKDAFFCLRLHPTSQSLFAFEWRDPEMGISGQLTWTRLPQGFKNSPTLFNEALHRDLADFRIQHPDLILLQYVDDLLLAATSELDCQQGTRALLQTLGDLGYRASAKKAQICQKQVKYLGYLLKEGQRWLTEARKETVMGQPTPKTPRQLREFLGKAGFCRLFIPGFAEMAAPLYPLTKPGTLFEWGPDQQKAYQEIKQALLTAPALGLPDLTKPFELFVDEKQGYAKGVLTQKLGPWRRPVAYLSKKLDPVAAGWPPCLRMVAAIAVLTKDAGKLTMGQPLVILAPHAVEALVKQPPDRWLSNARMTHYQALLLDTDRVQFGPIVALNPATLLPLPEEGLQHDCLDILAEAHGTRPDLTDQPLPDADHTWYTDGSSFLQEGQRKAGAAVTTETEVVWAKALPAGTSAQRAELIALTQALKMAEGKKLNVYTDSRYAFATAHIHGEIYRRRGWLTSEGKEIKNKDEILALLKALFLPKRLSIIHCPGHQKGNRAEARGNRMADQAAREVATRETPETSTLLAGKRTADGSEFEKRTADGSEFESPKKKAKVE

SEQ ID NO: 2504 - protein, 2090 aa, synthetic construct
MPAAKRVKLDGGDKKYSIGLDIGTNSVGWAVITDEYKVPSKKFKVLGNTDRHSIKKNLIGALLFDSGETAEATRLKRTARRRYTRRKNRICYLQEIFSNEMAKVDDSFFHRLEESFLVEEDKKHERHPIFGNIVDEVAYHEKYPTIYHLRKKLVDSTDKADLRLIYLALAHMIKFRGHFLIEGDLNPDNSDVDKLFIQLVQTYNQLFEENPINASGVDAKAILSARLSKSRRLENLIAQLPGEKKNGLFGNLIALSLGLTPNFKSNFDLAEDAKLQLSKDTYDDDLDNLLAQIGDQYADLFLAAKNLSDAILLSDILRVNTEITKAPLSASMIKRYDEHHQDLTLLKALVRQQLPEKYKEIFFDQSKNGYAGYIDGGASQEEFYKFIKPILEKMDGTEELLVKLNREDLLRKQRTFDNGSIPHQIHLGELHAILRRQEDFYPFLKDNREKIEKILTFRIPYYVGPLARGNSRFAWMTRKSEETITPWNFEEVVDKGASAQSFIERMTNFDKNLPNEKVLPKHSLLYEYFTVYNELTKVKYVTEGMRKPAFLSGEQKKAIVDLLFKTNRKVTVKQLKEDYFKKIECFDSVEISGVEDRFNASLGTYHDLLKIIKDKDFLDNEENEDILEDIVLTLTLFEDREMIEERLKTYAHLFDDKVMKQLKRRRYTGWGRLSRKLINGIRDKQSGKTILDFLKSDGFANRNFMQLIHDDSLTFKEDIQKAQVSGQGDSLHEHIANLAGSPAIKKGILQTVKVVDELVKVMGRHKPENIVIEMARENQTTQKGQKNSRERMKRIEEGIKELGSQILKEHPVENTQLQNEKLYLYYLQNGRDMYVDQELDINRLSDYDVDHIVPQSFLKDDSIDNKVLTRSDKARGKSDNVPSEEVVKKMKNYWRQLLNAKLITQRKFDNLTKAERGGLSELDKAGFIKRQLVETRQITKHVAQILDSRMNTKYDENDKLIREVKVITLKSKLVSDFRKDFQFYKVREINNYHHAHDAYLNAVVGTALIKKYPKLESEFVYGDYKVYDVRKMIAKSEQEIGKATAKYFFYSNIMNFFKTEITLANGEIRKRPLIETNGETGEIVWDKGRDFATVRKVLSMPQVNIVKKTEVQTGGFSKESILPKRNSDKLIARKKDWDPKKYGGFDSPTVAYSVLVVAKVEKGKSKKLKSVKELLGITIMERSSFEKNPIDFLEAKGYKEVKKDLIIKLPKYSLFELENGRKRMLASAGELQKGNELALPSKYVNFLYLASHYEKLKGSPEDNEQKQLFVEQHKHYLDEIIEQISEFSKRVILADANLDKVLSAYNKHRDKPIREQAENIIHLFTLTNLGAPAAFKYFDTTIDRKRYTSTKEVLDATLIHQSITGLYETRIDLSQLGGDGGGGGGSGGTLNIEDEYRLHETSKGPDVPLGSTWLSDFPQAWAETGGMGLAVRQAPLIIPLKATSTPVSIKQYPMSQEARLGIKPHIQRLLDQGILVPCQSPWNTPLLPVKKPGTNDYRPVQDLREVNKRVEDIHPTVPNPYNLLSGLPPSHQWYTVLDLKDAFFCLRLHPTSQSLFAFEWRDPEMGISGQLTWTRLPQGFKNSPTLFNEALHRDLADFRIQHPDLILLQYVDDLLLAATSELDCQQGTRALLQTLGDLGYRASAKKAQICQKQVKYLGYLLKEGQRWLTEARKETVMGQPTPKTPRQLREFLGKAGFCRLFIPGFAEMAAPLYPLTKPGTLFEWGPDQQKAYQEIKQALLTAPALGLPDLTKPFELFVDEKQGYAKGVLTQKLGPWRRPVAYLSKKLDPVAAGWPPCLRMVAAIAVLTKDAGKLTMGQPLVILAPHAVEALVKQPPDRWLSNARMTHYQALLLDTDRVQFGPIVALNPATLLPLPEEGLQHDCLDILAEAHGTRPDLTDQPLPDADHTWYTDGSSFLQEGQRKAGAAVTTETEVVWAKALPAGTSAQRAELIALTQALKMAEGKKLNVYTDSRYAFATAHIHGEIYRRRGWLTSEGKEIKNKDEILALLKALFLPKRLSIIHCPGHQKGNRAEARGNRMADQAAREVATRETPETSTLLAGKRTADGSEFEKRTADGSEFESPKKKAKVE

SEQ ID NO: 2505 - protein, 2093 aa, synthetic construct
MPAAKRVKLDGGDKKYSIGLDIGTNSVGWAVITDEYKVPSKKFKVLGNTDRHSIKKNLIGALLFDSGETAEATRLKRTARRRYTRRKNRICYLQEIFSNEMAKVDDSFFHRLEESFLVEEDKKHERHPIFGNIVDEVAYHEKYPTIYHLRKKLVDSTDKADLRLIYLALAHMIKFRGHFLIEGDLNPDNSDVDKLFIQLVQTYNQLFEENPINASGVDAKAILSARLSKSRRLENLIAQLPGEKKNGLFGNLIALSLGLTPNFKSNFDLAEDAKLQLSKDTYDDDLDNLLAQIGDQYADLFLAAKNLSDAILLSDILRVNTEITKAPLSASMIKRYDEHHQDLTLLKALVRQQLPEKYKEIFFDQSKNGYAGYIDGGASQEEFYKFIKPILEKMDGTEELLVKLNREDLLRKQRTFDNGSIPHQIHLGELHAILRRQEDFYPFLKDNREKIEKILTFRIPYYVGPLARGNSRFAWMTRKSEETITPWNFEEVVDKGASAQSFIERMTNFDKNLPNEKVLPKHSLLYEYFTVYNELTKVKYVTEGMRKPAFLSGEQKKAIVDLLFKTNRKVTVKQLKEDYFKKIECFDSVEISGVEDRFNASLGTYHDLLKIIKDKDFLDNEENEDILEDIVLTLTLFEDREMIEERLKTYAHLFDDKVMKQLKRRRYTGWGRLSRKLINGIRDKQSGKTILDFLKSDGFANRNFMQLIHDDSLTFKEDIQKAQVSGQGDSLHEHIANLAGSPAIKKGILQTVKVVDELVKVMGRHKPENIVIEMARENQTTQKGQKNSRERMKRIEEGIKELGSQILKEHPVENTQLQNEKLYLYYLQNGRDMYVDQELDINRLSDYDVDHIVPQSFLKDDSIDNKVLTRSDKARGKSDNVPSEEVVKKMKNYWRQLLNAKLITQRKFDNLTKAERGGLSELDKAGFIKRQLVETRQITKHVAQILDSRMNTKYDENDKLIREVKVITLKSKLVSDFRKDFQFYKVREINNYHHAHDAYLNAVVGTALIKKYPKLESEFVYGDYKVYDVRKMIAKSEQEIGKATAKYFFYSNIMNFFKTEITLANGEIRKRPLIETNGETGEIVWDKGRDFATVRKVLSMPQVNIVKKTEVQTGGFSKESILPKRNSDKLIARKKDWDPKKYGGFDSPTVAYSVLVVAKVEKGKSKKLKSVKELLGITIMERSSFEKNPIDFLEAKGYKEVKKDLIIKLPKYSLFELENGRKRMLASAGELQKGNELALPSKYVNFLYLASHYEKLKGSPEDNEQKQLFVEQHKHYLDEIIEQISEFSKRVILADANLDKVLSAYNKHRDKPIREQAENIIHLFTLTNLGAPAAFKYFDTTIDRKRYTSTKEVLDATLIHQSITGLYETRIDLSQLGGDGGPAPEAAAKGGTLNIEDEYRLHETSKGPDVPLGSTWLSDFPQAWAETGGMGLAVRQAPLIIPLKATSTPVSIKQYPMSQEARLGIKPHIQRLLDQGILVPCQSPWNTPLLPVKKPGTNDYRPVQDLREVNKRVEDIHPTVPNPYNLLSGLPPSHQWYTVLDLKDAFFCLRLHPTSQSLFAFEWRDPEMGISGQLTWTRLPQGFKNSPTLFNEALHRDLADFRIQHPDLILLQYVDDLLLAATSELDCQQGTRALLQTLGDLGYRASAKKAQICQKQVKYLGYLLKEGQRWLTEARKETVMGQPTPKTPRQLREFLGKAGFCRLFIPGFAEMAAPLYPLTKPGTLFEWGPDQQKAYQEIKQALLTAPALGLPDLTKPFELFVDEKQGYAKGVLTQKLGPWRRPVAYLSKKLDPVAAGWPPCLRMVAAIAVLTKDAGKLTMGQPLVILAPHAVEALVKQPPDRWLSNARMTHYQALLLDTDRVQFGPIVALNPATLLPLPEEGLQHDCLDILAEAHGTRPDLTDQPLPDADHTWYTDGSSFLQEGQRKAGAAVTTETEVVWAKALPAGTSAQRAELIALTQALKMAEGKKLNVYTDSRYAFATAHIHGEIYRRRGWLTSEGKEIKNKDEILALLKALFLPKRLSIIHCPGHQKGNRAEARGNRMADQAAREVATRETPETSTLLAGKRTADGSEFEKRTADGSEFESPKKKAKVE

SEQ ID NO: 2506 - protein, 2096 aa, synthetic construct
MPAAKRVKLDGGDKKYSIGLDIGTNSVGWAVITDEYKVPSKKFKVLGNTDRHSIKKNLIGALLFDSGETAEATRLKRTARRRYTRRKNRICYLQEIFSNEMAKVDDSFFHRLEESFLVEEDKKHERHPIFGNIVDEVAYHEKYPTIYHLRKKLVDSTDKADLRLIYLALAHMIKFRGHFLIEGDLNPDNSDVDKLFIQLVQTYNQLFEENPINASGVDAKAILSARLSKSRRLENLIAQLPGEKKNGLFGNLIALSLGLTPNFKSNFDLAEDAKLQLSKDTYDDDLDNLLAQIGDQYADLFLAAKNLSDAILLSDILRVNTEITKAPLSASMIKRYDEHHQDLTLLKALVRQQLPEKYKEIFFDQSKNGYAGYIDGGASQEEFYKFIKPILEKMDGTEELLVKLNREDLLRKQRTFDNGSIPHQIHLGELHAILRRQEDFYPFLKDNREKIEKILTFRIPYYVGPLARGNSRFAWMTRKSEETITPWNFEEVVDKGASAQSFIERMTNFDKNLPNEKVLPKHSLLYEYFTVYNELTKVKYVTEGMRKPAFLSGEQKKAIVDLLFKTNRKVTVKQLKEDYFKKIECFDSVEISGVEDRFNASLGTYHDLLKIIKDKDFLDNEENEDILEDIVLTLTLFEDREMIEERLKTYAHLFDDKVMKQLKRRRYTGWGRLSRKLINGIRDKQSGKTILDFLKSDGFANRNFMQLIHDDSLTFKEDIQKAQVSGQGDSLHEHIANLAGSPAIKKGILQTVKVVDELVKVMGRHKPENIVIEMARENQTTQKGQKNSRERMKRIEEGIKELGSQILKEHPVENTQLQNEKLYLYYLQNGRDMYVDQELDINRLSDYDVDHIVPQSFLKDDSIDNKVLTRSDKARGKSDNVPSEEVVKKMKNYWRQLLNAKLITQRKFDNLTKAERGGLSELDKAGFIKRQLVETRQITKHVAQILDSRMNTKYDENDKLIREVKVITLKSKLVSDFRKDFQFYKVREINNYHHAHDAYLNAVVGTALIKKYPKLESEFVYGDYKVYDVRKMIAKSEQEIGKATAKYFFYSNIMNFFKTEITLANGEIRKRPLIETNGETGEIVWDKGRDFATVRKVLSMPQVNIVKKTEVQTGGFSKESILPKRNSDKLIARKKDWDPKKYGGFDSPTVAYSVLVVAKVEKGKSKKLKSVKELLGITIMERSSFEKNPIDFLEAKGYKEVKKDLIIKLPKYSLFELENGRKRMLASAGELQKGNELALPSKYVNFLYLASHYEKLKGSPEDNEQKQLFVEQHKHYLDEIIEQISEFSKRVILADANLDKVLSAYNKHRDKPIREQAENIIHLFTLTNLGAPAAFKYFDTTIDRKRYTSTKEVLDATLIHQSITGLYETRIDLSQLGGDGGEAAAKPAPGGGGGTLNIEDEYRLHETSKGPDVPLGSTWLSDFPQAWAETGGMGLAVRQAPLIIPLKATSTPVSIKQYPMSQEARLGIKPHIQRLLDQGILVPCQSPWNTPLLPVKKPGTNDYRPVQDLREVNKRVEDIHPTVPNPYNLLSGLPPSHQWYTVLDLKDAFFCLRLHPTSQSLFAFEWRDPEMGISGQLTWTRLPQGFKNSPTLFNEALHRDLADFRIQHPDLILLQYVDDLLLAATSELDCQQGTRALLQTLGDLGYRASAKKAQICQKQVKYLGYLLKEGQRWLTEARKETVMGQPTPKTPRQLREFLGKAGFCRLFIPGFAEMAAPLYPLTKPGTLFEWGPDQQKAYQEIKQALLTAPALGLPDLTKPFELFVDEKQGYAKGVLTQKLGPWRRPVAYLSKKLDPVAAGWPPCLRMVAAIAVLTKDAGKLTMGQPLVILAPHAVEALVKQPPDRWLSNARMTHYQALLLDTDRVQFGPIVALNPATLLPLPEEGLQHDCLDILAEAHGTRPDLTDQPLPDADHTWYTDGSSFLQEGQRKAGAAVTTETEVVWAKALPAGTSAQRAELIALTQALKMAEGKKLNVYTDSRYAFATAHIHGEIYRRRGWLTSEGKEIKNKDEILALLKALFLPKRLSIIHCPGHQKGNRAEARGNRMADQAAREVATRETPETSTLLAGKRTADGSEFEKRTADGSEFESPKKKAKVE

SEQ ID NO: 2507 - protein, 2100 aa, synthetic construct
MPAAKRVKLDGGDKKYSIGLDIGTNSVGWAVITDEYKVPSKKFKVLGNTDRHSIKKNLIGALLFDSGETAEATRLKRTARRRYTRRKNRICYLQEIFSNEMAKVDDSFFHRLEESFLVEEDKKHERHPIFGNIVDEVAYHEKYPTIYHLRKKLVDSTDKADLRLIYLALAHMIKFRGHFLIEGDLNPDNSDVDKLFIQLVQTYNQLFEENPINASGVDAKAILSARLSKSRRLENLIAQLPGEKKNGLFGNLIALSLGLTPNFKSNFDLAEDAKLQLSKDTYDDDLDNLLAQIGDQYADLFLAAKNLSDAILLSDILRVNTEITKAPLSASMIKRYDEHHQDLTLLKALVRQQLPEKYKEIFFDQSKNGYAGYIDGGASQEEFYKFIKPILEKMDGTEELLVKLNREDLLRKQRTFDNGSIPHQIHLGELHAILRRQEDFYPFLKDNREKIEKILTFRIPYYVGPLARGNSRFAWMTRKSEETITPWNFEEVVDKGASAQSFIERMTNFDKNLPNEKVLPKHSLLYEYFTVYNELTKVKYVTEGMRKPAFLSGEQKKAIVDLLFKTNRKVTVKQLKEDYFKKIECFDSVEISGVEDRFNASLGTYHDLLKIIKDKDFLDNEENEDILEDIVLTLTLFEDREMIEERLKTYAHLFDDKVMKQLKRRRYTGWGRLSRKLINGIRDKQSGKTILDFLKSDGFANRNFMQLIHDDSLTFKEDIQKAQVSGQGDSLHEHIANLAGSPAIKKGILQTVKVVDELVKVMGRHKPENIVIEMARENQTTQKGQKNSRERMKRIEEGIKELGSQILKEHPVENTQLQNEKLYLYYLQNGRDMYVDQELDINRLSDYDVDHIVPQSFLKDDSIDNKVLTRSDKARGKSDNVPSEEVVKKMKNYWRQLLNAKLITQRKFDNLTKAERGGLSELDKAGFIKRQLVETRQITKHVAQILDSRMNTKYDENDKLIREVKVITLKSKLVSDFRKDFQFYKVREINNYHHAHDAYLNAVVGTALIKKYPKLESEFVYGDYKVYDVRKMIAKSEQEIGKATAKYFFYSNIMNFFKTEITLANGEIRKRPLIETNGETGEIVWDKGRDFATVRKVLSMPQVNIVKKTEVQTGGFSKESILPKRNSDKLIARKKDWDPKKYGGFDSPTVAYSVLVVAKVEKGKSKKLKSVKELLGITIMERSSFEKNPIDFLEAKGYKEVKKDLIIKLPKYSLFELENGRKRMLASAGELQKGNELALPSKYVNFLYLASHYEKLKGSPEDNEQKQLFVEQHKHYLDEIIEQISEFSKRVILADANLDKVLSAYNKHRDKPIREQAENIIHLFTLTNLGAPAAFKYFDTTIDRKRYTSTKEVLDATLIHQSITGLYETRIDLSQLGGDGGEAAAKEAAAKEAAAKGGTLNIEDEYRLHETSKGPDVPLGSTWLSDFPQAWAETGGMGLAVRQAPLIIPLKATSTPVSIKQYPMSQEARLGIKPHIQRLLDQGILVPCQSPWNTPLLPVKKPGTNDYRPVQDLREVNKRVEDIHPTVPNPYNLLSGLPPSHQWYTVLDLKDAFFCLRLHPTSQSLFAFEWRDPEMGISGQLTWTRLPQGFKNSPTLFNEALHRDLADFRIQHPDLILLQYVDDLLLAATSELDCQQGTRALLQTLGDLGYRASAKKAQICQKQVKYLGYLLKEGQRWLTEARKETVMGQPTPKTPRQLREFLGKAGFCRLFIPGFAEMAAPLYPLTKPGTLFEWGPDQQKAYQEIKQALLTAPALGLPDLTKPFELFVDEKQGYAKGVLTQKLGPWRRPVAYLSKKLDPVAAGWPPCLRMVAAIAVLTKDAGKLTMGQPLVILAPHAVEALVKQPPDRWLSNARMTHYQALLLDTDRVQFGPIVALNPATLLPLPEEGLQHDCLDILAEAHGTRPDLTDQPLPDADHTWYTDGSSFLQEGQRKAGAAVTTETEVVWAKALPAGTSAQRAELIALTQALKMAEGKKLNVYTDSRYAFATAHIHGEIYRRRGWLTSEGKEIKNKDEILALLKALFLPKRLSIIHCPGHQKGNRAEARGNRMADQAAREVATRETPETSTLLAGKRTADGSEFEKRTADGSEFESPKKKAKVE

SEQ ID NO: 2508 - protein, 2088 aa, synthetic construct
MPAAKRVKLDGGDKKYSIGLDIGTNSVGWAVITDEYKVPSKKFKVLGNTDRHSIKKNLIGALLFDSGETAEATRLKRTARRRYTRRKNRICYLQEIFSNEMAKVDDSFFHRLEESFLVEEDKKHERHPIFGNIVDEVAYHEKYPTIYHLRKKLVDSTDKADLRLIYLALAHMIKFRGHFLIEGDLNPDNSDVDKLFIQLVQTYNQLFEENPINASGVDAKAILSARLSKSRRLENLIAQLPGEKKNGLFGNLIALSLGLTPNFKSNFDLAEDAKLQLSKDTYDDDLDNLLAQIGDQYADLFLAAKNLSDAILLSDILRVNTEITKAPLSASMIKRYDEHHQDLTLLKALVRQQLPEKYKEIFFDQSKNGYAGYIDGGASQEEFYKFIKPILEKMDGTEELLVKLNREDLLRKQRTFDNGSIPHQIHLGELHAILRRQEDFYPFLKDNREKIEKILTFRIPYYVGPLARGNSRFAWMTRKSEETITPWNFEEVVDKGASAQSFIERMTNFDKNLPNEKVLPKHSLLYEYFTVYNELTKVKYVTEGMRKPAFLSGEQKKAIVDLLFKTNRKVTVKQLKEDYFKKIECFDSVEISGVEDRFNASLGTYHDLLKIIKDKDFLDNEENEDILEDIVLTLTLFEDREMIEERLKTYAHLFDDKVMKQLKRRRYTGWGRLSRKLINGIRDKQSGKTILDFLKSDGFANRNFMQLIHDDSLTFKEDIQKAQVSGQGDSLHEHIANLAGSPAIKKGILQTVKVVDELVKVMGRHKPENIVIEMARENQTTQKGQKNSRERMKRIEEGIKELGSQILKEHPVENTQLQNEKLYLYYLQNGRDMYVDQELDINRLSDYDVDHIVPQSFLKDDSIDNKVLTRSDKARGKSDNVPSEEVVKKMKNYWRQLLNAKLITQRKFDNLTKAERGGLSELDKAGFIKRQLVETRQITKHVAQILDSRMNTKYDENDKLIREVKVITLKSKLVSDFRKDFQFYKVREINNYHHAHDAYLNAVVGTALIKKYPKLESEFVYGDYKVYDVRKMIAKSEQEIGKATAKYFFYSNIMNFFKTEITLANGEIRKRPLIETNGETGEIVWDKGRDFATVRKVLSMPQVNIVKKTEVQTGGFSKESILPKRNSDKLIARKKDWDPKKYGGFDSPTVAYSVLVVAKVEKGKSKKLKSVKELLGITIMERSSFEKNPIDFLEAKGYKEVKKDLIIKLPKYSLFELENGRKRMLASAGELQKGNELALPSKYVNFLYLASHYEKLKGSPEDNEQKQLFVEQHKHYLDEIIEQISEFSKRVILADANLDKVLSAYNKHRDKPIREQAENIIHLFTLTNLGAPAAFKYFDTTIDRKRYTSTKEVLDATLIHQSITGLYETRIDLSQLGGDGGGSSGGTLNIEDEYRLHETSKGPDVPLGSTWLSDFPQAWAETGGMGLAVRQAPLIIPLKATSTPVSIKQYPMSQEARLGIKPHIQRLLDQGILVPCQSPWNTPLLPVKKPGTNDYRPVQDLREVNKRVEDIHPTVPNPYNLLSGLPPSHQWYTVLDLKDAFFCLRLHPTSQSLFAFEWRDPEMGISGQLTWTRLPQGFKNSPTLFNEALHRDLADFRIQHPDLILLQYVDDLLLAATSELDCQQGTRALLQTLGDLGYRASAKKAQICQKQVKYLGYLLKEGQRWLTEARKETVMGQPTPKTPRQLREFLGKAGFCRLFIPGFAEMAAPLYPLTKPGTLFEWGPDQQKAYQEIKQALLTAPALGLPDLTKPFELFVDEKQGYAKGVLTQKLGPWRRPVAYLSKKLDPVAAGWPPCLRMVAAIAVLTKDAGKLTMGQPLVILAPHAVEALVKQPPDRWLSNARMTHYQALLLDTDRVQFGPIVALNPATLLPLPEEGLQHDCLDILAEAHGTRPDLTDQPLPDADHTWYTDGSSFLQEGQRKAGAAVTTETEVVWAKALPAGTSAQRAELIALTQALKMAEGKKLNVYTDSRYAFATAHIHGEIYRRRGWLTSEGKEIKNKDEILALLKALFLPKRLSIIHCPGHQKGNRAEARGNRMADQAAREVATRETPETSTLLAGKRTADGSEFEKRTADGSEFESPKKKAKVE

SEQ ID NO: 2509 - protein, 2096 aa, synthetic construct
MPAAKRVKLDGGDKKYSIGLDIGTNSVGWAVITDEYKVPSKKFKVLGNTDRHSIKKNLIGALLFDSGETAEATRLKRTARRRYTRRKNRICYLQEIFSNEMAKVDDSFFHRLEESFLVEEDKKHERHPIFGNIVDEVAYHEKYPTIYHLRKKLVDSTDKADLRLIYLALAHMIKFRGHFLIEGDLNPDNSDVDKLFIQLVQTYNQLFEENPINASGVDAKAILSARLSKSRRLENLIAQLPGEKKNGLFGNLIALSLGLTPNFKSNFDLAEDAKLQLSKDTYDDDLDNLLAQIGDQYADLFLAAKNLSDAILLSDILRVNTEITKAPLSASMIKRYDEHHQDLTLLKALVRQQLPEKYKEIFFDQSKNGYAGYIDGGASQEEFYKFIKPILEKMDGTEELLVKLNREDLLRKQRTFDNGSIPHQIHLGELHAILRRQEDFYPFLKDNREKIEKILTFRIPYYVGPLARGNSRFAWMTRKSEETITPWNFEEVVDKGASAQSFIERMTNFDKNLPNEKVLPKHSLLYEYFTVYNELTKVKYVTEGMRKPAFLSGEQKKAIVDLLFKTNRKVTVKQLKEDYFKKIECFDSVEISGVEDRFNASLGTYHDLLKIIKDKDFLDNEENEDILEDIVLTLTLFEDREMIEERLKTYAHLFDDKVMKQLKRRRYTGWGRLSRKLINGIRDKQSGKTILDFLKSDGFANRNFMQLIHDDSLTFKEDIQKAQVSGQGDSLHEHIANLAGSPAIKKGILQTVKVVDELVKVMGRHKPENIVIEMARENQTTQKGQKNSRERMKRIEEGIKELGSQILKEHPVENTQLQNEKLYLYYLQNGRDMYVDQELDINRLSDYDVDHIVPQSFLKDDSIDNKVLTRSDKARGKSDNVPSEEVVKKMKNYWRQLLNAKLITQRKFDNLTKAERGGLSELDKAGFIKRQLVETRQITKHVAQILDSRMNTKYDENDKLIREVKVITLKSKLVSDFRKDFQFYKVREINNYHHAHDAYLNAVVGTALIKKYPKLESEFVYGDYKVYDVRKMIAKSEQEIGKATAKYFFYSNIMNFFKTEITLANGEIRKRPLIETNGETGEIVWDKGRDFATVRKVLSMPQVNIVKKTEVQTGGFSKESILPKRNSDKLIARKKDWDPKKYGGFDSPTVAYSVLVVAKVEKGKSKKLKSVKELLGITIMERSSFEKNPIDFLEAKGYKEVKKDLIIKLPKYSLFELENGRKRMLASAGELQKGNELALPSKYVNFLYLASHYEKLKGSPEDNEQKQLFVEQHKHYLDEIIEQISEFSKRVILADANLDKVLSAYNKHRDKPIREQAENIIHLFTLTNLGAPAAFKYFDTTIDRKRYTSTKEVLDATLIHQSITGLYETRIDLSQLGGDGGEAAAKGSSPAPGGTLNIEDEYRLHETSKGPDVPLGSTWLSDFPQAWAETGGMGLAVRQAPLIIPLKATSTPVSIKQYPMSQEARLGIKPHIQRLLDQGILVPCQSPWNTPLLPVKKPGTNDYRPVQDLREVNKRVEDIHPTVPNPYNLLSGLPPSHQWYTVLDLKDAFFCLRLHPTSQSLFAFEWRDPEMGISGQLTWTRLPQGFKNSPTLFNEALHRDLADFRIQHPDLILLQYVDDLLLAATSELDCQQGTRALLQTLGDLGYRASAKKAQICQKQVKYLGYLLKEGQRWLTEARKETVMGQPTPKTPRQLREFLGKAGFCRLFIPGFAEMAAPLYPLTKPGTLFEWGPDQQKAYQEIKQALLTAPALGLPDLTKPFELFVDEKQGYAKGVLTQKLGPWRRPVAYLSKKLDPVAAGWPPCLRMVAAIAVLTKDAGKLTMGQPLVILAPHAVEALVKQPPDRWLSNARMTHYQALLLDTDRVQFGPIVALNPATLLPLPEEGLQHDCLDILAEAHGTRPDLTDQPLPDADHTWYTDGSSFLQEGQRKAGAAVTTETEVVWAKALPAGTSAQRAELIALTQALKMAEGKKLNVYTDSRYAFATAHIHGEIYRRRGWLTSEGKEIKNKDEILALLKALFLPKRLSIIHCPGHQKGNRAEARGNRMADQAAREVATRETPETSTLLAGKRTADGSEFEKRTADGSEFESPKKKAKVE

SEQ ID NO: 2510 - protein, 2096 aa, synthetic construct
MPAAKRVKLDGGDKKYSIGLDIGTNSVGWAVITDEYKVPSKKFKVLGNTDRHSIKKNLIGALLFDSGETAEATRLKRTARRRYTRRKNRICYLQEIFSNEMAKVDDSFFHRLEESFLVEEDKKHERHPIFGNIVDEVAYHEKYPTIYHLRKKLVDSTDKADLRLIYLALAHMIKFRGHFLIEGDLNPDNSDVDKLFIQLVQTYNQLFEENPINASGVDAKAILSARLSKSRRLENLIAQLPGEKKNGLFGNLIALSLGLTPNFKSNFDLAEDAKLQLSKDTYDDDLDNLLAQIGDQYADLFLAAKNLSDAILLSDILRVNTEITKAPLSASMIKRYDEHHQDLTLLKALVRQQLPEKYKEIFFDQSKNGYAGYIDGGASQEEFYKFIKPILEKMDGTEELLVKLNREDLLRKQRTFDNGSIPHQIHLGELHAILRRQEDFYPFLKDNREKIEKILTFRIPYYVGPLARGNSRFAWMTRKSEETITPWNFEEVVDKGASAQSFIERMTNFDKNLPNEKVLPKHSLLYEYFTVYNELTKVKYVTEGMRKPAFLSGEQKKAIVDLLFKTNRKVTVKQLKEDYFKKIECFDSVEISGVEDRFNASLGTYHDLLKIIKDKDFLDNEENEDILEDIVLTLTLFEDREMIEERLKTYAHLFDDKVMKQLKRRRYTGWGRLSRKLINGIRDKQSGKTILDFLKSDGFANRNFMQLIHDDSLTFKEDIQKAQVSGQGDSLHEHIANLAGSPAIKKGILQTVKVVDELVKVMGRHKPENIVIEMARENQTTQKGQKNSRERMKRIEEGIKELGSQILKEHPVENTQLQNEKLYLYYLQNGRDMYVDQELDINRLSDYDVDHIVPQSFLKDDSIDNKVLTRSDKARGKSDNVPSEEVVKKMKNYWRQLLNAKLITQRKFDNLTKAERGGLSELDKAGFIKRQLVETRQITKHVAQILDSRMNTKYDENDKLIREVKVITLKSKLVSDFRKDFQFYKVREINNYHHAHDAYLNAVVGTALIKKYPKLESEFVYGDYKVYDVRKMIAKSEQEIGKATAKYFFYSNIMNFFKTEITLANGEIRKRPLIETNGETGEIVWDKGRDFATVRKVLSMPQVNIVKKTEVQTGGFSKESILPKRNSDKLIARKKDWDPKKYGGFDSPTVAYSVLVVAKVEKGKSKKLKSVKELLGITIMERSSFEKNPIDFLEAKGYKEVKKDLIIKLPKYSLFELENGRKRMLASAGELQKGNELALPSKYVNFLYLASHYEKLKGSPEDNEQKQLFVEQHKHYLDEIIEQISEFSKRVILADANLDKVLSAYNKHRDKPIREQAENIIHLFTLTNLGAPAAFKYFDTTIDRKRYTSTKEVLDATLIHQSITGLYETRIDLSQLGGDGGPAPAPAPAPAPGGTLNIEDEYRLHETSKGPDVPLGSTWLSDFPQAWAETGGMGLAVRQAPLIIPLKATSTPVSIKQYPMSQEARLGIKPHIQRLLDQGILVPCQSPWNTPLLPVKKPGTNDYRPVQDLREVNKRVEDIHPTVPNPYNLLSGLPPSHQWYTVLDLKDAFFCLRLHPTSQSLFAFEWRDPEMGISGQLTWTRLPQGFKNSPTLFNEALHRDLADFRIQHPDLILLQYVDDLLLAATSELDCQQGTRALLQTLGDLGYRASAKKAQICQKQVKYLGYLLKEGQRWLTEARKETVMGQPTPKTPRQLREFLGKAGFCRLFIPGFAEMAAPLYPLTKPGTLFEWGPDQQKAYQEIKQALLTAPALGLPDLTKPFELFVDEKQGYAKGVLTQKLGPWRRPVAYLSKKLDPVAAGWPPCLRMVAAIAVLTKDAGKLTMGQPLVILAPHAVEALVKQPPDRWLSNARMTHYQALLLDTDRVQFGPIVALNPATLLPLPEEGLQHDCLDILAEAHGTRPDLTDQPLPDADHTWYTDGSSFLQEGQRKAGAAVTTETEVVWAKALPAGTSAQRAELIALTQALKMAEGKKLNVYTDSRYAFATAHIHGEIYRRRGWLTSEGKEIKNKDEILALLKALFLPKRLSIIHCPGHQKGNRAEARGNRMADQAAREVATRETPETSTLLAGKRTADGSEFEKRTADGSEFESPKKKAKVE

SEQ ID NO: 2511 - protein, 2095 aa, synthetic construct
MPAAKRVKLDGGDKKYSIGLDIGTNSVGWAVITDEYKVPSKKFKVLGNTDRHSIKKNLIGALLFDSGETAEATRLKRTARRRYTRRKNRICYLQEIFSNEMAKVDDSFFHRLEESFLVEEDKKHERHPIFGNIVDEVAYHEKYPTIYHLRKKLVDSTDKADLRLIYLALAHMIKFRGHFLIEGDLNPDNSDVDKLFIQLVQTYNQLFEENPINASGVDAKAILSARLSKSRRLENLIAQLPGEKKNGLFGNLIALSLGLTPNFKSNFDLAEDAKLQLSKDTYDDDLDNLLAQIGDQYADLFLAAKNLSDAILLSDILRVNTEITKAPLSASMIKRYDEHHQDLTLLKALVRQQLPEKYKEIFFDQSKNGYAGYIDGGASQEEFYKFIKPILEKMDGTEELLVKLNREDLLRKQRTFDNGSIPHQIHLGELHAILRRQEDFYPFLKDNREKIEKILTFRIPYYVGPLARGNSRFAWMTRKSEETITPWNFEEVVDKGASAQSFIERMTNFDKNLPNEKVLPKHSLLYEYFTVYNELTKVKYVTEGMRKPAFLSGEQKKAIVDLLFKTNRKVTVKQLKEDYFKKIECFDSVEISGVEDRFNASLGTYHDLLKIIKDKDFLDNEENEDILEDIVLTLTLFEDREMIEERLKTYAHLFDDKVMKQLKRRRYTGWGRLSRKLINGIRDKQSGKTILDFLKSDGFANRNFMQLIHDDSLTFKEDIQKAQVSGQGDSLHEHIANLAGSPAIKKGILQTVKVVDELVKVMGRHKPENIVIEMARENQTTQKGQKNSRERMKRIEEGIKELGSQILKEHPVENTQLQNEKLYLYYLQNGRDMYVDQELDINRLSDYDVDHIVPQSFLKDDSIDNKVLTRSDKARGKSDNVPSEEVVKKMKNYWRQLLNAKLITQRKFDNLTKAERGGLSELDKAGFIKRQLVETRQITKHVAQILDSRMNTKYDENDKLIREVKVITLKSKLVSDFRKDFQFYKVREINNYHHAHDAYLNAVVGTALIKKYPKLESEFVYGDYKVYDVRKMIAKSEQEIGKATAKYFFYSNIMNFFKTEITLANGEIRKRPLIETNGETGEIVWDKGRDFATVRKVLSMPQVNIVKKTEVQTGGFSKESILPKRNSDKLIARKKDWDPKKYGGFDSPTVAYSVLVVAKVEKGKSKKLKSVKELLGITIMERSSFEKNPIDFLEAKGYKEVKKDLIIKLPKYSLFELENGRKRMLASAGELQKGNELALPSKYVNFLYLASHYEKLKGSPEDNEQKQLFVEQHKHYLDEIIEQISEFSKRVILADANLDKVLSAYNKHRDKPIREQAENIIHLFTLTNLGAPAAFKYFDTTIDRKRYTSTKEVLDATLIHQSITGLYETRIDLSQLGGDGGGGGGSGGGGSGGTLNIEDEYRLHETSKGPDVPLGSTWLSDFPQAWAETGGMGLAVRQAPLIIPLKATSTPVSIKQYPMSQEARLGIKPHIQRLLDQGILVPCQSPWNTPLLPVKKPGTNDYRPVQDLREVNKRVEDIHPTVPNPYNLLSGLPPSHQWYTVLDLKDAFFCLRLHPTSQSLFAFEWRDPEMGISGQLTWTRLPQGFKNSPTLFNEALHRDLADFRIQHPDLILLQYVDDLLLAATSELDCQQGTRALLQTLGDLGYRASAKKAQICQKQVKYLGYLLKEGQRWLTEARKETVMGQPTPKTPRQLREFLGKAGFCRLFIPGFAEMAAPLYPLTKPGTLFEWGPDQQKAYQEIKQALLTAPALGLPDLTKPFELFVDEKQGYAKGVLTQKLGPWRRPVAYLSKKLDPVAAGWPPCLRMVAAIAVLTKDAGKLTMGQPLVILAPHAVEALVKQPPDRWLSNARMTHYQALLLDTDRVQFGPIVALNPATLLPLPEEGLQHDCLDILAEAHGTRPDLTDQPLPDADHTWYTDGSSFLQEGQRKAGAAVTTETEVVWAKALPAGTSAQRAELIALTQALKMAEGKKLNVYTDSRYAFATAHIHGEIYRRRGWLTSEGKEIKNKDEILALLKALFLPKRLSIIHCPGHQKGNRAEARGNRMADQAAREVATRETPETSTLLAGKRTADGSEFEKRTADGSEFESPKKKAKVE

SEQ ID NO: 2512 - protein, 2096 aa, synthetic construct
MPAAKRVKLDGGDKKYSIGLDIGTNSVGWAVITDEYKVPSKKFKVLGNTDRHSIKKNLIGALLFDSGETAEATRLKRTARRRYTRRKNRICYLQEIFSNEMAKVDDSFFHRLEESFLVEEDKKHERHPIFGNIVDEVAYHEKYPTIYHLRKKLVDSTDKADLRLIYLALAHMIKFRGHFLIEGDLNPDNSDVDKLFIQLVQTYNQLFEENPINASGVDAKAILSARLSKSRRLENLIAQLPGEKKNGLFGNLIALSLGLTPNFKSNFDLAEDAKLQLSKDTYDDDLDNLLAQIGDQYADLFLAAKNLSDAILLSDILRVNTEITKAPLSASMIKRYDEHHQDLTLLKALVRQQLPEKYKEIFFDQSKNGYAGYIDGGASQEEFYKFIKPILEKMDGTEELLVKLNREDLLRKQRTFDNGSIPHQIHLGELHAILRRQEDFYPFLKDNREKIEKILTFRIPYYVGPLARGNSRFAWMTRKSEETITPWNFEEVVDKGASAQSFIERMTNFDKNLPNEKVLPKHSLLYEYFTVYNELTKVKYVTEGMRKPAFLSGEQKKAIVDLLFKTNRKVTVKQLKEDYFKKIECFDSVEISGVEDRFNASLGTYHDLLKIIKDKDFLDNEENEDILEDIVLTLTLFEDREMIEERLKTYAHLFDDKVMKQLKRRRYTGWGRLSRKLINGIRDKQSGKTILDFLKSDGFANRNFMQLIHDDSLTFKEDIQKAQVSGQGDSLHEHIANLAGSPAIKKGILQTVKVVDELVKVMGRHKPENIVIEMARENQTTQKGQKNSRERMKRIEEGIKELGSQILKEHPVENTQLQNEKLYLYYLQNGRDMYVDQELDINRLSDYDVDHIVPQSFLKDDSIDNKVLTRSDKARGKSDNVPSEEVVKKMKNYWRQLLNAKLITQRKFDNLTKAERGGLSELDKAGFIKRQLVETRQITKHVAQILDSRMNTKYDENDKLIREVKVITLKSKLVSDFRKDFQFYKVREINNYHHAHDAYLNAVVGTALIKKYPKLESEFVYGDYKVYDVRKMIAKSEQEIGKATAKYFFYSNIMNFFKTEITLANGEIRKRPLIETNGETGEIVWDKGRDFATVRKVLSMPQVNIVKKTEVQTGGFSKESILPKRNSDKLIARKKDWDPKKYGGFDSPTVAYSVLVVAKVEKGKSKKLKSVKELLGITIMERSSFEKNPIDFLEAKGYKEVKKDLIIKLPKYSLFELENGRKRMLASAGELQKGNELALPSKYVNFLYLASHYEKLKGSPEDNEQKQLFVEQHKHYLDEIIEQISEFSKRVILADANLDKVLSAYNKHRDKPIREQAENIIHLFTLTNLGAPAAFKYFDTTIDRKRYTSTKEVLDATLIHQSITGLYETRIDLSQLGGDGGEAAAKPAPGGSGGTLNIEDEYRLHETSKGPDVPLGSTWLSDFPQAWAETGGMGLAVRQAPLIIPLKATSTPVSIKQYPMSQEARLGIKPHIQRLLDQGILVPCQSPWNTPLLPVKKPGTNDYRPVQDLREVNKRVEDIHPTVPNPYNLLSGLPPSHQWYTVLDLKDAFFCLRLHPTSQSLFAFEWRDPEMGISGQLTWTRLPQGFKNSPTLFNEALHRDLADFRIQHPDLILLQYVDDLLLAATSELDCQQGTRALLQTLGDLGYRASAKKAQICQKQVKYLGYLLKEGQRWLTEARKETVMGQPTPKTPRQLREFLGKAGFCRLFIPGFAEMAAPLYPLTKPGTLFEWGPDQQKAYQEIKQALLTAPALGLPDLTKPFELFVDEKQGYAKGVLTQKLGPWRRPVAYLSKKLDPVAAGWPPCLRMVAAIAVLTKDAGKLTMGQPLVILAPHAVEALVKQPPDRWLSNARMTHYQALLLDTDRVQFGPIVALNPATLLPLPEEGLQHDCLDILAEAHGTRPDLTDQPLPDADHTWYTDGSSFLQEGQRKAGAAVTTETEVVWAKALPAGTSAQRAELIALTQALKMAEGKKLNVYTDSRYAFATAHIHGEIYRRRGWLTSEGKEIKNKDEILALLKALFLPKRLSIIHCPGHQKGNRAEARGNRMADQAAREVATRETPETSTLLAGKRTADGSEFEKRTADGSEFESPKKKAKVE

SEQ ID NO: 2513 - protein, 2103 aa, synthetic construct
MPAAKRVKLDGGDKKYSIGLDIGTNSVGWAVITDEYKVPSKKFKVLGNTDRHSIKKNLIGALLFDSGETAEATRLKRTARRRYTRRKNRICYLQEIFSNEMAKVDDSFFHRLEESFLVEEDKKHERHPIFGNIVDEVAYHEKYPTIYHLRKKLVDSTDKADLRLIYLALAHMIKFRGHFLIEGDLNPDNSDVDKLFIQLVQTYNQLFEENPINASGVDAKAILSARLSKSRRLENLIAQLPGEKKNGLFGNLIALSLGLTPNFKSNFDLAEDAKLQLSKDTYDDDLDNLLAQIGDQYADLFLAAKNLSDAILLSDILRVNTEITKAPLSASMIKRYDEHHQDLTLLKALVRQQLPEKYKEIFFDQSKNGYAGYIDGGASQEEFYKFIKPILEKMDGTEELLVKLNREDLLRKQRTFDNGSIPHQIHLGELHAILRRQEDFYPFLKDNREKIEKILTFRIPYYVGPLARGNSRFAWMTRKSEETITPWNFEEVVDKGASAQSFIERMTNFDKNLPNEKVLPKHSLLYEYFTVYNELTKVKYVTEGMRKPAFLSGEQKKAIVDLLFKTNRKVTVKQLKEDYFKKIECFDSVEISGVEDRFNASLGTYHDLLKIIKDKDFLDNEENEDILEDIVLTLTLFEDREMIEERLKTYAHLFDDKVMKQLKRRRYTGWGRLSRKLINGIRDKQSGKTILDFLKSDGFANRNFMQLIHDDSLTFKEDIQKAQVSGQGDSLHEHIANLAGSPAIKKGILQTVKVVDELVKVMGRHKPENIVIEMARENQTTQKGQKNSRERMKRIEEGIKELGSQILKEHPVENTQLQNEKLYLYYLQNGRDMYVDQELDINRLSDYDVDHIVPQSFLKDDSIDNKVLTRSDKARGKSDNVPSEEVVKKMKNYWRQLLNAKLITQRKFDNLTKAERGGLSELDKAGFIKRQLVETRQITKHVAQILDSRMNTKYDENDKLIREVKVITLKSKLVSDFRKDFQFYKVREINNYHHAHDAYLNAVVGTALIKKYPKLESEFVYGDYKVYDVRKMIAKSEQEIGKATAKYFFYSNIMNFFKTEITLANGEIRKRPLIETNGETGEIVWDKGRDFATVRKVLSMPQVNIVKKTEVQTGGFSKESILPKRNSDKLIARKKDWDPKKYGGFDSPTVAYSVLVVAKVEKGKSKKLKSVKELLGITIMERSSFEKNPIDFLEAKGYKEVKKDLIIKLPKYSLFELENGRKRMLASAGELQKGNELALPSKYVNFLYLASHYEKLKGSPEDNEQKQLFVEQHKHYLDEIIEQISEFSKRVILADANLDKVLSAYNKHRDKPIREQAENIIHLFTLTNLGAPAAFKYFDTTIDRKRYTSTKEVLDATLIHQSITGLYETRIDLSQLGGDGGGGSGGSGGSGGSGGSGGSGGTLNIEDEYRLHETSKGPDVPLGSTWLSDFPQAWAETGGMGLAVRQAPLIIPLKATSTPVSIKQYPMSQEARLGIKPHIQRLLDQGILVPCQSPWNTPLLPVKKPGTNDYRPVQDLREVNKRVEDIHPTVPNPYNLLSGLPPSHQWYTVLDLKDAFFCLRLHPTSQSLFAFEWRDPEMGISGQLTWTRLPQGFKNSPTLFNEALHRDLADFRIQHPDLILLQYVDDLLLAATSELDCQQGTRALLQTLGDLGYRASAKKAQICQKQVKYLGYLLKEGQRWLTEARKETVMGQPTPKTPRQLREFLGKAGFCRLFIPGFAEMAAPLYPLTKPGTLFEWGPDQQKAYQEIKQALLTAPALGLPDLTKPFELFVDEKQGYAKGVLTQKLGPWRRPVAYLSKKLDPVAAGWPPCLRMVAAIAVLTKDAGKLTMGQPLVILAPHAVEALVKQPPDRWLSNARMTHYQALLLDTDRVQFGPIVALNPATLLPLPEEGLQHDCLDILAEAHGTRPDLTDQPLPDADHTWYTDGSSFLQEGQRKAGAAVTTETEVVWAKALPAGTSAQRAELIALTQALKMAEGKKLNVYTDSRYAFATAHIHGEIYRRRGWLTSEGKEIKNKDEILALLKALFLPKRLSIIHCPGHQKGNRAEARGNRMADQAAREVATRETPETSTLLAGKRTADGSEFEKRTADGSEFESPKKKAKVE

SEQ ID NO: 2514 - protein, 2096 aa, synthetic construct
MPAAKRVKLDGGDKKYSIGLDIGTNSVGWAVITDEYKVPSKKFKVLGNTDRHSIKKNLIGALLFDSGETAEATRLKRTARRRYTRRKNRICYLQEIFSNEMAKVDDSFFHRLEESFLVEEDKKHERHPIFGNIVDEVAYHEKYPTIYHLRKKLVDSTDKADLRLIYLALAHMIKFRGHFLIEGDLNPDNSDVDKLFIQLVQTYNQLFEENPINASGVDAKAILSARLSKSRRLENLIAQLPGEKKNGLFGNLIALSLGLTPNFKSNFDLAEDAKLQLSKDTYDDDLDNLLAQIGDQYADLFLAAKNLSDAILLSDILRVNTEITKAPLSASMIKRYDEHHQDLTLLKALVRQQLPEKYKEIFFDQSKNGYAGYIDGGASQEEFYKFIKPILEKMDGTEELLVKLNREDLLRKQRTFDNGSIPHQIHLGELHAILRRQEDFYPFLKDNREKIEKILTFRIPYYVGPLARGNSRFAWMTRKSEETITPWNFEEVVDKGASAQSFIERMTNFDKNLPNEKVLPKHSLLYEYFTVYNELTKVKYVTEGMRKPAFLSGEQKKAIVDLLFKTNRKVTVKQLKEDYFKKIECFDSVEISGVEDRFNASLGTYHDLLKIIKDKDFLDNEENEDILEDIVLTLTLFEDREMIEERLKTYAHLFDDKVMKQLKRRRYTGWGRLSRKLINGIRDKQSGKTILDFLKSDGFANRNFMQLIHDDSLTFKEDIQKAQVSGQGDSLHEHIANLAGSPAIKKGILQTVKVVDELVKVMGRHKPENIVIEMARENQTTQKGQKNSRERMKRIEEGIKELGSQILKEHPVENTQLQNEKLYLYYLQNGRDMYVDQELDINRLSDYDVDHIVPQSFLKDDSIDNKVLTRSDKARGKSDNVPSEEVVKKMKNYWRQLLNAKLITQRKFDNLTKAERGGLSELDKAGFIKRQLVETRQITKHVAQILDSRMNTKYDENDKLIREVKVITLKSKLVSDFRKDFQFYKVREINNYHHAHDAYLNAVVGTALIKKYPKLESEFVYGDYKVYDVRKMIAKSEQEIGKATAKYFFYSNIMNFFKTEITLANGEIRKRPLIETNGETGEIVWDKGRDFATVRKVLSMPQVNIVKKTEVQTGGFSKESILPKRNSDKLIARKKDWDPKKYGGFDSPTVAYSVLVVAKVEKGKSKKLKSVKELLGITIMERSSFEKNPIDFLEAKGYKEVKKDLIIKLPKYSLFELENGRKRMLASAGELQKGNELALPSKYVNFLYLASHYEKLKGSPEDNEQKQLFVEQHKHYLDEIIEQISEFSKRVILADANLDKVLSAYNKHRDKPIREQAENIIHLFTLTNLGAPAAFKYFDTTIDRKRYTSTKEVLDATLIHQSITGLYETRIDLSQLGGDGGPAPEAAAKGSSGGTLNIEDEYRLHETSKGPDVPLGSTWLSDFPQAWAETGGMGLAVRQAPLIIPLKATSTPVSIKQYPMSQEARLGIKPHIQRLLDQGILVPCQSPWNTPLLPVKKPGTNDYRPVQDLREVNKRVEDIHPTVPNPYNLLSGLPPSHQWYTVLDLKDAFFCLRLHPTSQSLFAFEWRDPEMGISGQLTWTRLPQGFKNSPTLFNEALHRDLADFRIQHPDLILLQYVDDLLLAATSELDCQQGTRALLQTLGDLGYRASAKKAQICQKQVKYLGYLLKEGQRWLTEARKETVMGQPTPKTPRQLREFLGKAGFCRLFIPGFAEMAAPLYPLTKPGTLFEWGPDQQKAYQEIKQALLTAPALGLPDLTKPFELFVDEKQGYAKGVLTQKLGPWRRPVAYLSKKLDPVAAGWPPCLRMVAAIAVLTKDAGKLTMGQPLVILAPHAVEALVKQPPDRWLSNARMTHYQALLLDTDRVQFGPIVALNPATLLPLPEEGLQHDCLDILAEAHGTRPDLTDQPLPDADHTWYTDGSSFLQEGQRKAGAAVTTETEVVWAKALPAGTSAQRAELIALTQALKMAEGKKLNVYTDSRYAFATAHIHGEIYRRRGWLTSEGKEIKNKDEILALLKALFLPKRLSIIHCPGHQKGNRAEARGNRMADQAAREVATRETPETSTLLAGKRTADGSEFEKRTADGSEFESPKKKAKVE

SEQ ID NO: 2515 - protein, 2096 aa, synthetic construct
MPAAKRVKLDGGDKKYSIGLDIGTNSVGWAVITDEYKVPSKKFKVLGNTDRHSIKKNLIGALLFDSGETAEATRLKRTARRRYTRRKNRICYLQEIFSNEMAKVDDSFFHRLEESFLVEEDKKHERHPIFGNIVDEVAYHEKYPTIYHLRKKLVDSTDKADLRLIYLALAHMIKFRGHFLIEGDLNPDNSDVDKLFIQLVQTYNQLFEENPINASGVDAKAILSARLSKSRRLENLIAQLPGEKKNGLFGNLIALSLGLTPNFKSNFDLAEDAKLQLSKDTYDDDLDNLLAQIGDQYADLFLAAKNLSDAILLSDILRVNTEITKAPLSASMIKRYDEHHQDLTLLKALVRQQLPEKYKEIFFDQSKNGYAGYIDGGASQEEFYKFIKPILEKMDGTEELLVKLNREDLLRKQRTFDNGSIPHQIHLGELHAILRRQEDFYPFLKDNREKIEKILTFRIPYYVGPLARGNSRFAWMTRKSEETITPWNFEEVVDKGASAQSFIERMTNFDKNLPNEKVLPKHSLLYEYFTVYNELTKVKYVTEGMRKPAFLSGEQKKAIVDLLFKTNRKVTVKQLKEDYFKKIECFDSVEISGVEDRFNASLGTYHDLLKIIKDKDFLDNEENEDILEDIVLTLTLFEDREMIEERLKTYAHLFDDKVMKQLKRRRYTGWGRLSRKLINGIRDKQSGKTILDFLKSDGFANRNFMQLIHDDSLTFKEDIQKAQVSGQGDSLHEHIANLAGSPAIKKGILQTVKVVDELVKVMGRHKPENIVIEMARENQTTQKGQKNSRERMKRIEEGIKELGSQILKEHPVENTQLQNEKLYLYYLQNGRDMYVDQELDINRLSDYDVDHIVPQSFLKDDSIDNKVLTRSDKARGKSDNVPSEEVVKKMKNYWRQLLNAKLITQRKFDNLTKAERGGLSELDKAGFIKRQLVETRQITKHVAQILDSRMNTKYDENDKLIREVKVITLKSKLVSDFRKDFQFYKVREINNYHHAHDAYLNAVVGTALIKKYPKLESEFVYGDYKVYDVRKMIAKSEQEIGKATAKYFFYSNIMNFFKTEITLANGEIRKRPLIETNGETGEIVWDKGRDFATVRKVLSMPQVNIVKKTEVQTGGFSKESILPKRNSDKLIARKKDWDPKKYGGFDSPTVAYSVLVVAKVEKGKSKKLKSVKELLGITIMERSSFEKNPIDFLEAKGYKEVKKDLIIKLPKYSLFELENGRKRMLASAGELQKGNELALPSKYVNFLYLASHYEKLKGSPEDNEQKQLFVEQHKHYLDEIIEQISEFSKRVILADANLDKVLSAYNKHRDKPIREQAENIIHLFTLTNLGAPAAFKYFDTTIDRKRYTSTKEVLDATLIHQSITGLYETRIDLSQLGGDGGGSSGGGEAAAKGGTLNIEDEYRLHETSKGPDVPLGSTWLSDFPQAWAETGGMGLAVRQAPLIIPLKATSTPVSIKQYPMSQEARLGIKPHIQRLLDQGILVPCQSPWNTPLLPVKKPGTNDYRPVQDLREVNKRVEDIHPTVPNPYNLLSGLPPSHQWYTVLDLKDAFFCLRLHPTSQSLFAFEWRDPEMGISGQLTWTRLPQGFKNSPTLFNEALHRDLADFRIQHPDLILLQYVDDLLLAATSELDCQQGTRALLQTLGDLGYRASAKKAQICQKQVKYLGYLLKEGQRWLTEARKETVMGQPTPKTPRQLREFLGKAGFCRLFIPGFAEMAAPLYPLTKPGTLFEWGPDQQKAYQEIKQALLTAPALGLPDLTKPFELFVDEKQGYAKGVLTQKLGPWRRPVAYLSKKLDPVAAGWPPCLRMVAAIAVLTKDAGKLTMGQPLVILAPHAVEALVKQPPDRWLSNARMTHYQALLLDTDRVQFGPIVALNPATLLPLPEEGLQHDCLDILAEAHGTRPDLTDQPLPDADHTWYTDGSSFLQEGQRKAGAAVTTETEVVWAKALPAGTSAQRAELIALTQALKMAEGKKLNVYTDSRYAFATAHIHGEIYRRRGWLTSEGKEIKNKDEILALLKALFLPKRLSIIHCPGHQKGNRAEARGNRMADQAAREVATRETPETSTLLAGKRTADGSEFEKRTADGSEFESPKKKAKVE

SEQ ID NO: 2516 - protein, 2100 aa, synthetic construct
MPAAKRVKLDGGDKKYSIGLDIGTNSVGWAVITDEYKVPSKKFKVLGNTDRHSIKKNLIGALLFDSGETAEATRLKRTARRRYTRRKNRICYLQEIFSNEMAKVDDSFFHRLEESFLVEEDKKHERHPIFGNIVDEVAYHEKYPTIYHLRKKLVDSTDKADLRLIYLALAHMIKFRGHFLIEGDLNPDNSDVDKLFIQLVQTYNQLFEENPINASGVDAKAILSARLSKSRRLENLIAQLPGEKKNGLFGNLIALSLGLTPNFKSNFDLAEDAKLQLSKDTYDDDLDNLLAQIGDQYADLFLAAKNLSDAILLSDILRVNTEITKAPLSASMIKRYDEHHQDLTLLKALVRQQLPEKYKEIFFDQSKNGYAGYIDGGASQEEFYKFIKPILEKMDGTEELLVKLNREDLLRKQRTFDNGSIPHQIHLGELHAILRRQEDFYPFLKDNREKIEKILTFRIPYYVGPLARGNSRFAWMTRKSEETITPWNFEEVVDKGASAQSFIERMTNFDKNLPNEKVLPKHSLLYEYFTVYNELTKVKYVTEGMRKPAFLSGEQKKAIVDLLFKTNRKVTVKQLKEDYFKKIECFDSVEISGVEDRFNASLGTYHDLLKIIKDKDFLDNEENEDILEDIVLTLTLFEDREMIEERLKTYAHLFDDKVMKQLKRRRYTGWGRLSRKLINGIRDKQSGKTILDFLKSDGFANRNFMQLIHDDSLTFKEDIQKAQVSGQGDSLHEHIANLAGSPAIKKGILQTVKVVDELVKVMGRHKPENIVIEMARENQTTQKGQKNSRERMKRIEEGIKELGSQILKEHPVENTQLQNEKLYLYYLQNGRDMYVDQELDINRLSDYDVDHIVPQSFLKDDSIDNKVLTRSDKARGKSDNVPSEEVVKKMKNYWRQLLNAKLITQRKFDNLTKAERGGLSELDKAGFIKRQLVETRQITKHVAQILDSRMNTKYDENDKLIREVKVITLKSKLVSDFRKDFQFYKVREINNYHHAHDAYLNAVVGTALIKKYPKLESEFVYGDYKVYDVRKMIAKSEQEIGKATAKYFFYSNIMNFFKTEITLANGEIRKRPLIETNGETGEIVWDKGRDFATVRKVLSMPQVNIVKKTEVQTGGFSKESILPKRNSDKLIARKKDWDPKKYGGFDSPTVAYSVLVVAKVEKGKSKKLKSVKELLGITIMERSSFEKNPIDFLEAKGYKEVKKDLIIKLPKYSLFELENGRKRMLASAGELQKGNELALPSKYVNFLYLASHYEKLKGSPEDNEQKQLFVEQHKHYLDEIIEQISEFSKRVILADANLDKVLSAYNKHRDKPIREQAENIIHLFTLTNLGAPAAFKYFDTTIDRKRYTSTKEVLDATLIHQSITGLYETRIDLSQLGGDGGGGGGSGGGGSGGGGSGGTLNIEDEYRLHETSKGPDVPLGSTWLSDFPQAWAETGGMGLAVRQAPLIIPLKATSTPVSIKQYPMSQEARLGIKPHIQRLLDQGILVPCQSPWNTPLLPVKKPGTNDYRPVQDLREVNKRVEDIHPTVPNPYNLLSGLPPSHQWYTVLDLKDAFFCLRLHPTSQSLFAFEWRDPEMGISGQLTWTRLPQGFKNSPTLFNEALHRDLADFRIQHPDLILLQYVDDLLLAATSELDCQQGTRALLQTLGDLGYRASAKKAQICQKQVKYLGYLLKEGQRWLTEARKETVMGQPTPKTPRQLREFLGKAGFCRLFIPGFAEMAAPLYPLTKPGTLFEWGPDQQKAYQEIKQALLTAPALGLPDLTKPFELFVDEKQGYAKGVLTQKLGPWRRPVAYLSKKLDPVAAGWPPCLRMVAAIAVLTKDAGKLTMGQPLVILAPHAVEALVKQPPDRWLSNARMTHYQALLLDTDRVQFGPIVALNPATLLPLPEEGLQHDCLDILAEAHGTRPDLTDQPLPDADHTWYTDGSSFLQEGQRKAGAAVTTETEVVWAKALPAGTSAQRAELIALTQALKMAEGKKLNVYTDSRYAFATAHIHGEIYRRRGWLTSEGKEIKNKDEILALLKALFLPKRLSIIHCPGHQKGNRAEARGNRMADQAAREVATRETPETSTLLAGKRTADGSEFEKRTADGSEFESPKKKAKVE

SEQ ID NO: 2517 - protein, 2093 aa, synthetic construct
MPAAKRVKLDGGDKKYSIGLDIGTNSVGWAVITDEYKVPSKKFKVLGNTDRHSIKKNLIGALLFDSGETAEATRLKRTARRRYTRRKNRICYLQEIFSNEMAKVDDSFFHRLEESFLVEEDKKHERHPIFGNIVDEVAYHEKYPTIYHLRKKLVDSTDKADLRLIYLALAHMIKFRGHFLIEGDLNPDNSDVDKLFIQLVQTYNQLFEENPINASGVDAKAILSARLSKSRRLENLIAQLPGEKKNGLFGNLIALSLGLTPNFKSNFDLAEDAKLQLSKDTYDDDLDNLLAQIGDQYADLFLAAKNLSDAILLSDILRVNTEITKAPLSASMIKRYDEHHQDLTLLKALVRQQLPEKYKEIFFDQSKNGYAGYIDGGASQEEFYKFIKPILEKMDGTEELLVKLNREDLLRKQRTFDNGSIPHQIHLGELHAILRRQEDFYPFLKDNREKIEKILTFRIPYYVGPLARGNSRFAWMTRKSEETITPWNFEEVVDKGASAQSFIERMTNFDKNLPNEKVLPKHSLLYEYFTVYNELTKVKYVTEGMRKPAFLSGEQKKAIVDLLFKTNRKVTVKQLKEDYFKKIECFDSVEISGVEDRFNASLGTYHDLLKIIKDKDFLDNEENEDILEDIVLTLTLFEDREMIEERLKTYAHLFDDKVMKQLKRRRYTGWGRLSRKLINGIRDKQSGKTILDFLKSDGFANRNFMQLIHDDSLTFKEDIQKAQVSGQGDSLHEHIANLAGSPAIKKGILQTVKVVDELVKVMGRHKPENIVIEMARENQTTQKGQKNSRERMKRIEEGIKELGSQILKEHPVENTQLQNEKLYLYYLQNGRDMYVDQELDINRLSDYDVDHIVPQSFLKDDSIDNKVLTRSDKARGKSDNVPSEEVVKKMKNYWRQLLNAKLITQRKFDNLTKAERGGLSELDKAGFIKRQLVETRQITKHVAQILDSRMNTKYDENDKLIREVKVITLKSKLVSDFRKDFQFYKVREINNYHHAHDAYLNAVVGTALIKKYPKLESEFVYGDYKVYDVRKMIAKSEQEIGKATAKYFFYSNIMNFFKTEITLANGEIRKRPLIETNGETGEIVWDKGRDFATVRKVLSMPQVNIVKKTEVQTGGFSKESILPKRNSDKLIARKKDWDPKKYGGFDSPTVAYSVLVVAKVEKGKSKKLKSVKELLGITIMERSSFEKNPIDFLEAKGYKEVKKDLIIKLPKYSLFELENGRKRMLASAGELQKGNELALPSKYVNFLYLASHYEKLKGSPEDNEQKQLFVEQHKHYLDEIIEQISEFSKRVILADANLDKVLSAYNKHRDKPIREQAENIIHLFTLTNLGAPAAFKYFDTTIDRKRYTSTKEVLDATLIHQSITGLYETRIDLSQLGGDGGEAAAKGGGGGTLNIEDEYRLHETSKGPDVPLGSTWLSDFPQAWAETGGMGLAVRQAPLIIPLKATSTPVSIKQYPMSQEARLGIKPHIQRLLDQGILVPCQSPWNTPLLPVKKPGTNDYRPVQDLREVNKRVEDIHPTVPNPYNLLSGLPPSHQWYTVLDLKDAFFCLRLHPTSQSLFAFEWRDPEMGISGQLTWTRLPQGFKNSPTLFNEALHRDLADFRIQHPDLILLQYVDDLLLAATSELDCQQGTRALLQTLGDLGYRASAKKAQICQKQVKYLGYLLKEGQRWLTEARKETVMGQPTPKTPRQLREFLGKAGFCRLFIPGFAEMAAPLYPLTKPGTLFEWGPDQQKAYQEIKQALLTAPALGLPDLTKPFELFVDEKQGYAKGVLTQKLGPWRRPVAYLSKKLDPVAAGWPPCLRMVAAIAVLTKDAGKLTMGQPLVILAPHAVEALVKQPPDRWLSNARMTHYQALLLDTDRVQFGPIVALNPATLLPLPEEGLQHDCLDILAEAHGTRPDLTDQPLPDADHTWYTDGSSFLQEGQRKAGAAVTTETEVVWAKALPAGTSAQRAELIALTQALKMAEGKKLNVYTDSRYAFATAHIHGEIYRRRGWLTSEGKEIKNKDEILALLKALFLPKRLSIIHCPGHQKGNRAEARGNRMADQAAREVATRETPETSTLLAGKRTADGSEFEKRTADGSEFESPKKKAKVE

SEQ ID NO: 2518 - protein, 2101 aa, synthetic construct
MPAAKRVKLDGGDKKYSIGLDIGTNSVGWAVITDEYKVPSKKFKVLGNTDRHSIKKNLIGALLFDSGETAEATRLKRTARRRYTRRKNRICYLQEIFSNEMAKVDDSFFHRLEESFLVEEDKKHERHPIFGNIVDEVAYHEKYPTIYHLRKKLVDSTDKADLRLIYLALAHMIKFRGHFLIEGDLNPDNSDVDKLFIQLVQTYNQLFEENPINASGVDAKAILSARLSKSRRLENLIAQLPGEKKNGLFGNLIALSLGLTPNFKSNFDLAEDAKLQLSKDTYDDDLDNLLAQIGDQYADLFLAAKNLSDAILLSDILRVNTEITKAPLSASMIKRYDEHHQDLTLLKALVRQQLPEKYKEIFFDQSKNGYAGYIDGGASQEEFYKFIKPILEKMDGTEELLVKLNREDLLRKQRTFDNGSIPHQIHLGELHAILRRQEDFYPFLKDNREKIEKILTFRIPYYVGPLARGNSRFAWMTRKSEETITPWNFEEVVDKGASAQSFIERMTNFDKNLPNEKVLPKHSLLYEYFTVYNELTKVKYVTEGMRKPAFLSGEQKKAIVDLLFKTNRKVTVKQLKEDYFKKIECFDSVEISGVEDRFNASLGTYHDLLKIIKDKDFLDNEENEDILEDIVLTLTLFEDREMIEERLKTYAHLFDDKVMKQLKRRRYTGWGRLSRKLINGIRDKQSGKTILDFLKSDGFANRNFMQLIHDDSLTFKEDIQKAQVSGQGDSLHEHIANLAGSPAIKKGILQTVKVVDELVKVMGRHKPENIVIEMARENQTTQKGQKNSRERMKRIEEGIKELGSQILKEHPVENTQLQNEKLYLYYLQNGRDMYVDQELDINRLSDYDVDHIVPQSFLKDDSIDNKVLTRSDKARGKSDNVPSEEVVKKMKNYWRQLLNAKLITQRKFDNLTKAERGGLSELDKAGFIKRQLVETRQITKHVAQILDSRMNTKYDENDKLIREVKVITLKSKLVSDFRKDFQFYKVREINNYHHAHDAYLNAVVGTALIKKYPKLESEFVYGDYKVYDVRKMIAKSEQEIGKATAKYFFYSNIMNFFKTEITLANGEIRKRPLIETNGETGEIVWDKGRDFATVRKVLSMPQVNIVKKTEVQTGGFSKESILPKRNSDKLIARKKDWDPKKYGGFDSPTVAYSVLVVAKVEKGKSKKLKSVKELLGITIMERSSFEKNPIDFLEAKGYKEVKKDLIIKLPKYSLFELENGRKRMLASAGELQKGNELALPSKYVNFLYLASHYEKLKGSPEDNEQKQLFVEQHKHYLDEIIEQISEFSKRVILADANLDKVLSAYNKHRDKPIREQAENIIHLFTLTNLGAPAAFKYFDTTIDRKRYTSTKEVLDATLIHQSITGLYETRIDLSQLGGDGGSGSETPGTSESATPESGGTLNIEDEYRLHETSKGPDVPLGSTWLSDFPQAWAETGGMGLAVRQAPLIIPLKATSTPVSIKQYPMSQEARLGIKPHIQRLLDQGILVPCQSPWNTPLLPVKKPGTNDYRPVQDLREVNKRVEDIHPTVPNPYNLLSGLPPSHQWYTVLDLKDAFFCLRLHPTSQSLFAFEWRDPEMGISGQLTWTRLPQGFKNSPTLFNEALHRDLADFRIQHPDLILLQYVDDLLLAATSELDCQQGTRALLQTLGDLGYRASAKKAQICQKQVKYLGYLLKEGQRWLTEARKETVMGQPTPKTPRQLREFLGKAGFCRLFIPGFAEMAAPLYPLTKPGTLFEWGPDQQKAYQEIKQALLTAPALGLPDLTKPFELFVDEKQGYAKGVLTQKLGPWRRPVAYLSKKLDPVAAGWPPCLRMVAAIAVLTKDAGKLTMGQPLVILAPHAVEALVKQPPDRWLSNARMTHYQALLLDTDRVQFGPIVALNPATLLPLPEEGLQHDCLDILAEAHGTRPDLTDQPLPDADHTWYTDGSSFLQEGQRKAGAAVTTETEVVWAKALPAGTSAQRAELIALTQALKMAEGKKLNVYTDSRYAFATAHIHGEIYRRRGWLTSEGKEIKNKDEILALLKALFLPKRLSIIHCPGHQKGNRAEARGNRMADQAAREVATRETPETSTLLAGKRTADGSEFEKRTADGSEFESPKKKAKVE

SEQ ID NO: 2519 - protein, 2096 aa, synthetic construct
MPAAKRVKLDGGDKKYSIGLDIGTNSVGWAVITDEYKVPSKKFKVLGNTDRHSIKKNLIGALLFDSGETAEATRLKRTARRRYTRRKNRICYLQEIFSNEMAKVDDSFFHRLEESFLVEEDKKHERHPIFGNIVDEVAYHEKYPTIYHLRKKLVDSTDKADLRLIYLALAHMIKFRGHFLIEGDLNPDNSDVDKLFIQLVQTYNQLFEENPINASGVDAKAILSARLSKSRRLENLIAQLPGEKKNGLFGNLIALSLGLTPNFKSNFDLAEDAKLQLSKDTYDDDLDNLLAQIGDQYADLFLAAKNLSDAILLSDILRVNTEITKAPLSASMIKRYDEHHQDLTLLKALVRQQLPEKYKEIFFDQSKNGYAGYIDGGASQEEFYKFIKPILEKMDGTEELLVKLNREDLLRKQRTFDNGSIPHQIHLGELHAILRRQEDFYPFLKDNREKIEKILTFRIPYYVGPLARGNSRFAWMTRKSEETITPWNFEEVVDKGASAQSFIERMTNFDKNLPNEKVLPKHSLLYEYFTVYNELTKVKYVTEGMRKPAFLSGEQKKAIVDLLFKTNRKVTVKQLKEDYFKKIECFDSVEISGVEDRFNASLGTYHDLLKIIKDKDFLDNEENEDILEDIVLTLTLFEDREMIEERLKTYAHLFDDKVMKQLKRRRYTGWGRLSRKLINGIRDKQSGKTILDFLKSDGFANRNFMQLIHDDSLTFKEDIQKAQVSGQGDSLHEHIANLAGSPAIKKGILQTVKVVDELVKVMGRHKPENIVIEMARENQTTQKGQKNSRERMKRIEEGIKELGSQILKEHPVENTQLQNEKLYLYYLQNGRDMYVDQELDINRLSDYDVDHIVPQSFLKDDSIDNKVLTRSDKARGKSDNVPSEEVVKKMKNYWRQLLNAKLITQRKFDNLTKAERGGLSELDKAGFIKRQLVETRQITKHVAQILDSRMNTKYDENDKLIREVKVITLKSKLVSDFRKDFQFYKVREINNYHHAHDAYLNAVVGTALIKKYPKLESEFVYGDYKVYDVRKMIAKSEQEIGKATAKYFFYSNIMNFFKTEITLANGEIRKRPLIETNGETGEIVWDKGRDFATVRKVLSMPQVNIVKKTEVQTGGFSKESILPKRNSDKLIARKKDWDPKKYGGFDSPTVAYSVLVVAKVEKGKSKKLKSVKELLGITIMERSSFEKNPIDFLEAKGYKEVKKDLIIKLPKYSLFELENGRKRMLASAGELQKGNELALPSKYVNFLYLASHYEKLKGSPEDNEQKQLFVEQHKHYLDEIIEQISEFSKRVILADANLDKVLSAYNKHRDKPIREQAENIIHLFTLTNLGAPAAFKYFDTTIDRKRYTSTKEVLDATLIHQSITGLYETRIDLSQLGGDGGEAAAKPAPGSSGGTLNIEDEYRLHETSKGPDVPLGSTWLSDFPQAWAETGGMGLAVRQAPLIIPLKATSTPVSIKQYPMSQEARLGIKPHIQRLLDQGILVPCQSPWNTPLLPVKKPGTNDYRPVQDLREVNKRVEDIHPTVPNPYNLLSGLPPSHQWYTVLDLKDAFFCLRLHPTSQSLFAFEWRDPEMGISGQLTWTRLPQGFKNSPTLFNEALHRDLADFRIQHPDLILLQYVDDLLLAATSELDCQQGTRALLQTLGDLGYRASAKKAQICQKQVKYLGYLLKEGQRWLTEARKETVMGQPTPKTPRQLREFLGKAGFCRLFIPGFAEMAAPLYPLTKPGTLFEWGPDQQKAYQEIKQALLTAPALGLPDLTKPFELFVDEKQGYAKGVLTQKLGPWRRPVAYLSKKLDPVAAGWPPCLRMVAAIAVLTKDAGKLTMGQPLVILAPHAVEALVKQPPDRWLSNARMTHYQALLLDTDRVQFGPIVALNPATLLPLPEEGLQHDCLDILAEAHGTRPDLTDQPLPDADHTWYTDGSSFLQEGQRKAGAAVTTETEVVWAKALPAGTSAQRAELIALTQALKMAEGKKLNVYTDSRYAFATAHIHGEIYRRRGWLTSEGKEIKNKDEILALLKALFLPKRLSIIHCPGHQKGNRAEARGNRMADQAAREVATRETPETSTLLAGKRTADGSEFEKRTADGSEFESPKKKAKVE

SEQ ID NO: 2520 - protein, 2091 aa, synthetic construct
MPAAKRVKLDGGDKKYSIGLDIGTNSVGWAVITDEYKVPSKKFKVLGNTDRHSIKKNLIGALLFDSGETAEATRLKRTARRRYTRRKNRICYLQEIFSNEMAKVDDSFFHRLEESFLVEEDKKHERHPIFGNIVDEVAYHEKYPTIYHLRKKLVDSTDKADLRLIYLALAHMIKFRGHFLIEGDLNPDNSDVDKLFIQLVQTYNQLFEENPINASGVDAKAILSARLSKSRRLENLIAQLPGEKKNGLFGNLIALSLGLTPNFKSNFDLAEDAKLQLSKDTYDDDLDNLLAQIGDQYADLFLAAKNLSDAILLSDILRVNTEITKAPLSASMIKRYDEHHQDLTLLKALVRQQLPEKYKEIFFDQSKNGYAGYIDGGASQEEFYKFIKPILEKMDGTEELLVKLNREDLLRKQRTFDNGSIPHQIHLGELHAILRRQEDFYPFLKDNREKIEKILTFRIPYYVGPLARGNSRFAWMTRKSEETITPWNFEEVVDKGASAQSFIERMTNFDKNLPNEKVLPKHSLLYEYFTVYNELTKVKYVTEGMRKPAFLSGEQKKAIVDLLFKTNRKVTVKQLKEDYFKKIECFDSVEISGVEDRFNASLGTYHDLLKIIKDKDFLDNEENEDILEDIVLTLTLFEDREMIEERLKTYAHLFDDKVMKQLKRRRYTGWGRLSRKLINGIRDKQSGKTILDFLKSDGFANRNFMQLIHDDSLTFKEDIQKAQVSGQGDSLHEHIANLAGSPAIKKGILQTVKVVDELVKVMGRHKPENIVIEMARENQTTQKGQKNSRERMKRIEEGIKELGSQILKEHPVENTQLQNEKLYLYYLQNGRDMYVDQELDINRLSDYDVDHIVPQSFLKDDSIDNKVLTRSDKARGKSDNVPSEEVVKKMKNYWRQLLNAKLITQRKFDNLTKAERGGLSELDKAGFIKRQLVETRQITKHVAQILDSRMNTKYDENDKLIREVKVITLKSKLVSDFRKDFQFYKVREINNYHHAHDAYLNAVVGTALIKKYPKLESEFVYGDYKVYDVRKMIAKSEQEIGKATAKYFFYSNIMNFFKTEITLANGEIRKRPLIETNGETGEIVWDKGRDFATVRKVLSMPQVNIVKKTEVQTGGFSKESILPKRNSDKLIARKKDWDPKKYGGFDSPTVAYSVLVVAKVEKGKSKKLKSVKELLGITIMERSSFEKNPIDFLEAKGYKEVKKDLIIKLPKYSLFELENGRKRMLASAGELQKGNELALPSKYVNFLYLASHYEKLKGSPEDNEQKQLFVEQHKHYLDEIIEQISEFSKRVILADANLDKVLSAYNKHRDKPIREQAENIIHLFTLTNLGAPAAFKYFDTTIDRKRYTSTKEVLDATLIHQSITGLYETRIDLSQLGGDGGGSSGSSGGTLNIEDEYRLHETSKGPDVPLGSTWLSDFPQAWAETGGMGLAVRQAPLIIPLKATSTPVSIKQYPMSQEARLGIKPHIQRLLDQGILVPCQSPWNTPLLPVKKPGTNDYRPVQDLREVNKRVEDIHPTVPNPYNLLSGLPPSHQWYTVLDLKDAFFCLRLHPTSQSLFAFEWRDPEMGISGQLTWTRLPQGFKNSPTLFNEALHRDLADFRIQHPDLILLQYVDDLLLAATSELDCQQGTRALLQTLGDLGYRASAKKAQICQKQVKYLGYLLKEGQRWLTEARKETVMGQPTPKTPRQLREFLGKAGFCRLFIPGFAEMAAPLYPLTKPGTLFEWGPDQQKAYQEIKQALLTAPALGLPDLTKPFELFVDEKQGYAKGVLTQKLGPWRRPVAYLSKKLDPVAAGWPPCLRMVAAIAVLTKDAGKLTMGQPLVILAPHAVEALVKQPPDRWLSNARMTHYQALLLDTDRVQFGPIVALNPATLLPLPEEGLQHDCLDILAEAHGTRPDLTDQPLPDADHTWYTDGSSFLQEGQRKAGAAVTTETEVVWAKALPAGTSAQRAELIALTQALKMAEGKKLNVYTDSRYAFATAHIHGEIYRRRGWLTSEGKEIKNKDEILALLKALFLPKRLSIIHCPGHQKGNRAEARGNRMADQAAREVATRETPETSTLLAGKRTADGSEFEKRTADGSEFESPKKKAKVE

SEQ ID NO: 2521 - protein, 2096 aa, synthetic construct
MPAAKRVKLDGGDKKYSIGLDIGTNSVGWAVITDEYKVPSKKFKVLGNTDRHSIKKNLIGALLFDSGETAEATRLKRTARRRYTRRKNRICYLQEIFSNEMAKVDDSFFHRLEESFLVEEDKKHERHPIFGNIVDEVAYHEKYPTIYHLRKKLVDSTDKADLRLIYLALAHMIKFRGHFLIEGDLNPDNSDVDKLFIQLVQTYNQLFEENPINASGVDAKAILSARLSKSRRLENLIAQLPGEKKNGLFGNLIALSLGLTPNFKSNFDLAEDAKLQLSKDTYDDDLDNLLAQIGDQYADLFLAAKNLSDAILLSDILRVNTEITKAPLSASMIKRYDEHHQDLTLLKALVRQQLPEKYKEIFFDQSKNGYAGYIDGGASQEEFYKFIKPILEKMDGTEELLVKLNREDLLRKQRTFDNGSIPHQIHLGELHAILRRQEDFYPFLKDNREKIEKILTFRIPYYVGPLARGNSRFAWMTRKSEETITPWNFEEVVDKGASAQSFIERMTNFDKNLPNEKVLPKHSLLYEYFTVYNELTKVKYVTEGMRKPAFLSGEQKKAIVDLLFKTNRKVTVKQLKEDYFKKIECFDSVEISGVEDRFNASLGTYHDLLKIIKDKDFLDNEENEDILEDIVLTLTLFEDREMIEERLKTYAHLFDDKVMKQLKRRRYTGWGRLSRKLINGIRDKQSGKTILDFLKSDGFANRNFMQLIHDDSLTFKEDIQKAQVSGQGDSLHEHIANLAGSPAIKKGILQTVKVVDELVKVMGRHKPENIVIEMARENQTTQKGQKNSRERMKRIEEGIKELGSQILKEHPVENTQLQNEKLYLYYLQNGRDMYVDQELDINRLSDYDVDHIVPQSFLKDDSIDNKVLTRSDKARGKSDNVPSEEVVKKMKNYWRQLLNAKLITQRKFDNLTKAERGGLSELDKAGFIKRQLVETRQITKHVAQILDSRMNTKYDENDKLIREVKVITLKSKLVSDFRKDFQFYKVREINNYHHAHDAYLNAVVGTALIKKYPKLESEFVYGDYKVYDVRKMIAKSEQEIGKATAKYFFYSNIMNFFKTEITLANGEIRKRPLIETNGETGEIVWDKGRDFATVRKVLSMPQVNIVKKTEVQTGGFSKESILPKRNSDKLIARKKDWDPKKYGGFDSPTVAYSVLVVAKVEKGKSKKLKSVKELLGITIMERSSFEKNPIDFLEAKGYKEVKKDLIIKLPKYSLFELENGRKRMLASAGELQKGNELALPSKYVNFLYLASHYEKLKGSPEDNEQKQLFVEQHKHYLDEIIEQISEFSKRVILADANLDKVLSAYNKHRDKPIREQAENIIHLFTLTNLGAPAAFKYFDTTIDRKRYTSTKEVLDATLIHQSITGLYETRIDLSQLGGDGGGGGEAAAKGGSGGTLNIEDEYRLHETSKGPDVPLGSTWLSDFPQAWAETGGMGLAVRQAPLIIPLKATSTPVSIKQYPMSQEARLGIKPHIQRLLDQGILVPCQSPWNTPLLPVKKPGTNDYRPVQDLREVNKRVEDIHPTVPNPYNLLSGLPPSHQWYTVLDLKDAFFCLRLHPTSQSLFAFEWRDPEMGISGQLTWTRLPQGFKNSPTLFNEALHRDLADFRIQHPDLILLQYVDDLLLAATSELDCQQGTRALLQTLGDLGYRASAKKAQICQKQVKYLGYLLKEGQRWLTEARKETVMGQPTPKTPRQLREFLGKAGFCRLFIPGFAEMAAPLYPLTKPGTLFEWGPDQQKAYQEIKQALLTAPALGLPDLTKPFELFVDEKQGYAKGVLTQKLGPWRRPVAYLSKKLDPVAAGWPPCLRMVAAIAVLTKDAGKLTMGQPLVILAPHAVEALVKQPPDRWLSNARMTHYQALLLDTDRVQFGPIVALNPATLLPLPEEGLQHDCLDILAEAHGTRPDLTDQPLPDADHTWYTDGSSFLQEGQRKAGAAVTTETEVVWAKALPAGTSAQRAELIALTQALKMAEGKKLNVYTDSRYAFATAHIHGEIYRRRGWLTSEGKEIKNKDEILALLKALFLPKRLSIIHCPGHQKGNRAEARGNRMADQAAREVATRETPETSTLLAGKRTADGSEFEKRTADGSEFESPKKKAKVE

SEQ ID NO: 2522 - protein, 2105 aa, synthetic construct
MPAAKRVKLDGGDKKYSIGLDIGTNSVGWAVITDEYKVPSKKFKVLGNTDRHSIKKNLIGALLFDSGETAEATRLKRTARRRYTRRKNRICYLQEIFSNEMAKVDDSFFHRLEESFLVEEDKKHERHPIFGNIVDEVAYHEKYPTIYHLRKKLVDSTDKADLRLIYLALAHMIKFRGHFLIEGDLNPDNSDVDKLFIQLVQTYNQLFEENPINASGVDAKAILSARLSKSRRLENLIAQLPGEKKNGLFGNLIALSLGLTPNFKSNFDLAEDAKLQLSKDTYDDDLDNLLAQIGDQYADLFLAAKNLSDAILLSDILRVNTEITKAPLSASMIKRYDEHHQDLTLLKALVRQQLPEKYKEIFFDQSKNGYAGYIDGGASQEEFYKFIKPILEKMDGTEELLVKLNREDLLRKQRTFDNGSIPHQIHLGELHAILRRQEDFYPFLKDNREKIEKILTFRIPYYVGPLARGNSRFAWMTRKSEETITPWNFEEVVDKGASAQSFIERMTNFDKNLPNEKVLPKHSLLYEYFTVYNELTKVKYVTEGMRKPAFLSGEQKKAIVDLLFKTNRKVTVKQLKEDYFKKIECFDSVEISGVEDRFNASLGTYHDLLKIIKDKDFLDNEENEDILEDIVLTLTLFEDREMIEERLKTYAHLFDDKVMKQLKRRRYTGWGRLSRKLINGIRDKQSGKTILDFLKSDGFANRNFMQLIHDDSLTFKEDIQKAQVSGQGDSLHEHIANLAGSPAIKKGILQTVKVVDELVKVMGRHKPENIVIEMARENQTTQKGQKNSRERMKRIEEGIKELGSQILKEHPVENTQLQNEKLYLYYLQNGRDMYVDQELDINRLSDYDVDHIVPQSFLKDDSIDNKVLTRSDKARGKSDNVPSEEVVKKMKNYWRQLLNAKLITQRKFDNLTKAERGGLSELDKAGFIKRQLVETRQITKHVAQILDSRMNTKYDENDKLIREVKVITLKSKLVSDFRKDFQFYKVREINNYHHAHDAYLNAVVGTALIKKYPKLESEFVYGDYKVYDVRKMIAKSEQEIGKATAKYFFYSNIMNFFKTEITLANGEIRKRPLIETNGETGEIVWDKGRDFATVRKVLSMPQVNIVKKTEVQTGGFSKESILPKRNSDKLIARKKDWDPKKYGGFDSPTVAYSVLVVAKVEKGKSKKLKSVKELLGITIMERSSFEKNPIDFLEAKGYKEVKKDLIIKLPKYSLFELENGRKRMLASAGELQKGNELALPSKYVNFLYLASHYEKLKGSPEDNEQKQLFVEQHKHYLDEIIEQISEFSKRVILADANLDKVLSAYNKHRDKPIREQAENIIHLFTLTNLGAPAAFKYFDTTIDRKRYTSTKEVLDATLIHQSITGLYETRIDLSQLGGDGGEAAAKEAAAKEAAAKEAAAKGGTLNIEDEYRLHETSKGPDVPLGSTWLSDFPQAWAETGGMGLAVRQAPLIIPLKATSTPVSIKQYPMSQEARLGIKPHIQRLLDQGILVPCQSPWNTPLLPVKKPGTNDYRPVQDLREVNKRVEDIHPTVPNPYNLLSGLPPSHQWYTVLDLKDAFFCLRLHPTSQSLFAFEWRDPEMGISGQLTWTRLPQGFKNSPTLFNEALHRDLADFRIQHPDLILLQYVDDLLLAATSELDCQQGTRALLQTLGDLGYRASAKKAQICQKQVKYLGYLLKEGQRWLTEARKETVMGQPTPKTPRQLREFLGKAGFCRLFIPGFAEMAAPLYPLTKPGTLFEWGPDQQKAYQEIKQALLTAPALGLPDLTKPFELFVDEKQGYAKGVLTQKLGPWRRPVAYLSKKLDPVAAGWPPCLRMVAAIAVLTKDAGKLTMGQPLVILAPHAVEALVKQPPDRWLSNARMTHYQALLLDTDRVQFGPIVALNPATLLPLPEEGLQHDCLDILAEAHGTRPDLTDQPLPDADHTWYTDGSSFLQEGQRKAGAAVTTETEVVWAKALPAGTSAQRAELIALTQALKMAEGKKLNVYTDSRYAFATAHIHGEIYRRRGWLTSEGKEIKNKDEILALLKALFLPKRLSIIHCPGHQKGNRAEARGNRMADQAAREVATRETPETSTLLAGKRTADGSEFEKRTADGSEFESPKKKAKVE

SEQ ID NO: 2523 - protein, 2094 aa, synthetic construct
MPAAKRVKLDGGDKKYSIGLDIGTNSVGWAVITDEYKVPSKKFKVLGNTDRHSIKKNLIGALLFDSGETAEATRLKRTARRRYTRRKNRICYLQEIFSNEMAKVDDSFFHRLEESFLVEEDKKHERHPIFGNIVDEVAYHEKYPTIYHLRKKLVDSTDKADLRLIYLALAHMIKFRGHFLIEGDLNPDNSDVDKLFIQLVQTYNQLFEENPINASGVDAKAILSARLSKSRRLENLIAQLPGEKKNGLFGNLIALSLGLTPNFKSNFDLAEDAKLQLSKDTYDDDLDNLLAQIGDQYADLFLAAKNLSDAILLSDILRVNTEITKAPLSASMIKRYDEHHQDLTLLKALVRQQLPEKYKEIFFDQSKNGYAGYIDGGASQEEFYKFIKPILEKMDGTEELLVKLNREDLLRKQRTFDNGSIPHQIHLGELHAILRRQEDFYPFLKDNREKIEKILTFRIPYYVGPLARGNSRFAWMTRKSEETITPWNFEEVVDKGASAQSFIERMTNFDKNLPNEKVLPKHSLLYEYFTVYNELTKVKYVTEGMRKPAFLSGEQKKAIVDLLFKTNRKVTVKQLKEDYFKKIECFDSVEISGVEDRFNASLGTYHDLLKIIKDKDFLDNEENEDILEDIVLTLTLFEDREMIEERLKTYAHLFDDKVMKQLKRRRYTGWGRLSRKLINGIRDKQSGKTILDFLKSDGFANRNFMQLIHDDSLTFKEDIQKAQVSGQGDSLHEHIANLAGSPAIKKGILQTVKVVDELVKVMGRHKPENIVIEMARENQTTQKGQKNSRERMKRIEEGIKELGSQILKEHPVENTQLQNEKLYLYYLQNGRDMYVDQELDINRLSDYDVDHIVPQSFLKDDSIDNKVLTRSDKARGKSDNVPSEEVVKKMKNYWRQLLNAKLITQRKFDNLTKAERGGLSELDKAGFIKRQLVETRQITKHVAQILDSRMNTKYDENDKLIREVKVITLKSKLVSDFRKDFQFYKVREINNYHHAHDAYLNAVVGTALIKKYPKLESEFVYGDYKVYDVRKMIAKSEQEIGKATAKYFFYSNIMNFFKTEITLANGEIRKRPLIETNGETGEIVWDKGRDFATVRKVLSMPQVNIVKKTEVQTGGFSKESILPKRNSDKLIARKKDWDPKKYGGFDSPTVAYSVLVVAKVEKGKSKKLKSVKELLGITIMERSSFEKNPIDFLEAKGYKEVKKDLIIKLPKYSLFELENGRKRMLASAGELQKGNELALPSKYVNFLYLASHYEKLKGSPEDNEQKQLFVEQHKHYLDEIIEQISEFSKRVILADANLDKVLSAYNKHRDKPIREQAENIIHLFTLTNLGAPAAFKYFDTTIDRKRYTSTKEVLDATLIHQSITGLYETRIDLSQLGGDGGGGSGGSGGSGGTLNIEDEYRLHETSKGPDVPLGSTWLSDFPQAWAETGGMGLAVRQAPLIIPLKATSTPVSIKQYPMSQEARLGIKPHIQRLLDQGILVPCQSPWNTPLLPVKKPGTNDYRPVQDLREVNKRVEDIHPTVPNPYNLLSGLPPSHQWYTVLDLKDAFFCLRLHPTSQSLFAFEWRDPEMGISGQLTWTRLPQGFKNSPTLFNEALHRDLADFRIQHPDLILLQYVDDLLLAATSELDCQQGTRALLQTLGDLGYRASAKKAQICQKQVKYLGYLLKEGQRWLTEARKETVMGQPTPKTPRQLREFLGKAGFCRLFIPGFAEMAAPLYPLTKPGTLFEWGPDQQKAYQEIKQALLTAPALGLPDLTKPFELFVDEKQGYAKGVLTQKLGPWRRPVAYLSKKLDPVAAGWPPCLRMVAAIAVLTKDAGKLTMGQPLVILAPHAVEALVKQPPDRWLSNARMTHYQALLLDTDRVQFGPIVALNPATLLPLPEEGLQHDCLDILAEAHGTRPDLTDQPLPDADHTWYTDGSSFLQEGQRKAGAAVTTETEVVWAKALPAGTSAQRAELIALTQALKMAEGKKLNVYTDSRYAFATAHIHGEIYRRRGWLTSEGKEIKNKDEILALLKALFLPKRLSIIHCPGHQKGNRAEARGNRMADQAAREVATRETPETSTLLAGKRTADGSEFEKRTADGSEFESPKKKAKVE

SEQ ID NO: 2524 - protein, 2088 aa, synthetic construct
MPAAKRVKLDGGDKKYSIGLDIGTNSVGWAVITDEYKVPSKKFKVLGNTDRHSIKKNLIGALLFDSGETAEATRLKRTARRRYTRRKNRICYLQEIFSNEMAKVDDSFFHRLEESFLVEEDKKHERHPIFGNIVDEVAYHEKYPTIYHLRKKLVDSTDKADLRLIYLALAHMIKFRGHFLIEGDLNPDNSDVDKLFIQLVQTYNQLFEENPINASGVDAKAILSARLSKSRRLENLIAQLPGEKKNGLFGNLIALSLGLTPNFKSNFDLAEDAKLQLSKDTYDDDLDNLLAQIGDQYADLFLAAKNLSDAILLSDILRVNTEITKAPLSASMIKRYDEHHQDLTLLKALVRQQLPEKYKEIFFDQSKNGYAGYIDGGASQEEFYKFIKPILEKMDGTEELLVKLNREDLLRKQRTFDNGSIPHQIHLGELHAILRRQEDFYPFLKDNREKIEKILTFRIPYYVGPLARGNSRFAWMTRKSEETITPWNFEEVVDKGASAQSFIERMTNFDKNLPNEKVLPKHSLLYEYFTVYNELTKVKYVTEGMRKPAFLSGEQKKAIVDLLFKTNRKVTVKQLKEDYFKKIECFDSVEISGVEDRFNASLGTYHDLLKIIKDKDFLDNEENEDILEDIVLTLTLFEDREMIEERLKTYAHLFDDKVMKQLKRRRYTGWGRLSRKLINGIRDKQSGKTILDFLKSDGFANRNFMQLIHDDSLTFKEDIQKAQVSGQGDSLHEHIANLAGSPAIKKGILQTVKVVDELVKVMGRHKPENIVIEMARENQTTQKGQKNSRERMKRIEEGIKELGSQILKEHPVENTQLQNEKLYLYYLQNGRDMYVDQELDINRLSDYDVDHIVPQSFLKDDSIDNKVLTRSDKARGKSDNVPSEEVVKKMKNYWRQLLNAKLITQRKFDNLTKAERGGLSELDKAGFIKRQLVETRQITKHVAQILDSRMNTKYDENDKLIREVKVITLKSKLVSDFRKDFQFYKVREINNYHHAHDAYLNAVVGTALIKKYPKLESEFVYGDYKVYDVRKMIAKSEQEIGKATAKYFFYSNIMNFFKTEITLANGEIRKRPLIETNGETGEIVWDKGRDFATVRKVLSMPQVNIVKKTEVQTGGFSKESILPKRNSDKLIARKKDWDPKKYGGFDSPTVAYSVLVVAKVEKGKSKKLKSVKELLGITIMERSSFEKNPIDFLEAKGYKEVKKDLIIKLPKYSLFELENGRKRMLASAGELQKGNELALPSKYVNFLYLASHYEKLKGSPEDNEQKQLFVEQHKHYLDEIIEQISEFSKRVILADANLDKVLSAYNKHRDKPIREQAENIIHLFTLTNLGAPAAFKYFDTTIDRKRYTSTKEVLDATLIHQSITGLYETRIDLSQLGGDGGPAPGGTLNIEDEYRLHETSKGPDVPLGSTWLSDFPQAWAETGGMGLAVRQAPLIIPLKATSTPVSIKQYPMSQEARLGIKPHIQRLLDQGILVPCQSPWNTPLLPVKKPGTNDYRPVQDLREVNKRVEDIHPTVPNPYNLLSGLPPSHQWYTVLDLKDAFFCLRLHPTSQSLFAFEWRDPEMGISGQLTWTRLPQGFKNSPTLFNEALHRDLADFRIQHPDLILLQYVDDLLLAATSELDCQQGTRALLQTLGDLGYRASAKKAQICQKQVKYLGYLLKEGQRWLTEARKETVMGQPTPKTPRQLREFLGKAGFCRLFIPGFAEMAAPLYPLTKPGTLFEWGPDQQKAYQEIKQALLTAPALGLPDLTKPFELFVDEKQGYAKGVLTQKLGPWRRPVAYLSKKLDPVAAGWPPCLRMVAAIAVLTKDAGKLTMGQPLVILAPHAVEALVKQPPDRWLSNARMTHYQALLLDTDRVQFGPIVALNPATLLPLPEEGLQHDCLDILAEAHGTRPDLTDQPLPDADHTWYTDGSSFLQEGQRKAGAAVTTETEVVWAKALPAGTSAQRAELIALTQALKMAEGKKLNVYTDSRYAFATAHIHGEIYRRRGWLTSEGKEIKNKDEILALLKALFLPKRLSIIHCPGHQKGNRAEARGNRMADQAAREVATRETPETSTLLAGKRTADGSEFEKRTADGSEFESPKKKAKVE

SEQ ID NO: 2525 - protein, 2094 aa, synthetic construct
MPAAKRVKLDGGDKKYSIGLDIGTNSVGWAVITDEYKVPSKKFKVLGNTDRHSIKKNLIGALLFDSGETAEATRLKRTARRRYTRRKNRICYLQEIFSNEMAKVDDSFFHRLEESFLVEEDKKHERHPIFGNIVDEVAYHEKYPTIYHLRKKLVDSTDKADLRLIYLALAHMIKFRGHFLIEGDLNPDNSDVDKLFIQLVQTYNQLFEENPINASGVDAKAILSARLSKSRRLENLIAQLPGEKKNGLFGNLIALSLGLTPNFKSNFDLAEDAKLQLSKDTYDDDLDNLLAQIGDQYADLFLAAKNLSDAILLSDILRVNTEITKAPLSASMIKRYDEHHQDLTLLKALVRQQLPEKYKEIFFDQSKNGYAGYIDGGASQEEFYKFIKPILEKMDGTEELLVKLNREDLLRKQRTFDNGSIPHQIHLGELHAILRRQEDFYPFLKDNREKIEKILTFRIPYYVGPLARGNSRFAWMTRKSEETITPWNFEEVVDKGASAQSFIERMTNFDKNLPNEKVLPKHSLLYEYFTVYNELTKVKYVTEGMRKPAFLSGEQKKAIVDLLFKTNRKVTVKQLKEDYFKKIECFDSVEISGVEDRFNASLGTYHDLLKIIKDKDFLDNEENEDILEDIVLTLTLFEDREMIEERLKTYAHLFDDKVMKQLKRRRYTGWGRLSRKLINGIRDKQSGKTILDFLKSDGFANRNFMQLIHDDSLTFKEDIQKAQVSGQGDSLHEHIANLAGSPAIKKGILQTVKVVDELVKVMGRHKPENIVIEMARENQTTQKGQKNSRERMKRIEEGIKELGSQILKEHPVENTQLQNEKLYLYYLQNGRDMYVDQELDINRLSDYDVDHIVPQSFLKDDSIDNKVLTRSDKARGKSDNVPSEEVVKKMKNYWRQLLNAKLITQRKFDNLTKAERGGLSELDKAGFIKRQLVETRQITKHVAQILDSRMNTKYDENDKLIREVKVITLKSKLVSDFRKDFQFYKVREINNYHHAHDAYLNAVVGTALIKKYPKLESEFVYGDYKVYDVRKMIAKSEQEIGKATAKYFFYSNIMNFFKTEITLANGEIRKRPLIETNGETGEIVWDKGRDFATVRKVLSMPQVNIVKKTEVQTGGFSKESILPKRNSDKLIARKKDWDPKKYGGFDSPTVAYSVLVVAKVEKGKSKKLKSVKELLGITIMERSSFEKNPIDFLEAKGYKEVKKDLIIKLPKYSLFELENGRKRMLASAGELQKGNELALPSKYVNFLYLASHYEKLKGSPEDNEQKQLFVEQHKHYLDEIIEQISEFSKRVILADANLDKVLSAYNKHRDKPIREQAENIIHLFTLTNLGAPAAFKYFDTTIDRKRYTSTKEVLDATLIHQSITGLYETRIDLSQLGGDGGPAPAPAPAPGGTLNIEDEYRLHETSKGPDVPLGSTWLSDFPQAWAETGGMGLAVRQAPLIIPLKATSTPVSIKQYPMSQEARLGIKPHIQRLLDQGILVPCQSPWNTPLLPVKKPGTNDYRPVQDLREVNKRVEDIHPTVPNPYNLLSGLPPSHQWYTVLDLKDAFFCLRLHPTSQSLFAFEWRDPEMGISGQLTWTRLPQGFKNSPTLFNEALHRDLADFRIQHPDLILLQYVDDLLLAATSELDCQQGTRALLQTLGDLGYRASAKKAQICQKQVKYLGYLLKEGQRWLTEARKETVMGQPTPKTPRQLREFLGKAGFCRLFIPGFAEMAAPLYPLTKPGTLFEWGPDQQKAYQEIKQALLTAPALGLPDLTKPFELFVDEKQGYAKGVLTQKLGPWRRPVAYLSKKLDPVAAGWPPCLRMVAAIAVLTKDAGKLTMGQPLVILAPHAVEALVKQPPDRWLSNARMTHYQALLLDTDRVQFGPIVALNPATLLPLPEEGLQHDCLDILAEAHGTRPDLTDQPLPDADHTWYTDGSSFLQEGQRKAGAAVTTETEVVWAKALPAGTSAQRAELIALTQALKMAEGKKLNVYTDSRYAFATAHIHGEIYRRRGWLTSEGKEIKNKDEILALLKALFLPKRLSIIHCPGHQKGNRAEARGNRMADQAAREVATRETPETSTLLAGKRTADGSEFEKRTADGSEFESPKKKAKVE

SEQ ID NO: 2526 - protein, 2096 aa, synthetic construct
MPAAKRVKLDGGDKKYSIGLDIGTNSVGWAVITDEYKVPSKKFKVLGNTDRHSIKKNLIGALLFDSGETAEATRLKRTARRRYTRRKNRICYLQEIFSNEMAKVDDSFFHRLEESFLVEEDKKHERHPIFGNIVDEVAYHEKYPTIYHLRKKLVDSTDKADLRLIYLALAHMIKFRGHFLIEGDLNPDNSDVDKLFIQLVQTYNQLFEENPINASGVDAKAILSARLSKSRRLENLIAQLPGEKKNGLFGNLIALSLGLTPNFKSNFDLAEDAKLQLSKDTYDDDLDNLLAQIGDQYADLFLAAKNLSDAILLSDILRVNTEITKAPLSASMIKRYDEHHQDLTLLKALVRQQLPEKYKEIFFDQSKNGYAGYIDGGASQEEFYKFIKPILEKMDGTEELLVKLNREDLLRKQRTFDNGSIPHQIHLGELHAILRRQEDFYPFLKDNREKIEKILTFRIPYYVGPLARGNSRFAWMTRKSEETITPWNFEEVVDKGASAQSFIERMTNFDKNLPNEKVLPKHSLLYEYFTVYNELTKVKYVTEGMRKPAFLSGEQKKAIVDLLFKTNRKVTVKQLKEDYFKKIECFDSVEISGVEDRFNASLGTYHDLLKIIKDKDFLDNEENEDILEDIVLTLTLFEDREMIEERLKTYAHLFDDKVMKQLKRRRYTGWGRLSRKLINGIRDKQSGKTILDFLKSDGFANRNFMQLIHDDSLTFKEDIQKAQVSGQGDSLHEHIANLAGSPAIKKGILQTVKVVDELVKVMGRHKPENIVIEMARENQTTQKGQKNSRERMKRIEEGIKELGSQILKEHPVENTQLQNEKLYLYYLQNGRDMYVDQELDINRLSDYDVDHIVPQSFLKDDSIDNKVLTRSDKARGKSDNVPSEEVVKKMKNYWRQLLNAKLITQRKFDNLTKAERGGLSELDKAGFIKRQLVETRQITKHVAQILDSRMNTKYDENDKLIREVKVITLKSKLVSDFRKDFQFYKVREINNYHHAHDAYLNAVVGTALIKKYPKLESEFVYGDYKVYDVRKMIAKSEQEIGKATAKYFFYSNIMNFFKTEITLANGEIRKRPLIETNGETGEIVWDKGRDFATVRKVLSMPQVNIVKKTEVQTGGFSKESILPKRNSDKLIARKKDWDPKKYGGFDSPTVAYSVLVVAKVEKGKSKKLKSVKELLGITIMERSSFEKNPIDFLEAKGYKEVKKDLIIKLPKYSLFELENGRKRMLASAGELQKGNELALPSKYVNFLYLASHYEKLKGSPEDNEQKQLFVEQHKHYLDEIIEQISEFSKRVILADANLDKVLSAYNKHRDKPIREQAENIIHLFTLTNLGAPAAFKYFDTTIDRKRYTSTKEVLDATLIHQSITGLYETRIDLSQLGGDGGGGGEAAAKPAPGGTLNIEDEYRLHETSKGPDVPLGSTWLSDFPQAWAETGGMGLAVRQAPLIIPLKATSTPVSIKQYPMSQEARLGIKPHIQRLLDQGILVPCQSPWNTPLLPVKKPGTNDYRPVQDLREVNKRVEDIHPTVPNPYNLLSGLPPSHQWYTVLDLKDAFFCLRLHPTSQSLFAFEWRDPEMGISGQLTWTRLPQGFKNSPTLFNEALHRDLADFRIQHPDLILLQYVDDLLLAATSELDCQQGTRALLQTLGDLGYRASAKKAQICQKQVKYLGYLLKEGQRWLTEARKETVMGQPTPKTPRQLREFLGKAGFCRLFIPGFAEMAAPLYPLTKPGTLFEWGPDQQKAYQEIKQALLTAPALGLPDLTKPFELFVDEKQGYAKGVLTQKLGPWRRPVAYLSKKLDPVAAGWPPCLRMVAAIAVLTKDAGKLTMGQPLVILAPHAVEALVKQPPDRWLSNARMTHYQALLLDTDRVQFGPIVALNPATLLPLPEEGLQHDCLDILAEAHGTRPDLTDQPLPDADHTWYTDGSSFLQEGQRKAGAAVTTETEVVWAKALPAGTSAQRAELIALTQALKMAEGKKLNVYTDSRYAFATAHIHGEIYRRRGWLTSEGKEIKNKDEILALLKALFLPKRLSIIHCPGHQKGNRAEARGNRMADQAAREVATRETPETSTLLAGKRTADGSEFEKRTADGSEFESPKKKAKVE

SEQ ID NO: 2527 - protein, 2096 aa, synthetic construct
MPAAKRVKLDGGDKKYSIGLDIGTNSVGWAVITDEYKVPSKKFKVLGNTDRHSIKKNLIGALLFDSGETAEATRLKRTARRRYTRRKNRICYLQEIFSNEMAKVDDSFFHRLEESFLVEEDKKHERHPIFGNIVDEVAYHEKYPTIYHLRKKLVDSTDKADLRLIYLALAHMIKFRGHFLIEGDLNPDNSDVDKLFIQLVQTYNQLFEENPINASGVDAKAILSARLSKSRRLENLIAQLPGEKKNGLFGNLIALSLGLTPNFKSNFDLAEDAKLQLSKDTYDDDLDNLLAQIGDQYADLFLAAKNLSDAILLSDILRVNTEITKAPLSASMIKRYDEHHQDLTLLKALVRQQLPEKYKEIFFDQSKNGYAGYIDGGASQEEFYKFIKPILEKMDGTEELLVKLNREDLLRKQRTFDNGSIPHQIHLGELHAILRRQEDFYPFLKDNREKIEKILTFRIPYYVGPLARGNSRFAWMTRKSEETITPWNFEEVVDKGASAQSFIERMTNFDKNLPNEKVLPKHSLLYEYFTVYNELTKVKYVTEGMRKPAFLSGEQKKAIVDLLFKTNRKVTVKQLKEDYFKKIECFDSVEISGVEDRFNASLGTYHDLLKIIKDKDFLDNEENEDILEDIVLTLTLFEDREMIEERLKTYAHLFDDKVMKQLKRRRYTGWGRLSRKLINGIRDKQSGKTILDFLKSDGFANRNFMQLIHDDSLTFKEDIQKAQVSGQGDSLHEHIANLAGSPAIKKGILQTVKVVDELVKVMGRHKPENIVIEMARENQTTQKGQKNSRERMKRIEEGIKELGSQILKEHPVENTQLQNEKLYLYYLQNGRDMYVDQELDINRLSDYDVDHIVPQSFLKDDSIDNKVLTRSDKARGKSDNVPSEEVVKKMKNYWRQLLNAKLITQRKFDNLTKAERGGLSELDKAGFIKRQLVETRQITKHVAQILDSRMNTKYDENDKLIREVKVITLKSKLVSDFRKDFQFYKVREINNYHHAHDAYLNAVVGTALIKKYPKLESEFVYGDYKVYDVRKMIAKSEQEIGKATAKYFFYSNIMNFFKTEITLANGEIRKRPLIETNGETGEIVWDKGRDFATVRKVLSMPQVNIVKKTEVQTGGFSKESILPKRNSDKLIARKKDWDPKKYGGFDSPTVAYSVLVVAKVEKGKSKKLKSVKELLGITIMERSSFEKNPIDFLEAKGYKEVKKDLIIKLPKYSLFELENGRKRMLASAGELQKGNELALPSKYVNFLYLASHYEKLKGSPEDNEQKQLFVEQHKHYLDEIIEQISEFSKRVILADANLDKVLSAYNKHRDKPIREQAENIIHLFTLTNLGAPAAFKYFDTTIDRKRYTSTKEVLDATLIHQSITGLYETRIDLSQLGGDGGGGSPAPEAAAKGGTLNIEDEYRLHETSKGPDVPLGSTWLSDFPQAWAETGGMGLAVRQAPLIIPLKATSTPVSIKQYPMSQEARLGIKPHIQRLLDQGILVPCQSPWNTPLLPVKKPGTNDYRPVQDLREVNKRVEDIHPTVPNPYNLLSGLPPSHQWYTVLDLKDAFFCLRLHPTSQSLFAFEWRDPEMGISGQLTWTRLPQGFKNSPTLFNEALHRDLADFRIQHPDLILLQYVDDLLLAATSELDCQQGTRALLQTLGDLGYRASAKKAQICQKQVKYLGYLLKEGQRWLTEARKETVMGQPTPKTPRQLREFLGKAGFCRLFIPGFAEMAAPLYPLTKPGTLFEWGPDQQKAYQEIKQALLTAPALGLPDLTKPFELFVDEKQGYAKGVLTQKLGPWRRPVAYLSKKLDPVAAGWPPCLRMVAAIAVLTKDAGKLTMGQPLVILAPHAVEALVKQPPDRWLSNARMTHYQALLLDTDRVQFGPIVALNPATLLPLPEEGLQHDCLDILAEAHGTRPDLTDQPLPDADHTWYTDGSSFLQEGQRKAGAAVTTETEVVWAKALPAGTSAQRAELIALTQALKMAEGKKLNVYTDSRYAFATAHIHGEIYRRRGWLTSEGKEIKNKDEILALLKALFLPKRLSIIHCPGHQKGNRAEARGNRMADQAAREVATRETPETSTLLAGKRTADGSEFEKRTADGSEFESPKKKAKVE

SEQ ID NO: 2528 - protein, 2100 aa, synthetic construct
MPAAKRVKLDGGDKKYSIGLDIGTNSVGWAVITDEYKVPSKKFKVLGNTDRHSIKKNLIGALLFDSGETAEATRLKRTARRRYTRRKNRICYLQEIFSNEMAKVDDSFFHRLEESFLVEEDKKHERHPIFGNIVDEVAYHEKYPTIYHLRKKLVDSTDKADLRLIYLALAHMIKFRGHFLIEGDLNPDNSDVDKLFIQLVQTYNQLFEENPINASGVDAKAILSARLSKSRRLENLIAQLPGEKKNGLFGNLIALSLGLTPNFKSNFDLAEDAKLQLSKDTYDDDLDNLLAQIGDQYADLFLAAKNLSDAILLSDILRVNTEITKAPLSASMIKRYDEHHQDLTLLKALVRQQLPEKYKEIFFDQSKNGYAGYIDGGASQEEFYKFIKPILEKMDGTEELLVKLNREDLLRKQRTFDNGSIPHQIHLGELHAILRRQEDFYPFLKDNREKIEKILTFRIPYYVGPLARGNSRFAWMTRKSEETITPWNFEEVVDKGASAQSFIERMTNFDKNLPNEKVLPKHSLLYEYFTVYNELTKVKYVTEGMRKPAFLSGEQKKAIVDLLFKTNRKVTVKQLKEDYFKKIECFDSVEISGVEDRFNASLGTYHDLLKIIKDKDFLDNEENEDILEDIVLTLTLFEDREMIEERLKTYAHLFDDKVMKQLKRRRYTGWGRLSRKLINGIRDKQSGKTILDFLKSDGFANRNFMQLIHDDSLTFKEDIQKAQVSGQGDSLHEHIANLAGSPAIKKGILQTVKVVDELVKVMGRHKPENIVIEMARENQTTQKGQKNSRERMKRIEEGIKELGSQILKEHPVENTQLQNEKLYLYYLQNGRDMYVDQELDINRLSDYDVDHIVPQSFLKDDSIDNKVLTRSDKARGKSDNVPSEEVVKKMKNYWRQLLNAKLITQRKFDNLTKAERGGLSELDKAGFIKRQLVETRQITKHVAQILDSRMNTKYDENDKLIREVKVITLKSKLVSDFRKDFQFYKVREINNYHHAHDAYLNAVVGTALIKKYPKLESEFVYGDYKVYDVRKMIAKSEQEIGKATAKYFFYSNIMNFFKTEITLANGEIRKRPLIETNGETGEIVWDKGRDFATVRKVLSMPQVNIVKKTEVQTGGFSKESILPKRNSDKLIARKKDWDPKKYGGFDSPTVAYSVLVVAKVEKGKSKKLKSVKELLGITIMERSSFEKNPIDFLEAKGYKEVKKDLIIKLPKYSLFELENGRKRMLASAGELQKGNELALPSKYVNFLYLASHYEKLKGSPEDNEQKQLFVEQHKHYLDEIIEQISEFSKRVILADANLDKVLSAYNKHRDKPIREQAENIIHLFTLTNLGAPAAFKYFDTTIDRKRYTSTKEVLDATLIHQSITGLYETRIDLSQLGGDGGGGGGSEAAAKGGGGSGGTLNIEDEYRLHETSKGPDVPLGSTWLSDFPQAWAETGGMGLAVRQAPLIIPLKATSTPVSIKQYPMSQEARLGIKPHIQRLLDQGILVPCQSPWNTPLLPVKKPGTNDYRPVQDLREVNKRVEDIHPTVPNPYNLLSGLPPSHQWYTVLDLKDAFFCLRLHPTSQSLFAFEWRDPEMGISGQLTWTRLPQGFKNSPTLFNEALHRDLADFRIQHPDLILLQYVDDLLLAATSELDCQQGTRALLQTLGDLGYRASAKKAQICQKQVKYLGYLLKEGQRWLTEARKETVMGQPTPKTPRQLREFLGKAGFCRLFIPGFAEMAAPLYPLTKPGTLFEWGPDQQKAYQEIKQALLTAPALGLPDLTKPFELFVDEKQGYAKGVLTQKLGPWRRPVAYLSKKLDPVAAGWPPCLRMVAAIAVLTKDAGKLTMGQPLVILAPHAVEALVKQPPDRWLSNARMTHYQALLLDTDRVQFGPIVALNPATLLPLPEEGLQHDCLDILAEAHGTRPDLTDQPLPDADHTWYTDGSSFLQEGQRKAGAAVTTETEVVWAKALPAGTSAQRAELIALTQALKMAEGKKLNVYTDSRYAFATAHIHGEIYRRRGWLTSEGKEIKNKDEILALLKALFLPKRLSIIHCPGHQKGNRAEARGNRMADQAAREVATRETPETSTLLAGKRTADGSEFEKRTADGSEFESPKKKAKVE

SEQ ID NO: 2529 - protein, 2131 aa, synthetic construct
MPAAKRVKLDGGDKKYSIGLDIGTNSVGWAVITDEYKVPSKKFKVLGNTDRHSIKKNLIGALLFDSGETAEATRLKRTARRRYTRRKNRICYLQEIFSNEMAKVDDSFFHRLEESFLVEEDKKHERHPIFGNIVDEVAYHEKYPTIYHLRKKLVDSTDKADLRLIYLALAHMIKFRGHFLIEGDLNPDNSDVDKLFIQLVQTYNQLFEENPINASGVDAKAILSARLSKSRRLENLIAQLPGEKKNGLFGNLIALSLGLTPNFKSNFDLAEDAKLQLSKDTYDDDLDNLLAQIGDQYADLFLAAKNLSDAILLSDILRVNTEITKAPLSASMIKRYDEHHQDLTLLKALVRQQLPEKYKEIFFDQSKNGYAGYIDGGASQEEFYKFIKPILEKMDGTEELLVKLNREDLLRKQRTFDNGSIPHQIHLGELHAILRRQEDFYPFLKDNREKIEKILTFRIPYYVGPLARGNSRFAWMTRKSEETITPWNFEEVVDKGASAQSFIERMTNFDKNLPNEKVLPKHSLLYEYFTVYNELTKVKYVTEGMRKPAFLSGEQKKAIVDLLFKTNRKVTVKQLKEDYFKKIECFDSVEISGVEDRFNASLGTYHDLLKIIKDKDFLDNEENEDILEDIVLTLTLFEDREMIEERLKTYAHLFDDKVMKQLKRRRYTGWGRLSRKLINGIRDKQSGKTILDFLKSDGFANRNFMQLIHDDSLTFKEDIQKAQVSGQGDSLHEHIANLAGSPAIKKGILQTVKVVDELVKVMGRHKPENIVIEMARENQTTQKGQKNSRERMKRIEEGIKELGSQILKEHPVENTQLQNEKLYLYYLQNGRDMYVDQELDINRLSDYDVDHIVPQSFLKDDSIDNKVLTRSDKARGKSDNVPSEEVVKKMKNYWRQLLNAKLITQRKFDNLTKAERGGLSELDKAGFIKRQLVETRQITKHVAQILDSRMNTKYDENDKLIREVKVITLKSKLVSDFRKDFQFYKVREINNYHHAHDAYLNAVVGTALIKKYPKLESEFVYGDYKVYDVRKMIAKSEQEIGKATAKYFFYSNIMNFFKTEITLANGEIRKRPLIETNGETGEIVWDKGRDFATVRKVLSMPQVNIVKKTEVQTGGFSKESILPKRNSDKLIARKKDWDPKKYGGFDSPTVAYSVLVVAKVEKGKSKKLKSVKELLGITIMERSSFEKNPIDFLEAKGYKEVKKDLIIKLPKYSLFELENGRKRMLASAGELQKGNELALPSKYVNFLYLASHYEKLKGSPEDNEQKQLFVEQHKHYLDEIIEQISEFSKRVILADANLDKVLSAYNKHRDKPIREQAENIIHLFTLTNLGAPAAFKYFDTTIDRKRYTSTKEVLDATLIHQSITGLYETRIDLSQLGGDGGAEAAAKEAAAKEAAAKEAAAKALEAEAAAKEAAAKEAAAKEAAAKAGGTLNIEDEYRLHETSKGPDVPLGSTWLSDFPQAWAETGGMGLAVRQAPLIIPLKATSTPVSIKQYPMSQEARLGIKPHIQRLLDQGILVPCQSPWNTPLLPVKKPGTNDYRPVQDLREVNKRVEDIHPTVPNPYNLLSGLPPSHQWYTVLDLKDAFFCLRLHPTSQSLFAFEWRDPEMGISGQLTWTRLPQGFKNSPTLFNEALHRDLADFRIQHPDLILLQYVDDLLLAATSELDCQQGTRALLQTLGDLGYRASAKKAQICQKQVKYLGYLLKEGQRWLTEARKETVMGQPTPKTPRQLREFLGKAGFCRLFIPGFAEMAAPLYPLTKPGTLFEWGPDQQKAYQEIKQALLTAPALGLPDLTKPFELFVDEKQGYAKGVLTQKLGPWRRPVAYLSKKLDPVAAGWPPCLRMVAAIAVLTKDAGKLTMGQPLVILAPHAVEALVKQPPDRWLSNARMTHYQALLLDTDRVQFGPIVALNPATLLPLPEEGLQHDCLDILAEAHGTRPDLTDQPLPDADHTWYTDGSSFLQEGQRKAGAAVTTETEVVWAKALPAGTSAQRAELIALTQALKMAEGKKLNVYTDSRYAFATAHIHGEIYRRRGWLTSEGKEIKNKDEILALLKALFLPKRLSIIHCPGHQKGNRAEARGNRMADQAAREVATRETPETSTLLAGKRTADGSEFEKRTADGSEFESPKKKAKVE

SEQ ID NO: 2530 - protein, 2096 aa, synthetic construct
MPAAKRVKLDGGDKKYSIGLDIGTNSVGWAVITDEYKVPSKKFKVLGNTDRHSIKKNLIGALLFDSGETAEATRLKRTARRRYTRRKNRICYLQEIFSNEMAKVDDSFFHRLEESFLVEEDKKHERHPIFGNIVDEVAYHEKYPTIYHLRKKLVDSTDKADLRLIYLALAHMIKFRGHFLIEGDLNPDNSDVDKLFIQLVQTYNQLFEENPINASGVDAKAILSARLSKSRRLENLIAQLPGEKKNGLFGNLIALSLGLTPNFKSNFDLAEDAKLQLSKDTYDDDLDNLLAQIGDQYADLFLAAKNLSDAILLSDILRVNTEITKAPLSASMIKRYDEHHQDLTLLKALVRQQLPEKYKEIFFDQSKNGYAGYIDGGASQEEFYKFIKPILEKMDGTEELLVKLNREDLLRKQRTFDNGSIPHQIHLGELHAILRRQEDFYPFLKDNREKIEKILTFRIPYYVGPLARGNSRFAWMTRKSEETITPWNFEEVVDKGASAQSFIERMTNFDKNLPNEKVLPKHSLLYEYFTVYNELTKVKYVTEGMRKPAFLSGEQKKAIVDLLFKTNRKVTVKQLKEDYFKKIECFDSVEISGVEDRFNASLGTYHDLLKIIKDKDFLDNEENEDILEDIVLTLTLFEDREMIEERLKTYAHLFDDKVMKQLKRRRYTGWGRLSRKLINGIRDKQSGKTILDFLKSDGFANRNFMQLIHDDSLTFKEDIQKAQVSGQGDSLHEHIANLAGSPAIKKGILQTVKVVDELVKVMGRHKPENIVIEMARENQTTQKGQKNSRERMKRIEEGIKELGSQILKEHPVENTQLQNEKLYLYYLQNGRDMYVDQELDINRLSDYDVDHIVPQSFLKDDSIDNKVLTRSDKARGKSDNVPSEEVVKKMKNYWRQLLNAKLITQRKFDNLTKAERGGLSELDKAGFIKRQLVETRQITKHVAQILDSRMNTKYDENDKLIREVKVITLKSKLVSDFRKDFQFYKVREINNYHHAHDAYLNAVVGTALIKKYPKLESEFVYGDYKVYDVRKMIAKSEQEIGKATAKYFFYSNIMNFFKTEITLANGEIRKRPLIETNGETGEIVWDKGRDFATVRKVLSMPQVNIVKKTEVQTGGFSKESILPKRNSDKLIARKKDWDPKKYGGFDSPTVAYSVLVVAKVEKGKSKKLKSVKELLGITIMERSSFEKNPIDFLEAKGYKEVKKDLIIKLPKYSLFELENGRKRMLASAGELQKGNELALPSKYVNFLYLASHYEKLKGSPEDNEQKQLFVEQHKHYLDEIIEQISEFSKRVILADANLDKVLSAYNKHRDKPIREQAENIIHLFTLTNLGAPAAFKYFDTTIDRKRYTSTKEVLDATLIHQSITGLYETRIDLSQLGGDGGGGSEAAAKPAPGGTLNIEDEYRLHETSKGPDVPLGSTWLSDFPQAWAETGGMGLAVRQAPLIIPLKATSTPVSIKQYPMSQEARLGIKPHIQRLLDQGILVPCQSPWNTPLLPVKKPGTNDYRPVQDLREVNKRVEDIHPTVPNPYNLLSGLPPSHQWYTVLDLKDAFFCLRLHPTSQSLFAFEWRDPEMGISGQLTWTRLPQGFKNSPTLFNEALHRDLADFRIQHPDLILLQYVDDLLLAATSELDCQQGTRALLQTLGDLGYRASAKKAQICQKQVKYLGYLLKEGQRWLTEARKETVMGQPTPKTPRQLREFLGKAGFCRLFIPGFAEMAAPLYPLTKPGTLFEWGPDQQKAYQEIKQALLTAPALGLPDLTKPFELFVDEKQGYAKGVLTQKLGPWRRPVAYLSKKLDPVAAGWPPCLRMVAAIAVLTKDAGKLTMGQPLVILAPHAVEALVKQPPDRWLSNARMTHYQALLLDTDRVQFGPIVALNPATLLPLPEEGLQHDCLDILAEAHGTRPDLTDQPLPDADHTWYTDGSSFLQEGQRKAGAAVTTETEVVWAKALPAGTSAQRAELIALTQALKMAEGKKLNVYTDSRYAFATAHIHGEIYRRRGWLTSEGKEIKNKDEILALLKALFLPKRLSIIHCPGHQKGNRAEARGNRMADQAAREVATRETPETSTLLAGKRTADGSEFEKRTADGSEFESPKKKAKVE

SEQ ID NO: 2531 - protein, 2094 aa, synthetic construct
MPAAKRVKLDGGDKKYSIGLDIGTNSVGWAVITDEYKVPSKKFKVLGNTDRHSIKKNLIGALLFDSGETAEATRLKRTARRRYTRRKNRICYLQEIFSNEMAKVDDSFFHRLEESFLVEEDKKHERHPIFGNIVDEVAYHEKYPTIYHLRKKLVDSTDKADLRLIYLALAHMIKFRGHFLIEGDLNPDNSDVDKLFIQLVQTYNQLFEENPINASGVDAKAILSARLSKSRRLENLIAQLPGEKKNGLFGNLIALSLGLTPNFKSNFDLAEDAKLQLSKDTYDDDLDNLLAQIGDQYADLFLAAKNLSDAILLSDILRVNTEITKAPLSASMIKRYDEHHQDLTLLKALVRQQLPEKYKEIFFDQSKNGYAGYIDGGASQEEFYKFIKPILEKMDGTEELLVKLNREDLLRKQRTFDNGSIPHQIHLGELHAILRRQEDFYPFLKDNREKIEKILTFRIPYYVGPLARGNSRFAWMTRKSEETITPWNFEEVVDKGASAQSFIERMTNFDKNLPNEKVLPKHSLLYEYFTVYNELTKVKYVTEGMRKPAFLSGEQKKAIVDLLFKTNRKVTVKQLKEDYFKKIECFDSVEISGVEDRFNASLGTYHDLLKIIKDKDFLDNEENEDILEDIVLTLTLFEDREMIEERLKTYAHLFDDKVMKQLKRRRYTGWGRLSRKLINGIRDKQSGKTILDFLKSDGFANRNFMQLIHDDSLTFKEDIQKAQVSGQGDSLHEHIANLAGSPAIKKGILQTVKVVDELVKVMGRHKPENIVIEMARENQTTQKGQKNSRERMKRIEEGIKELGSQILKEHPVENTQLQNEKLYLYYLQNGRDMYVDQELDINRLSDYDVDHIVPQSFLKDDSIDNKVLTRSDKARGKSDNVPSEEVVKKMKNYWRQLLNAKLITQRKFDNLTKAERGGLSELDKAGFIKRQLVETRQITKHVAQILDSRMNTKYDENDKLIREVKVITLKSKLVSDFRKDFQFYKVREINNYHHAHDAYLNAVVGTALIKKYPKLESEFVYGDYKVYDVRKMIAKSEQEIGKATAKYFFYSNIMNFFKTEITLANGEIRKRPLIETNGETGEIVWDKGRDFATVRKVLSMPQVNIVKKTEVQTGGFSKESILPKRNSDKLIARKKDWDPKKYGGFDSPTVAYSVLVVAKVEKGKSKKLKSVKELLGITIMERSSFEKNPIDFLEAKGYKEVKKDLIIKLPKYSLFELENGRKRMLASAGELQKGNELALPSKYVNFLYLASHYEKLKGSPEDNEQKQLFVEQHKHYLDEIIEQISEFSKRVILADANLDKVLSAYNKHRDKPIREQAENIIHLFTLTNLGAPAAFKYFDTTIDRKRYTSTKEVLDATLIHQSITGLYETRIDLSQLGGDGGPAPGSSGGGGGTLNIEDEYRLHETSKGPDVPLGSTWLSDFPQAWAETGGMGLAVRQAPLIIPLKATSTPVSIKQYPMSQEARLGIKPHIQRLLDQGILVPCQSPWNTPLLPVKKPGTNDYRPVQDLREVNKRVEDIHPTVPNPYNLLSGLPPSHQWYTVLDLKDAFFCLRLHPTSQSLFAFEWRDPEMGISGQLTWTRLPQGFKNSPTLFNEALHRDLADFRIQHPDLILLQYVDDLLLAATSELDCQQGTRALLQTLGDLGYRASAKKAQICQKQVKYLGYLLKEGQRWLTEARKETVMGQPTPKTPRQLREFLGKAGFCRLFIPGFAEMAAPLYPLTKPGTLFEWGPDQQKAYQEIKQALLTAPALGLPDLTKPFELFVDEKQGYAKGVLTQKLGPWRRPVAYLSKKLDPVAAGWPPCLRMVAAIAVLTKDAGKLTMGQPLVILAPHAVEALVKQPPDRWLSNARMTHYQALLLDTDRVQFGPIVALNPATLLPLPEEGLQHDCLDILAEAHGTRPDLTDQPLPDADHTWYTDGSSFLQEGQRKAGAAVTTETEVVWAKALPAGTSAQRAELIALTQALKMAEGKKLNVYTDSRYAFATAHIHGEIYRRRGWLTSEGKEIKNKDEILALLKALFLPKRLSIIHCPGHQKGNRAEARGNRMADQAAREVATRETPETSTLLAGKRTADGSEFEKRTADGSEFESPKKKAKVE

SEQ ID NO: 2532 - protein, 2100 aa, synthetic construct
MPAAKRVKLDGGDKKYSIGLDIGTNSVGWAVITDEYKVPSKKFKVLGNTDRHSIKKNLIGALLFDSGETAEATRLKRTARRRYTRRKNRICYLQEIFSNEMAKVDDSFFHRLEESFLVEEDKKHERHPIFGNIVDEVAYHEKYPTIYHLRKKLVDSTDKADLRLIYLALAHMIKFRGHFLIEGDLNPDNSDVDKLFIQLVQTYNQLFEENPINASGVDAKAILSARLSKSRRLENLIAQLPGEKKNGLFGNLIALSLGLTPNFKSNFDLAEDAKLQLSKDTYDDDLDNLLAQIGDQYADLFLAAKNLSDAILLSDILRVNTEITKAPLSASMIKRYDEHHQDLTLLKALVRQQLPEKYKEIFFDQSKNGYAGYIDGGASQEEFYKFIKPILEKMDGTEELLVKLNREDLLRKQRTFDNGSIPHQIHLGELHAILRRQEDFYPFLKDNREKIEKILTFRIPYYVGPLARGNSRFAWMTRKSEETITPWNFEEVVDKGASAQSFIERMTNFDKNLPNEKVLPKHSLLYEYFTVYNELTKVKYVTEGMRKPAFLSGEQKKAIVDLLFKTNRKVTVKQLKEDYFKKIECFDSVEISGVEDRFNASLGTYHDLLKIIKDKDFLDNEENEDILEDIVLTLTLFEDREMIEERLKTYAHLFDDKVMKQLKRRRYTGWGRLSRKLINGIRDKQSGKTILDFLKSDGFANRNFMQLIHDDSLTFKEDIQKAQVSGQGDSLHEHIANLAGSPAIKKGILQTVKVVDELVKVMGRHKPENIVIEMARENQTTQKGQKNSRERMKRIEEGIKELGSQILKEHPVENTQLQNEKLYLYYLQNGRDMYVDQELDINRLSDYDVDHIVPQSFLKDDSIDNKVLTRSDKARGKSDNVPSEEVVKKMKNYWRQLLNAKLITQRKFDNLTKAERGGLSELDKAGFIKRQLVETRQITKHVAQILDSRMNTKYDENDKLIREVKVITLKSKLVSDFRKDFQFYKVREINNYHHAHDAYLNAVVGTALIKKYPKLESEFVYGDYKVYDVRKMIAKSEQEIGKATAKYFFYSNIMNFFKTEITLANGEIRKRPLIETNGETGEIVWDKGRDFATVRKVLSMPQVNIVKKTEVQTGGFSKESILPKRNSDKLIARKKDWDPKKYGGFDSPTVAYSVLVVAKVEKGKSKKLKSVKELLGITIMERSSFEKNPIDFLEAKGYKEVKKDLIIKLPKYSLFELENGRKRMLASAGELQKGNELALPSKYVNFLYLASHYEKLKGSPEDNEQKQLFVEQHKHYLDEIIEQISEFSKRVILADANLDKVLSAYNKHRDKPIREQAENIIHLFTLTNLGAPAAFKYFDTTIDRKRYTSTKEVLDATLIHQSITGLYETRIDLSQLGGDGGGSSGSSGSSGSSGSSGGTLNIEDEYRLHETSKGPDVPLGSTWLSDFPQAWAETGGMGLAVRQAPLIIPLKATSTPVSIKQYPMSQEARLGIKPHIQRLLDQGILVPCQSPWNTPLLPVKKPGTNDYRPVQDLREVNKRVEDIHPTVPNPYNLLSGLPPSHQWYTVLDLKDAFFCLRLHPTSQSLFAFEWRDPEMGISGQLTWTRLPQGFKNSPTLFNEALHRDLADFRIQHPDLILLQYVDDLLLAATSELDCQQGTRALLQTLGDLGYRASAKKAQICQKQVKYLGYLLKEGQRWLTEARKETVMGQPTPKTPRQLREFLGKAGFCRLFIPGFAEMAAPLYPLTKPGTLFEWGPDQQKAYQEIKQALLTAPALGLPDLTKPFELFVDEKQGYAKGVLTQKLGPWRRPVAYLSKKLDPVAAGWPPCLRMVAAIAVLTKDAGKLTMGQPLVILAPHAVEALVKQPPDRWLSNARMTHYQALLLDTDRVQFGPIVALNPATLLPLPEEGLQHDCLDILAEAHGTRPDLTDQPLPDADHTWYTDGSSFLQEGQRKAGAAVTTETEVVWAKALPAGTSAQRAELIALTQALKMAEGKKLNVYTDSRYAFATAHIHGEIYRRRGWLTSEGKEIKNKDEILALLKALFLPKRLSIIHCPGHQKGNRAEARGNRMADQAAREVATRETPETSTLLAGKRTADGSEFEKRTADGSEFESPKKKAKVE

SEQ ID NO: 2533 - protein, 2094 aa, synthetic construct
MPAAKRVKLDGGDKKYSIGLDIGTNSVGWAVITDEYKVPSKKFKVLGNTDRHSIKKNLIGALLFDSGETAEATRLKRTARRRYTRRKNRICYLQEIFSNEMAKVDDSFFHRLEESFLVEEDKKHERHPIFGNIVDEVAYHEKYPTIYHLRKKLVDSTDKADLRLIYLALAHMIKFRGHFLIEGDLNPDNSDVDKLFIQLVQTYNQLFEENPINASGVDAKAILSARLSKSRRLENLIAQLPGEKKNGLFGNLIALSLGLTPNFKSNFDLAEDAKLQLSKDTYDDDLDNLLAQIGDQYADLFLAAKNLSDAILLSDILRVNTEITKAPLSASMIKRYDEHHQDLTLLKALVRQQLPEKYKEIFFDQSKNGYAGYIDGGASQEEFYKFIKPILEKMDGTEELLVKLNREDLLRKQRTFDNGSIPHQIHLGELHAILRRQEDFYPFLKDNREKIEKILTFRIPYYVGPLARGNSRFAWMTRKSEETITPWNFEEVVDKGASAQSFIERMTNFDKNLPNEKVLPKHSLLYEYFTVYNELTKVKYVTEGMRKPAFLSGEQKKAIVDLLFKTNRKVTVKQLKEDYFKKIECFDSVEISGVEDRFNASLGTYHDLLKIIKDKDFLDNEENEDILEDIVLTLTLFEDREMIEERLKTYAHLFDDKVMKQLKRRRYTGWGRLSRKLINGIRDKQSGKTILDFLKSDGFANRNFMQLIHDDSLTFKEDIQKAQVSGQGDSLHEHIANLAGSPAIKKGILQTVKVVDELVKVMGRHKPENIVIEMARENQTTQKGQKNSRERMKRIEEGIKELGSQILKEHPVENTQLQNEKLYLYYLQNGRDMYVDQELDINRLSDYDVDHIVPQSFLKDDSIDNKVLTRSDKARGKSDNVPSEEVVKKMKNYWRQLLNAKLITQRKFDNLTKAERGGLSELDKAGFIKRQLVETRQITKHVAQILDSRMNTKYDENDKLIREVKVITLKSKLVSDFRKDFQFYKVREINNYHHAHDAYLNAVVGTALIKKYPKLESEFVYGDYKVYDVRKMIAKSEQEIGKATAKYFFYSNIMNFFKTEITLANGEIRKRPLIETNGETGEIVWDKGRDFATVRKVLSMPQVNIVKKTEVQTGGFSKESILPKRNSDKLIARKKDWDPKKYGGFDSPTVAYSVLVVAKVEKGKSKKLKSVKELLGITIMERSSFEKNPIDFLEAKGYKEVKKDLIIKLPKYSLFELENGRKRMLASAGELQKGNELALPSKYVNFLYLASHYEKLKGSPEDNEQKQLFVEQHKHYLDEIIEQISEFSKRVILADANLDKVLSAYNKHRDKPIREQAENIIHLFTLTNLGAPAAFKYFDTTIDRKRYTSTKEVLDATLIHQSITGLYETRIDLSQLGGDGGPAPGGSGSSGGTLNIEDEYRLHETSKGPDVPLGSTWLSDFPQAWAETGGMGLAVRQAPLIIPLKATSTPVSIKQYPMSQEARLGIKPHIQRLLDQGILVPCQSPWNTPLLPVKKPGTNDYRPVQDLREVNKRVEDIHPTVPNPYNLLSGLPPSHQWYTVLDLKDAFFCLRLHPTSQSLFAFEWRDPEMGISGQLTWTRLPQGFKNSPTLFNEALHRDLADFRIQHPDLILLQYVDDLLLAATSELDCQQGTRALLQTLGDLGYRASAKKAQICQKQVKYLGYLLKEGQRWLTEARKETVMGQPTPKTPRQLREFLGKAGFCRLFIPGFAEMAAPLYPLTKPGTLFEWGPDQQKAYQEIKQALLTAPALGLPDLTKPFELFVDEKQGYAKGVLTQKLGPWRRPVAYLSKKLDPVAAGWPPCLRMVAAIAVLTKDAGKLTMGQPLVILAPHAVEALVKQPPDRWLSNARMTHYQALLLDTDRVQFGPIVALNPATLLPLPEEGLQHDCLDILAEAHGTRPDLTDQPLPDADHTWYTDGSSFLQEGQRKAGAAVTTETEVVWAKALPAGTSAQRAELIALTQALKMAEGKKLNVYTDSRYAFATAHIHGEIYRRRGWLTSEGKEIKNKDEILALLKALFLPKRLSIIHCPGHQKGNRAEARGNRMADQAAREVATRETPETSTLLAGKRTADGSEFEKRTADGSEFESPKKKAKVE

SEQ ID NO: 2534 - protein, 2098 aa, synthetic construct
MPAAKRVKLDGGDKKYSIGLDIGTNSVGWAVITDEYKVPSKKFKVLGNTDRHSIKKNLIGALLFDSGETAEATRLKRTARRRYTRRKNRICYLQEIFSNEMAKVDDSFFHRLEESFLVEEDKKHERHPIFGNIVDEVAYHEKYPTIYHLRKKLVDSTDKADLRLIYLALAHMIKFRGHFLIEGDLNPDNSDVDKLFIQLVQTYNQLFEENPINASGVDAKAILSARLSKSRRLENLIAQLPGEKKNGLFGNLIALSLGLTPNFKSNFDLAEDAKLQLSKDTYDDDLDNLLAQIGDQYADLFLAAKNLSDAILLSDILRVNTEITKAPLSASMIKRYDEHHQDLTLLKALVRQQLPEKYKEIFFDQSKNGYAGYIDGGASQEEFYKFIKPILEKMDGTEELLVKLNREDLLRKQRTFDNGSIPHQIHLGELHAILRRQEDFYPFLKDNREKIEKILTFRIPYYVGPLARGNSRFAWMTRKSEETITPWNFEEVVDKGASAQSFIERMTNFDKNLPNEKVLPKHSLLYEYFTVYNELTKVKYVTEGMRKPAFLSGEQKKAIVDLLFKTNRKVTVKQLKEDYFKKIECFDSVEISGVEDRFNASLGTYHDLLKIIKDKDFLDNEENEDILEDIVLTLTLFEDREMIEERLKTYAHLFDDKVMKQLKRRRYTGWGRLSRKLINGIRDKQSGKTILDFLKSDGFANRNFMQLIHDDSLTFKEDIQKAQVSGQGDSLHEHIANLAGSPAIKKGILQTVKVVDELVKVMGRHKPENIVIEMARENQTTQKGQKNSRERMKRIEEGIKELGSQILKEHPVENTQLQNEKLYLYYLQNGRDMYVDQELDINRLSDYDVDHIVPQSFLKDDSIDNKVLTRSDKARGKSDNVPSEEVVKKMKNYWRQLLNAKLITQRKFDNLTKAERGGLSELDKAGFIKRQLVETRQITKHVAQILDSRMNTKYDENDKLIREVKVITLKSKLVSDFRKDFQFYKVREINNYHHAHDAYLNAVVGTALIKKYPKLESEFVYGDYKVYDVRKMIAKSEQEIGKATAKYFFYSNIMNFFKTEITLANGEIRKRPLIETNGETGEIVWDKGRDFATVRKVLSMPQVNIVKKTEVQTGGFSKESILPKRNSDKLIARKKDWDPKKYGGFDSPTVAYSVLVVAKVEKGKSKKLKSVKELLGITIMERSSFEKNPIDFLEAKGYKEVKKDLIIKLPKYSLFELENGRKRMLASAGELQKGNELALPSKYVNFLYLASHYEKLKGSPEDNEQKQLFVEQHKHYLDEIIEQISEFSKRVILADANLDKVLSAYNKHRDKPIREQAENIIHLFTLTNLGAPAAFKYFDTTIDRKRYTSTKEVLDATLIHQSITGLYETRIDLSQLGGDGGPAPAPAPAPAPAPGGTLNIEDEYRLHETSKGPDVPLGSTWLSDFPQAWAETGGMGLAVRQAPLIIPLKATSTPVSIKQYPMSQEARLGIKPHIQRLLDQGILVPCQSPWNTPLLPVKKPGTNDYRPVQDLREVNKRVEDIHPTVPNPYNLLSGLPPSHQWYTVLDLKDAFFCLRLHPTSQSLFAFEWRDPEMGISGQLTWTRLPQGFKNSPTLFNEALHRDLADFRIQHPDLILLQYVDDLLLAATSELDCQQGTRALLQTLGDLGYRASAKKAQICQKQVKYLGYLLKEGQRWLTEARKETVMGQPTPKTPRQLREFLGKAGFCRLFIPGFAEMAAPLYPLTKPGTLFEWGPDQQKAYQEIKQALLTAPALGLPDLTKPFELFVDEKQGYAKGVLTQKLGPWRRPVAYLSKKLDPVAAGWPPCLRMVAAIAVLTKDAGKLTMGQPLVILAPHAVEALVKQPPDRWLSNARMTHYQALLLDTDRVQFGPIVALNPATLLPLPEEGLQHDCLDILAEAHGTRPDLTDQPLPDADHTWYTDGSSFLQEGQRKAGAAVTTETEVVWAKALPAGTSAQRAELIALTQALKMAEGKKLNVYTDSRYAFATAHIHGEIYRRRGWLTSEGKEIKNKDEILALLKALFLPKRLSIIHCPGHQKGNRAEARGNRMADQAAREVATRETPETSTLLAGKRTADGSEFEKRTADGSEFESPKKKAKVE

SEQ ID NO: 2535 - protein, 2096 aa, synthetic construct
MPAAKRVKLDGGDKKYSIGLDIGTNSVGWAVITDEYKVPSKKFKVLGNTDRHSIKKNLIGALLFDSGETAEATRLKRTARRRYTRRKNRICYLQEIFSNEMAKVDDSFFHRLEESFLVEEDKKHERHPIFGNIVDEVAYHEKYPTIYHLRKKLVDSTDKADLRLIYLALAHMIKFRGHFLIEGDLNPDNSDVDKLFIQLVQTYNQLFEENPINASGVDAKAILSARLSKSRRLENLIAQLPGEKKNGLFGNLIALSLGLTPNFKSNFDLAEDAKLQLSKDTYDDDLDNLLAQIGDQYADLFLAAKNLSDAILLSDILRVNTEITKAPLSASMIKRYDEHHQDLTLLKALVRQQLPEKYKEIFFDQSKNGYAGYIDGGASQEEFYKFIKPILEKMDGTEELLVKLNREDLLRKQRTFDNGSIPHQIHLGELHAILRRQEDFYPFLKDNREKIEKILTFRIPYYVGPLARGNSRFAWMTRKSEETITPWNFEEVVDKGASAQSFIERMTNFDKNLPNEKVLPKHSLLYEYFTVYNELTKVKYVTEGMRKPAFLSGEQKKAIVDLLFKTNRKVTVKQLKEDYFKKIECFDSVEISGVEDRFNASLGTYHDLLKIIKDKDFLDNEENEDILEDIVLTLTLFEDREMIEERLKTYAHLFDDKVMKQLKRRRYTGWGRLSRKLINGIRDKQSGKTILDFLKSDGFANRNFMQLIHDDSLTFKEDIQKAQVSGQGDSLHEHIANLAGSPAIKKGILQTVKVVDELVKVMGRHKPENIVIEMARENQTTQKGQKNSRERMKRIEEGIKELGSQILKEHPVENTQLQNEKLYLYYLQNGRDMYVDQELDINRLSDYDVDHIVPQSFLKDDSIDNKVLTRSDKARGKSDNVPSEEVVKKMKNYWRQLLNAKLITQRKFDNLTKAERGGLSELDKAGFIKRQLVETRQITKHVAQILDSRMNTKYDENDKLIREVKVITLKSKLVSDFRKDFQFYKVREINNYHHAHDAYLNAVVGTALIKKYPKLESEFVYGDYKVYDVRKMIAKSEQEIGKATAKYFFYSNIMNFFKTEITLANGEIRKRPLIETNGETGEIVWDKGRDFATVRKVLSMPQVNIVKKTEVQTGGFSKESILPKRNSDKLIARKKDWDPKKYGGFDSPTVAYSVLVVAKVEKGKSKKLKSVKELLGITIMERSSFEKNPIDFLEAKGYKEVKKDLIIKLPKYSLFELENGRKRMLASAGELQKGNELALPSKYVNFLYLASHYEKLKGSPEDNEQKQLFVEQHKHYLDEIIEQISEFSKRVILADANLDKVLSAYNKHRDKPIREQAENIIHLFTLTNLGAPAAFKYFDTTIDRKRYTSTKEVLDATLIHQSITGLYETRIDLSQLGGDGGGSSEAAAKPAPGGTLNIEDEYRLHETSKGPDVPLGSTWLSDFPQAWAETGGMGLAVRQAPLIIPLKATSTPVSIKQYPMSQEARLGIKPHIQRLLDQGILVPCQSPWNTPLLPVKKPGTNDYRPVQDLREVNKRVEDIHPTVPNPYNLLSGLPPSHQWYTVLDLKDAFFCLRLHPTSQSLFAFEWRDPEMGISGQLTWTRLPQGFKNSPTLFNEALHRDLADFRIQHPDLILLQYVDDLLLAATSELDCQQGTRALLQTLGDLGYRASAKKAQICQKQVKYLGYLLKEGQRWLTEARKETVMGQPTPKTPRQLREFLGKAGFCRLFIPGFAEMAAPLYPLTKPGTLFEWGPDQQKAYQEIKQALLTAPALGLPDLTKPFELFVDEKQGYAKGVLTQKLGPWRRPVAYLSKKLDPVAAGWPPCLRMVAAIAVLTKDAGKLTMGQPLVILAPHAVEALVKQPPDRWLSNARMTHYQALLLDTDRVQFGPIVALNPATLLPLPEEGLQHDCLDILAEAHGTRPDLTDQPLPDADHTWYTDGSSFLQEGQRKAGAAVTTETEVVWAKALPAGTSAQRAELIALTQALKMAEGKKLNVYTDSRYAFATAHIHGEIYRRRGWLTSEGKEIKNKDEILALLKALFLPKRLSIIHCPGHQKGNRAEARGNRMADQAAREVATRETPETSTLLAGKRTADGSEFEKRTADGSEFESPKKKAKVE

SEQ ID NO: 2536 - protein, 2110 aa, synthetic construct
MPAAKRVKLDGGDKKYSIGLDIGTNSVGWAVITDEYKVPSKKFKVLGNTDRHSIKKNLIGALLFDSGETAEATRLKRTARRRYTRRKNRICYLQEIFSNEMAKVDDSFFHRLEESFLVEEDKKHERHPIFGNIVDEVAYHEKYPTIYHLRKKLVDSTDKADLRLIYLALAHMIKFRGHFLIEGDLNPDNSDVDKLFIQLVQTYNQLFEENPINASGVDAKAILSARLSKSRRLENLIAQLPGEKKNGLFGNLIALSLGLTPNFKSNFDLAEDAKLQLSKDTYDDDLDNLLAQIGDQYADLFLAAKNLSDAILLSDILRVNTEITKAPLSASMIKRYDEHHQDLTLLKALVRQQLPEKYKEIFFDQSKNGYAGYIDGGASQEEFYKFIKPILEKMDGTEELLVKLNREDLLRKQRTFDNGSIPHQIHLGELHAILRRQEDFYPFLKDNREKIEKILTFRIPYYVGPLARGNSRFAWMTRKSEETITPWNFEEVVDKGASAQSFIERMTNFDKNLPNEKVLPKHSLLYEYFTVYNELTKVKYVTEGMRKPAFLSGEQKKAIVDLLFKTNRKVTVKQLKEDYFKKIECFDSVEISGVEDRFNASLGTYHDLLKIIKDKDFLDNEENEDILEDIVLTLTLFEDREMIEERLKTYAHLFDDKVMKQLKRRRYTGWGRLSRKLINGIRDKQSGKTILDFLKSDGFANRNFMQLIHDDSLTFKEDIQKAQVSGQGDSLHEHIANLAGSPAIKKGILQTVKVVDELVKVMGRHKPENIVIEMARENQTTQKGQKNSRERMKRIEEGIKELGSQILKEHPVENTQLQNEKLYLYYLQNGRDMYVDQELDINRLSDYDVDHIVPQSFLKDDSIDNKVLTRSDKARGKSDNVPSEEVVKKMKNYWRQLLNAKLITQRKFDNLTKAERGGLSELDKAGFIKRQLVETRQITKHVAQILDSRMNTKYDENDKLIREVKVITLKSKLVSDFRKDFQFYKVREINNYHHAHDAYLNAVVGTALIKKYPKLESEFVYGDYKVYDVRKMIAKSEQEIGKATAKYFFYSNIMNFFKTEITLANGEIRKRPLIETNGETGEIVWDKGRDFATVRKVLSMPQVNIVKKTEVQTGGFSKESILPKRNSDKLIARKKDWDPKKYGGFDSPTVAYSVLVVAKVEKGKSKKLKSVKELLGITIMERSSFEKNPIDFLEAKGYKEVKKDLIIKLPKYSLFELENGRKRMLASAGELQKGNELALPSKYVNFLYLASHYEKLKGSPEDNEQKQLFVEQHKHYLDEIIEQISEFSKRVILADANLDKVLSAYNKHRDKPIREQAENIIHLFTLTNLGAPAAFKYFDTTIDRKRYTSTKEVLDATLIHQSITGLYETRIDLSQLGGDGGEAAAKEAAAKEAAAKEAAAKEAAAKGGTLNIEDEYRLHETSKGPDVPLGSTWLSDFPQAWAETGGMGLAVRQAPLIIPLKATSTPVSIKQYPMSQEARLGIKPHIQRLLDQGILVPCQSPWNTPLLPVKKPGTNDYRPVQDLREVNKRVEDIHPTVPNPYNLLSGLPPSHQWYTVLDLKDAFFCLRLHPTSQSLFAFEWRDPEMGISGQLTWTRLPQGFKNSPTLFNEALHRDLADFRIQHPDLILLQYVDDLLLAATSELDCQQGTRALLQTLGDLGYRASAKKAQICQKQVKYLGYLLKEGQRWLTEARKETVMGQPTPKTPRQLREFLGKAGFCRLFIPGFAEMAAPLYPLTKPGTLFEWGPDQQKAYQEIKQALLTAPALGLPDLTKPFELFVDEKQGYAKGVLTQKLGPWRRPVAYLSKKLDPVAAGWPPCLRMVAAIAVLTKDAGKLTMGQPLVILAPHAVEALVKQPPDRWLSNARMTHYQALLLDTDRVQFGPIVALNPATLLPLPEEGLQHDCLDILAEAHGTRPDLTDQPLPDADHTWYTDGSSFLQEGQRKAGAAVTTETEVVWAKALPAGTSAQRAELIALTQALKMAEGKKLNVYTDSRYAFATAHIHGEIYRRRGWLTSEGKEIKNKDEILALLKALFLPKRLSIIHCPGHQKGNRAEARGNRMADQAAREVATRETPETSTLLAGKRTADGSEFEKRTADGSEFESPKKKAKVE

SEQ ID NO: 2537 - protein, 2097 aa, synthetic construct
MPAAKRVKLDGGDKKYSIGLDIGTNSVGWAVITDEYKVPSKKFKVLGNTDRHSIKKNLIGALLFDSGETAEATRLKRTARRRYTRRKNRICYLQEIFSNEMAKVDDSFFHRLEESFLVEEDKKHERHPIFGNIVDEVAYHEKYPTIYHLRKKLVDSTDKADLRLIYLALAHMIKFRGHFLIEGDLNPDNSDVDKLFIQLVQTYNQLFEENPINASGVDAKAILSARLSKSRRLENLIAQLPGEKKNGLFGNLIALSLGLTPNFKSNFDLAEDAKLQLSKDTYDDDLDNLLAQIGDQYADLFLAAKNLSDAILLSDILRVNTEITKAPLSASMIKRYDEHHQDLTLLKALVRQQLPEKYKEIFFDQSKNGYAGYIDGGASQEEFYKFIKPILEKMDGTEELLVKLNREDLLRKQRTFDNGSIPHQIHLGELHAILRRQEDFYPFLKDNREKIEKILTFRIPYYVGPLARGNSRFAWMTRKSEETITPWNFEEVVDKGASAQSFIERMTNFDKNLPNEKVLPKHSLLYEYFTVYNELTKVKYVTEGMRKPAFLSGEQKKAIVDLLFKTNRKVTVKQLKEDYFKKIECFDSVEISGVEDRFNASLGTYHDLLKIIKDKDFLDNEENEDILEDIVLTLTLFEDREMIEERLKTYAHLFDDKVMKQLKRRRYTGWGRLSRKLINGIRDKQSGKTILDFLKSDGFANRNFMQLIHDDSLTFKEDIQKAQVSGQGDSLHEHIANLAGSPAIKKGILQTVKVVDELVKVMGRHKPENIVIEMARENQTTQKGQKNSRERMKRIEEGIKELGSQILKEHPVENTQLQNEKLYLYYLQNGRDMYVDQELDINRLSDYDVDHIVPQSFLKDDSIDNKVLTRSDKARGKSDNVPSEEVVKKMKNYWRQLLNAKLITQRKFDNLTKAERGGLSELDKAGFIKRQLVETRQITKHVAQILDSRMNTKYDENDKLIREVKVITLKSKLVSDFRKDFQFYKVREINNYHHAHDAYLNAVVGTALIKKYPKLESEFVYGDYKVYDVRKMIAKSEQEIGKATAKYFFYSNIMNFFKTEITLANGEIRKRPLIETNGETGEIVWDKGRDFATVRKVLSMPQVNIVKKTEVQTGGFSKESILPKRNSDKLIARKKDWDPKKYGGFDSPTVAYSVLVVAKVEKGKSKKLKSVKELLGITIMERSSFEKNPIDFLEAKGYKEVKKDLIIKLPKYSLFELENGRKRMLASAGELQKGNELALPSKYVNFLYLASHYEKLKGSPEDNEQKQLFVEQHKHYLDEIIEQISEFSKRVILADANLDKVLSAYNKHRDKPIREQAENIIHLFTLTNLGAPAAFKYFDTTIDRKRYTSTKEVLDATLIHQSITGLYETRIDLSQLGGDGGGSSGSSGSSGSSGGTLNIEDEYRLHETSKGPDVPLGSTWLSDFPQAWAETGGMGLAVRQAPLIIPLKATSTPVSIKQYPMSQEARLGIKPHIQRLLDQGILVPCQSPWNTPLLPVKKPGTNDYRPVQDLREVNKRVEDIHPTVPNPYNLLSGLPPSHQWYTVLDLKDAFFCLRLHPTSQSLFAFEWRDPEMGISGQLTWTRLPQGFKNSPTLFNEALHRDLADFRIQHPDLILLQYVDDLLLAATSELDCQQGTRALLQTLGDLGYRASAKKAQICQKQVKYLGYLLKEGQRWLTEARKETVMGQPTPKTPRQLREFLGKAGFCRLFIPGFAEMAAPLYPLTKPGTLFEWGPDQQKAYQEIKQALLTAPALGLPDLTKPFELFVDEKQGYAKGVLTQKLGPWRRPVAYLSKKLDPVAAGWPPCLRMVAAIAVLTKDAGKLTMGQPLVILAPHAVEALVKQPPDRWLSNARMTHYQALLLDTDRVQFGPIVALNPATLLPLPEEGLQHDCLDILAEAHGTRPDLTDQPLPDADHTWYTDGSSFLQEGQRKAGAAVTTETEVVWAKALPAGTSAQRAELIALTQALKMAEGKKLNVYTDSRYAFATAHIHGEIYRRRGWLTSEGKEIKNKDEILALLKALFLPKRLSIIHCPGHQKGNRAEARGNRMADQAAREVATRETPETSTLLAGKRTADGSEFEKRTADGSEFESPKKKAKVE

SEQ ID NO: 2538 - protein, 2096 aa, synthetic construct
MPAAKRVKLDGGDKKYSIGLDIGTNSVGWAVITDEYKVPSKKFKVLGNTDRHSIKKNLIGALLFDSGETAEATRLKRTARRRYTRRKNRICYLQEIFSNEMAKVDDSFFHRLEESFLVEEDKKHERHPIFGNIVDEVAYHEKYPTIYHLRKKLVDSTDKADLRLIYLALAHMIKFRGHFLIEGDLNPDNSDVDKLFIQLVQTYNQLFEENPINASGVDAKAILSARLSKSRRLENLIAQLPGEKKNGLFGNLIALSLGLTPNFKSNFDLAEDAKLQLSKDTYDDDLDNLLAQIGDQYADLFLAAKNLSDAILLSDILRVNTEITKAPLSASMIKRYDEHHQDLTLLKALVRQQLPEKYKEIFFDQSKNGYAGYIDGGASQEEFYKFIKPILEKMDGTEELLVKLNREDLLRKQRTFDNGSIPHQIHLGELHAILRRQEDFYPFLKDNREKIEKILTFRIPYYVGPLARGNSRFAWMTRKSEETITPWNFEEVVDKGASAQSFIERMTNFDKNLPNEKVLPKHSLLYEYFTVYNELTKVKYVTEGMRKPAFLSGEQKKAIVDLLFKTNRKVTVKQLKEDYFKKIECFDSVEISGVEDRFNASLGTYHDLLKIIKDKDFLDNEENEDILEDIVLTLTLFEDREMIEERLKTYAHLFDDKVMKQLKRRRYTGWGRLSRKLINGIRDKQSGKTILDFLKSDGFANRNFMQLIHDDSLTFKEDIQKAQVSGQGDSLHEHIANLAGSPAIKKGILQTVKVVDELVKVMGRHKPENIVIEMARENQTTQKGQKNSRERMKRIEEGIKELGSQILKEHPVENTQLQNEKLYLYYLQNGRDMYVDQELDINRLSDYDVDHIVPQSFLKDDSIDNKVLTRSDKARGKSDNVPSEEVVKKMKNYWRQLLNAKLITQRKFDNLTKAERGGLSELDKAGFIKRQLVETRQITKHVAQILDSRMNTKYDENDKLIREVKVITLKSKLVSDFRKDFQFYKVREINNYHHAHDAYLNAVVGTALIKKYPKLESEFVYGDYKVYDVRKMIAKSEQEIGKATAKYFFYSNIMNFFKTEITLANGEIRKRPLIETNGETGEIVWDKGRDFATVRKVLSMPQVNIVKKTEVQTGGFSKESILPKRNSDKLIARKKDWDPKKYGGFDSPTVAYSVLVVAKVEKGKSKKLKSVKELLGITIMERSSFEKNPIDFLEAKGYKEVKKDLIIKLPKYSLFELENGRKRMLASAGELQKGNELALPSKYVNFLYLASHYEKLKGSPEDNEQKQLFVEQHKHYLDEIIEQISEFSKRVILADANLDKVLSAYNKHRDKPIREQAENIIHLFTLTNLGAPAAFKYFDTTIDRKRYTSTKEVLDATLIHQSITGLYETRIDLSQLGGDGGGGSGSSEAAAKGGTLNIEDEYRLHETSKGPDVPLGSTWLSDFPQAWAETGGMGLAVRQAPLIIPLKATSTPVSIKQYPMSQEARLGIKPHIQRLLDQGILVPCQSPWNTPLLPVKKPGTNDYRPVQDLREVNKRVEDIHPTVPNPYNLLSGLPPSHQWYTVLDLKDAFFCLRLHPTSQSLFAFEWRDPEMGISGQLTWTRLPQGFKNSPTLFNEALHRDLADFRIQHPDLILLQYVDDLLLAATSELDCQQGTRALLQTLGDLGYRASAKKAQICQKQVKYLGYLLKEGQRWLTEARKETVMGQPTPKTPRQLREFLGKAGFCRLFIPGFAEMAAPLYPLTKPGTLFEWGPDQQKAYQEIKQALLTAPALGLPDLTKPFELFVDEKQGYAKGVLTQKLGPWRRPVAYLSKKLDPVAAGWPPCLRMVAAIAVLTKDAGKLTMGQPLVILAPHAVEALVKQPPDRWLSNARMTHYQALLLDTDRVQFGPIVALNPATLLPLPEEGLQHDCLDILAEAHGTRPDLTDQPLPDADHTWYTDGSSFLQEGQRKAGAAVTTETEVVWAKALPAGTSAQRAELIALTQALKMAEGKKLNVYTDSRYAFATAHIHGEIYRRRGWLTSEGKEIKNKDEILALLKALFLPKRLSIIHCPGHQKGNRAEARGNRMADQAAREVATRETPETSTLLAGKRTADGSEFEKRTADGSEFESPKKKAKVE

SEQ ID NO: 2539 - protein, 2090 aa, synthetic construct
MPAAKRVKLDGGDKKYSIGLDIGTNSVGWAVITDEYKVPSKKFKVLGNTDRHSIKKNLIGALLFDSGETAEATRLKRTARRRYTRRKNRICYLQEIFSNEMAKVDDSFFHRLEESFLVEEDKKHERHPIFGNIVDEVAYHEKYPTIYHLRKKLVDSTDKADLRLIYLALAHMIKFRGHFLIEGDLNPDNSDVDKLFIQLVQTYNQLFEENPINASGVDAKAILSARLSKSRRLENLIAQLPGEKKNGLFGNLIALSLGLTPNFKSNFDLAEDAKLQLSKDTYDDDLDNLLAQIGDQYADLFLAAKNLSDAILLSDILRVNTEITKAPLSASMIKRYDEHHQDLTLLKALVRQQLPEKYKEIFFDQSKNGYAGYIDGGASQEEFYKFIKPILEKMDGTEELLVKLNREDLLRKQRTFDNGSIPHQIHLGELHAILRRQEDFYPFLKDNREKIEKILTFRIPYYVGPLARGNSRFAWMTRKSEETITPWNFEEVVDKGASAQSFIERMTNFDKNLPNEKVLPKHSLLYEYFTVYNELTKVKYVTEGMRKPAFLSGEQKKAIVDLLFKTNRKVTVKQLKEDYFKKIECFDSVEISGVEDRFNASLGTYHDLLKIIKDKDFLDNEENEDILEDIVLTLTLFEDREMIEERLKTYAHLFDDKVMKQLKRRRYTGWGRLSRKLINGIRDKQSGKTILDFLKSDGFANRNFMQLIHDDSLTFKEDIQKAQVSGQGDSLHEHIANLAGSPAIKKGILQTVKVVDELVKVMGRHKPENIVIEMARENQTTQKGQKNSRERMKRIEEGIKELGSQILKEHPVENTQLQNEKLYLYYLQNGRDMYVDQELDINRLSDYDVDHIVPQSFLKDDSIDNKVLTRSDKARGKSDNVPSEEVVKKMKNYWRQLLNAKLITQRKFDNLTKAERGGLSELDKAGFIKRQLVETRQITKHVAQILDSRMNTKYDENDKLIREVKVITLKSKLVSDFRKDFQFYKVREINNYHHAHDAYLNAVVGTALIKKYPKLESEFVYGDYKVYDVRKMIAKSEQEIGKATAKYFFYSNIMNFFKTEITLANGEIRKRPLIETNGETGEIVWDKGRDFATVRKVLSMPQVNIVKKTEVQTGGFSKESILPKRNSDKLIARKKDWDPKKYGGFDSPTVAYSVLVVAKVEKGKSKKLKSVKELLGITIMERSSFEKNPIDFLEAKGYKEVKKDLIIKLPKYSLFELENGRKRMLASAGELQKGNELALPSKYVNFLYLASHYEKLKGSPEDNEQKQLFVEQHKHYLDEIIEQISEFSKRVILADANLDKVLSAYNKHRDKPIREQAENIIHLFTLTNLGAPAAFKYFDTTIDRKRYTSTKEVLDATLIHQSITGLYETRIDLSQLGGDGGEAAAKGGTLNIEDEYRLHETSKGPDVPLGSTWLSDFPQAWAETGGMGLAVRQAPLIIPLKATSTPVSIKQYPMSQEARLGIKPHIQRLLDQGILVPCQSPWNTPLLPVKKPGTNDYRPVQDLREVNKRVEDIHPTVPNPYNLLSGLPPSHQWYTVLDLKDAFFCLRLHPTSQSLFAFEWRDPEMGISGQLTWTRLPQGFKNSPTLFNEALHRDLADFRIQHPDLILLQYVDDLLLAATSELDCQQGTRALLQTLGDLGYRASAKKAQICQKQVKYLGYLLKEGQRWLTEARKETVMGQPTPKTPRQLREFLGKAGFCRLFIPGFAEMAAPLYPLTKPGTLFEWGPDQQKAYQEIKQALLTAPALGLPDLTKPFELFVDEKQGYAKGVLTQKLGPWRRPVAYLSKKLDPVAAGWPPCLRMVAAIAVLTKDAGKLTMGQPLVILAPHAVEALVKQPPDRWLSNARMTHYQALLLDTDRVQFGPIVALNPATLLPLPEEGLQHDCLDILAEAHGTRPDLTDQPLPDADHTWYTDGSSFLQEGQRKAGAAVTTETEVVWAKALPAGTSAQRAELIALTQALKMAEGKKLNVYTDSRYAFATAHIHGEIYRRRGWLTSEGKEIKNKDEILALLKALFLPKRLSIIHCPGHQKGNRAEARGNRMADQAAREVATRETPETSTLLAGKRTADGSEFEKRTADGSEFESPKKKAKVE

SEQ ID NO: 2540 - protein, 2091 aa, synthetic construct
MPAAKRVKLDGGDKKYSIGLDIGTNSVGWAVITDEYKVPSKKFKVLGNTDRHSIKKNLIGALLFDSGETAEATRLKRTARRRYTRRKNRICYLQEIFSNEMAKVDDSFFHRLEESFLVEEDKKHERHPIFGNIVDEVAYHEKYPTIYHLRKKLVDSTDKADLRLIYLALAHMIKFRGHFLIEGDLNPDNSDVDKLFIQLVQTYNQLFEENPINASGVDAKAILSARLSKSRRLENLIAQLPGEKKNGLFGNLIALSLGLTPNFKSNFDLAEDAKLQLSKDTYDDDLDNLLAQIGDQYADLFLAAKNLSDAILLSDILRVNTEITKAPLSASMIKRYDEHHQDLTLLKALVRQQLPEKYKEIFFDQSKNGYAGYIDGGASQEEFYKFIKPILEKMDGTEELLVKLNREDLLRKQRTFDNGSIPHQIHLGELHAILRRQEDFYPFLKDNREKIEKILTFRIPYYVGPLARGNSRFAWMTRKSEETITPWNFEEVVDKGASAQSFIERMTNFDKNLPNEKVLPKHSLLYEYFTVYNELTKVKYVTEGMRKPAFLSGEQKKAIVDLLFKTNRKVTVKQLKEDYFKKIECFDSVEISGVEDRFNASLGTYHDLLKIIKDKDFLDNEENEDILEDIVLTLTLFEDREMIEERLKTYAHLFDDKVMKQLKRRRYTGWGRLSRKLINGIRDKQSGKTILDFLKSDGFANRNFMQLIHDDSLTFKEDIQKAQVSGQGDSLHEHIANLAGSPAIKKGILQTVKVVDELVKVMGRHKPENIVIEMARENQTTQKGQKNSRERMKRIEEGIKELGSQILKEHPVENTQLQNEKLYLYYLQNGRDMYVDQELDINRLSDYDVDHIVPQSFLKDDSIDNKVLTRSDKARGKSDNVPSEEVVKKMKNYWRQLLNAKLITQRKFDNLTKAERGGLSELDKAGFIKRQLVETRQITKHVAQILDSRMNTKYDENDKLIREVKVITLKSKLVSDFRKDFQFYKVREINNYHHAHDAYLNAVVGTALIKKYPKLESEFVYGDYKVYDVRKMIAKSEQEIGKATAKYFFYSNIMNFFKTEITLANGEIRKRPLIETNGETGEIVWDKGRDFATVRKVLSMPQVNIVKKTEVQTGGFSKESILPKRNSDKLIARKKDWDPKKYGGFDSPTVAYSVLVVAKVEKGKSKKLKSVKELLGITIMERSSFEKNPIDFLEAKGYKEVKKDLIIKLPKYSLFELENGRKRMLASAGELQKGNELALPSKYVNFLYLASHYEKLKGSPEDNEQKQLFVEQHKHYLDEIIEQISEFSKRVILADANLDKVLSAYNKHRDKPIREQAENIIHLFTLTNLGAPAAFKYFDTTIDRKRYTSTKEVLDATLIHQSITGLYETRIDLSQLGGDGGPAPGGGGGTLNIEDEYRLHETSKGPDVPLGSTWLSDFPQAWAETGGMGLAVRQAPLIIPLKATSTPVSIKQYPMSQEARLGIKPHIQRLLDQGILVPCQSPWNTPLLPVKKPGTNDYRPVQDLREVNKRVEDIHPTVPNPYNLLSGLPPSHQWYTVLDLKDAFFCLRLHPTSQSLFAFEWRDPEMGISGQLTWTRLPQGFKNSPTLFNEALHRDLADFRIQHPDLILLQYVDDLLLAATSELDCQQGTRALLQTLGDLGYRASAKKAQICQKQVKYLGYLLKEGQRWLTEARKETVMGQPTPKTPRQLREFLGKAGFCRLFIPGFAEMAAPLYPLTKPGTLFEWGPDQQKAYQEIKQALLTAPALGLPDLTKPFELFVDEKQGYAKGVLTQKLGPWRRPVAYLSKKLDPVAAGWPPCLRMVAAIAVLTKDAGKLTMGQPLVILAPHAVEALVKQPPDRWLSNARMTHYQALLLDTDRVQFGPIVALNPATLLPLPEEGLQHDCLDILAEAHGTRPDLTDQPLPDADHTWYTDGSSFLQEGQRKAGAAVTTETEVVWAKALPAGTSAQRAELIALTQALKMAEGKKLNVYTDSRYAFATAHIHGEIYRRRGWLTSEGKEIKNKDEILALLKALFLPKRLSIIHCPGHQKGNRAEARGNRMADQAAREVATRETPETSTLLAGKRTADGSEFEKRTADGSEFESPKKKAKVE

SEQ ID NO: 2541 - protein, 2115 aa, synthetic construct
MPAAKRVKLDGGDKKYSIGLDIGTNSVGWAVITDEYKVPSKKFKVLGNTDRHSIKKNLIGALLFDSGETAEATRLKRTARRRYTRRKNRICYLQEIFSNEMAKVDDSFFHRLEESFLVEEDKKHERHPIFGNIVDEVAYHEKYPTIYHLRKKLVDSTDKADLRLIYLALAHMIKFRGHFLIEGDLNPDNSDVDKLFIQLVQTYNQLFEENPINASGVDAKAILSARLSKSRRLENLIAQLPGEKKNGLFGNLIALSLGLTPNFKSNFDLAEDAKLQLSKDTYDDDLDNLLAQIGDQYADLFLAAKNLSDAILLSDILRVNTEITKAPLSASMIKRYDEHHQDLTLLKALVRQQLPEKYKEIFFDQSKNGYAGYIDGGASQEEFYKFIKPILEKMDGTEELLVKLNREDLLRKQRTFDNGSIPHQIHLGELHAILRRQEDFYPFLKDNREKIEKILTFRIPYYVGPLARGNSRFAWMTRKSEETITPWNFEEVVDKGASAQSFIERMTNFDKNLPNEKVLPKHSLLYEYFTVYNELTKVKYVTEGMRKPAFLSGEQKKAIVDLLFKTNRKVTVKQLKEDYFKKIECFDSVEISGVEDRFNASLGTYHDLLKIIKDKDFLDNEENEDILEDIVLTLTLFEDREMIEERLKTYAHLFDDKVMKQLKRRRYTGWGRLSRKLINGIRDKQSGKTILDFLKSDGFANRNFMQLIHDDSLTFKEDIQKAQVSGQGDSLHEHIANLAGSPAIKKGILQTVKVVDELVKVMGRHKPENIVIEMARENQTTQKGQKNSRERMKRIEEGIKELGSQILKEHPVENTQLQNEKLYLYYLQNGRDMYVDQELDINRLSDYDVDHIVPQSFLKDDSIDNKVLTRSDKARGKSDNVPSEEVVKKMKNYWRQLLNAKLITQRKFDNLTKAERGGLSELDKAGFIKRQLVETRQITKHVAQILDSRMNTKYDENDKLIREVKVITLKSKLVSDFRKDFQFYKVREINNYHHAHDAYLNAVVGTALIKKYPKLESEFVYGDYKVYDVRKMIAKSEQEIGKATAKYFFYSNIMNFFKTEITLANGEIRKRPLIETNGETGEIVWDKGRDFATVRKVLSMPQVNIVKKTEVQTGGFSKESILPKRNSDKLIARKKDWDPKKYGGFDSPTVAYSVLVVAKVEKGKSKKLKSVKELLGITIMERSSFEKNPIDFLEAKGYKEVKKDLIIKLPKYSLFELENGRKRMLASAGELQKGNELALPSKYVNFLYLASHYEKLKGSPEDNEQKQLFVEQHKHYLDEIIEQISEFSKRVILADANLDKVLSAYNKHRDKPIREQAENIIHLFTLTNLGAPAAFKYFDTTIDRKRYTSTKEVLDATLIHQSITGLYETRIDLSQLGGDGGEAAAKEAAAKEAAAKEAAAKEAAAKEAAAKGGTLNIEDEYRLHETSKGPDVPLGSTWLSDFPQAWAETGGMGLAVRQAPLIIPLKATSTPVSIKQYPMSQEARLGIKPHIQRLLDQGILVPCQSPWNTPLLPVKKPGTNDYRPVQDLREVNKRVEDIHPTVPNPYNLLSGLPPSHQWYTVLDLKDAFFCLRLHPTSQSLFAFEWRDPEMGISGQLTWTRLPQGFKNSPTLFNEALHRDLADFRIQHPDLILLQYVDDLLLAATSELDCQQGTRALLQTLGDLGYRASAKKAQICQKQVKYLGYLLKEGQRWLTEARKETVMGQPTPKTPRQLREFLGKAGFCRLFIPGFAEMAAPLYPLTKPGTLFEWGPDQQKAYQEIKQALLTAPALGLPDLTKPFELFVDEKQGYAKGVLTQKLGPWRRPVAYLSKKLDPVAAGWPPCLRMVAAIAVLTKDAGKLTMGQPLVILAPHAVEALVKQPPDRWLSNARMTHYQALLLDTDRVQFGPIVALNPATLLPLPEEGLQHDCLDILAEAHGTRPDLTDQPLPDADHTWYTDGSSFLQEGQRKAGAAVTTETEVVWAKALPAGTSAQRAELIALTQALKMAEGKKLNVYTDSRYAFATAHIHGEIYRRRGWLTSEGKEIKNKDEILALLKALFLPKRLSIIHCPGHQKGNRAEARGNRMADQAAREVATRETPETSTLLAGKRTADGSEFEKRTADGSEFESPKKKAKVE

SEQ ID NO: 2542 - protein, 2096 aa, synthetic construct
MPAAKRVKLDGGDKKYSIGLDIGTNSVGWAVITDEYKVPSKKFKVLGNTDRHSIKKNLIGALLFDSGETAEATRLKRTARRRYTRRKNRICYLQEIFSNEMAKVDDSFFHRLEESFLVEEDKKHERHPIFGNIVDEVAYHEKYPTIYHLRKKLVDSTDKADLRLIYLALAHMIKFRGHFLIEGDLNPDNSDVDKLFIQLVQTYNQLFEENPINASGVDAKAILSARLSKSRRLENLIAQLPGEKKNGLFGNLIALSLGLTPNFKSNFDLAEDAKLQLSKDTYDDDLDNLLAQIGDQYADLFLAAKNLSDAILLSDILRVNTEITKAPLSASMIKRYDEHHQDLTLLKALVRQQLPEKYKEIFFDQSKNGYAGYIDGGASQEEFYKFIKPILEKMDGTEELLVKLNREDLLRKQRTFDNGSIPHQIHLGELHAILRRQEDFYPFLKDNREKIEKILTFRIPYYVGPLARGNSRFAWMTRKSEETITPWNFEEVVDKGASAQSFIERMTNFDKNLPNEKVLPKHSLLYEYFTVYNELTKVKYVTEGMRKPAFLSGEQKKAIVDLLFKTNRKVTVKQLKEDYFKKIECFDSVEISGVEDRFNASLGTYHDLLKIIKDKDFLDNEENEDILEDIVLTLTLFEDREMIEERLKTYAHLFDDKVMKQLKRRRYTGWGRLSRKLINGIRDKQSGKTILDFLKSDGFANRNFMQLIHDDSLTFKEDIQKAQVSGQGDSLHEHIANLAGSPAIKKGILQTVKVVDELVKVMGRHKPENIVIEMARENQTTQKGQKNSRERMKRIEEGIKELGSQILKEHPVENTQLQNEKLYLYYLQNGRDMYVDQELDINRLSDYDVDHIVPQSFLKDDSIDNKVLTRSDKARGKSDNVPSEEVVKKMKNYWRQLLNAKLITQRKFDNLTKAERGGLSELDKAGFIKRQLVETRQITKHVAQILDSRMNTKYDENDKLIREVKVITLKSKLVSDFRKDFQFYKVREINNYHHAHDAYLNAVVGTALIKKYPKLESEFVYGDYKVYDVRKMIAKSEQEIGKATAKYFFYSNIMNFFKTEITLANGEIRKRPLIETNGETGEIVWDKGRDFATVRKVLSMPQVNIVKKTEVQTGGFSKESILPKRNSDKLIARKKDWDPKKYGGFDSPTVAYSVLVVAKVEKGKSKKLKSVKELLGITIMERSSFEKNPIDFLEAKGYKEVKKDLIIKLPKYSLFELENGRKRMLASAGELQKGNELALPSKYVNFLYLASHYEKLKGSPEDNEQKQLFVEQHKHYLDEIIEQISEFSKRVILADANLDKVLSAYNKHRDKPIREQAENIIHLFTLTNLGAPAAFKYFDTTIDRKRYTSTKEVLDATLIHQSITGLYETRIDLSQLGGDGGPAPGSSEAAAKGGTLNIEDEYRLHETSKGPDVPLGSTWLSDFPQAWAETGGMGLAVRQAPLIIPLKATSTPVSIKQYPMSQEARLGIKPHIQRLLDQGILVPCQSPWNTPLLPVKKPGTNDYRPVQDLREVNKRVEDIHPTVPNPYNLLSGLPPSHQWYTVLDLKDAFFCLRLHPTSQSLFAFEWRDPEMGISGQLTWTRLPQGFKNSPTLFNEALHRDLADFRIQHPDLILLQYVDDLLLAATSELDCQQGTRALLQTLGDLGYRASAKKAQICQKQVKYLGYLLKEGQRWLTEARKETVMGQPTPKTPRQLREFLGKAGFCRLFIPGFAEMAAPLYPLTKPGTLFEWGPDQQKAYQEIKQALLTAPALGLPDLTKPFELFVDEKQGYAKGVLTQKLGPWRRPVAYLSKKLDPVAAGWPPCLRMVAAIAVLTKDAGKLTMGQPLVILAPHAVEALVKQPPDRWLSNARMTHYQALLLDTDRVQFGPIVALNPATLLPLPEEGLQHDCLDILAEAHGTRPDLTDQPLPDADHTWYTDGSSFLQEGQRKAGAAVTTETEVVWAKALPAGTSAQRAELIALTQALKMAEGKKLNVYTDSRYAFATAHIHGEIYRRRGWLTSEGKEIKNKDEILALLKALFLPKRLSIIHCPGHQKGNRAEARGNRMADQAAREVATRETPETSTLLAGKRTADGSEFEKRTADGSEFESPKKKAKVE

SEQ ID NO: 2543 - protein, 2094 aa, synthetic construct
MPAAKRVKLDGGDKKYSIGLDIGTNSVGWAVITDEYKVPSKKFKVLGNTDRHSIKKNLIGALLFDSGETAEATRLKRTARRRYTRRKNRICYLQEIFSNEMAKVDDSFFHRLEESFLVEEDKKHERHPIFGNIVDEVAYHEKYPTIYHLRKKLVDSTDKADLRLIYLALAHMIKFRGHFLIEGDLNPDNSDVDKLFIQLVQTYNQLFEENPINASGVDAKAILSARLSKSRRLENLIAQLPGEKKNGLFGNLIALSLGLTPNFKSNFDLAEDAKLQLSKDTYDDDLDNLLAQIGDQYADLFLAAKNLSDAILLSDILRVNTEITKAPLSASMIKRYDEHHQDLTLLKALVRQQLPEKYKEIFFDQSKNGYAGYIDGGASQEEFYKFIKPILEKMDGTEELLVKLNREDLLRKQRTFDNGSIPHQIHLGELHAILRRQEDFYPFLKDNREKIEKILTFRIPYYVGPLARGNSRFAWMTRKSEETITPWNFEEVVDKGASAQSFIERMTNFDKNLPNEKVLPKHSLLYEYFTVYNELTKVKYVTEGMRKPAFLSGEQKKAIVDLLFKTNRKVTVKQLKEDYFKKIECFDSVEISGVEDRFNASLGTYHDLLKIIKDKDFLDNEENEDILEDIVLTLTLFEDREMIEERLKTYAHLFDDKVMKQLKRRRYTGWGRLSRKLINGIRDKQSGKTILDFLKSDGFANRNFMQLIHDDSLTFKEDIQKAQVSGQGDSLHEHIANLAGSPAIKKGILQTVKVVDELVKVMGRHKPENIVIEMARENQTTQKGQKNSRERMKRIEEGIKELGSQILKEHPVENTQLQNEKLYLYYLQNGRDMYVDQELDINRLSDYDVDHIVPQSFLKDDSIDNKVLTRSDKARGKSDNVPSEEVVKKMKNYWRQLLNAKLITQRKFDNLTKAERGGLSELDKAGFIKRQLVETRQITKHVAQILDSRMNTKYDENDKLIREVKVITLKSKLVSDFRKDFQFYKVREINNYHHAHDAYLNAVVGTALIKKYPKLESEFVYGDYKVYDVRKMIAKSEQEIGKATAKYFFYSNIMNFFKTEITLANGEIRKRPLIETNGETGEIVWDKGRDFATVRKVLSMPQVNIVKKTEVQTGGFSKESILPKRNSDKLIARKKDWDPKKYGGFDSPTVAYSVLVVAKVEKGKSKKLKSVKELLGITIMERSSFEKNPIDFLEAKGYKEVKKDLIIKLPKYSLFELENGRKRMLASAGELQKGNELALPSKYVNFLYLASHYEKLKGSPEDNEQKQLFVEQHKHYLDEIIEQISEFSKRVILADANLDKVLSAYNKHRDKPIREQAENIIHLFTLTNLGAPAAFKYFDTTIDRKRYTSTKEVLDATLIHQSITGLYETRIDLSQLGGDGGGGGPAPGGSGGTLNIEDEYRLHETSKGPDVPLGSTWLSDFPQAWAETGGMGLAVRQAPLIIPLKATSTPVSIKQYPMSQEARLGIKPHIQRLLDQGILVPCQSPWNTPLLPVKKPGTNDYRPVQDLREVNKRVEDIHPTVPNPYNLLSGLPPSHQWYTVLDLKDAFFCLRLHPTSQSLFAFEWRDPEMGISGQLTWTRLPQGFKNSPTLFNEALHRDLADFRIQHPDLILLQYVDDLLLAATSELDCQQGTRALLQTLGDLGYRASAKKAQICQKQVKYLGYLLKEGQRWLTEARKETVMGQPTPKTPRQLREFLGKAGFCRLFIPGFAEMAAPLYPLTKPGTLFEWGPDQQKAYQEIKQALLTAPALGLPDLTKPFELFVDEKQGYAKGVLTQKLGPWRRPVAYLSKKLDPVAAGWPPCLRMVAAIAVLTKDAGKLTMGQPLVILAPHAVEALVKQPPDRWLSNARMTHYQALLLDTDRVQFGPIVALNPATLLPLPEEGLQHDCLDILAEAHGTRPDLTDQPLPDADHTWYTDGSSFLQEGQRKAGAAVTTETEVVWAKALPAGTSAQRAELIALTQALKMAEGKKLNVYTDSRYAFATAHIHGEIYRRRGWLTSEGKEIKNKDEILALLKALFLPKRLSIIHCPGHQKGNRAEARGNRMADQAAREVATRETPETSTLLAGKRTADGSEFEKRTADGSEFESPKKKAKVE

SEQ ID NO: 2544 - protein, 2097 aa, synthetic construct
MPAAKRVKLDGGDKKYSIGLDIGTNSVGWAVITDEYKVPSKKFKVLGNTDRHSIKKNLIGALLFDSGETAEATRLKRTARRRYTRRKNRICYLQEIFSNEMAKVDDSFFHRLEESFLVEEDKKHERHPIFGNIVDEVAYHEKYPTIYHLRKKLVDSTDKADLRLIYLALAHMIKFRGHFLIEGDLNPDNSDVDKLFIQLVQTYNQLFEENPINASGVDAKAILSARLSKSRRLENLIAQLPGEKKNGLFGNLIALSLGLTPNFKSNFDLAEDAKLQLSKDTYDDDLDNLLAQIGDQYADLFLAAKNLSDAILLSDILRVNTEITKAPLSASMIKRYDEHHQDLTLLKALVRQQLPEKYKEIFFDQSKNGYAGYIDGGASQEEFYKFIKPILEKMDGTEELLVKLNREDLLRKQRTFDNGSIPHQIHLGELHAILRRQEDFYPFLKDNREKIEKILTFRIPYYVGPLARGNSRFAWMTRKSEETITPWNFEEVVDKGASAQSFIERMTNFDKNLPNEKVLPKHSLLYEYFTVYNELTKVKYVTEGMRKPAFLSGEQKKAIVDLLFKTNRKVTVKQLKEDYFKKIECFDSVEISGVEDRFNASLGTYHDLLKIIKDKDFLDNEENEDILEDIVLTLTLFEDREMIEERLKTYAHLFDDKVMKQLKRRRYTGWGRLSRKLINGIRDKQSGKTILDFLKSDGFANRNFMQLIHDDSLTFKEDIQKAQVSGQGDSLHEHIANLAGSPAIKKGILQTVKVVDELVKVMGRHKPENIVIEMARENQTTQKGQKNSRERMKRIEEGIKELGSQILKEHPVENTQLQNEKLYLYYLQNGRDMYVDQELDINRLSDYDVDHIVPQSFLKDDSIDNKVLTRSDKARGKSDNVPSEEVVKKMKNYWRQLLNAKLITQRKFDNLTKAERGGLSELDKAGFIKRQLVETRQITKHVAQILDSRMNTKYDENDKLIREVKVITLKSKLVSDFRKDFQFYKVREINNYHHAHDAYLNAVVGTALIKKYPKLESEFVYGDYKVYDVRKMIAKSEQEIGKATAKYFFYSNIMNFFKTEITLANGEIRKRPLIETNGETGEIVWDKGRDFATVRKVLSMPQVNIVKKTEVQTGGFSKESILPKRNSDKLIARKKDWDPKKYGGFDSPTVAYSVLVVAKVEKGKSKKLKSVKELLGITIMERSSFEKNPIDFLEAKGYKEVKKDLIIKLPKYSLFELENGRKRMLASAGELQKGNELALPSKYVNFLYLASHYEKLKGSPEDNEQKQLFVEQHKHYLDEIIEQISEFSKRVILADANLDKVLSAYNKHRDKPIREQAENIIHLFTLTNLGAPAAFKYFDTTIDRKRYTSTKEVLDATLIHQSITGLYETRIDLSQLGGDGGGGSGGSGGSGGSGGTLNIEDEYRLHETSKGPDVPLGSTWLSDFPQAWAETGGMGLAVRQAPLIIPLKATSTPVSIKQYPMSQEARLGIKPHIQRLLDQGILVPCQSPWNTPLLPVKKPGTNDYRPVQDLREVNKRVEDIHPTVPNPYNLLSGLPPSHQWYTVLDLKDAFFCLRLHPTSQSLFAFEWRDPEMGISGQLTWTRLPQGFKNSPTLFNEALHRDLADFRIQHPDLILLQYVDDLLLAATSELDCQQGTRALLQTLGDLGYRASAKKAQICQKQVKYLGYLLKEGQRWLTEARKETVMGQPTPKTPRQLREFLGKAGFCRLFIPGFAEMAAPLYPLTKPGTLFEWGPDQQKAYQEIKQALLTAPALGLPDLTKPFELFVDEKQGYAKGVLTQKLGPWRRPVAYLSKKLDPVAAGWPPCLRMVAAIAVLTKDAGKLTMGQPLVILAPHAVEALVKQPPDRWLSNARMTHYQALLLDTDRVQFGPIVALNPATLLPLPEEGLQHDCLDILAEAHGTRPDLTDQPLPDADHTWYTDGSSFLQEGQRKAGAAVTTETEVVWAKALPAGTSAQRAELIALTQALKMAEGKKLNVYTDSRYAFATAHIHGEIYRRRGWLTSEGKEIKNKDEILALLKALFLPKRLSIIHCPGHQKGNRAEARGNRMADQAAREVATRETPETSTLLAGKRTADGSEFEKRTADGSEFESPKKKAKVE

SEQ ID NO: 2545 - protein, 2094 aa, synthetic construct
MPAAKRVKLDGGDKKYSIGLDIGTNSVGWAVITDEYKVPSKKFKVLGNTDRHSIKKNLIGALLFDSGETAEATRLKRTARRRYTRRKNRICYLQEIFSNEMAKVDDSFFHRLEESFLVEEDKKHERHPIFGNIVDEVAYHEKYPTIYHLRKKLVDSTDKADLRLIYLALAHMIKFRGHFLIEGDLNPDNSDVDKLFIQLVQTYNQLFEENPINASGVDAKAILSARLSKSRRLENLIAQLPGEKKNGLFGNLIALSLGLTPNFKSNFDLAEDAKLQLSKDTYDDDLDNLLAQIGDQYADLFLAAKNLSDAILLSDILRVNTEITKAPLSASMIKRYDEHHQDLTLLKALVRQQLPEKYKEIFFDQSKNGYAGYIDGGASQEEFYKFIKPILEKMDGTEELLVKLNREDLLRKQRTFDNGSIPHQIHLGELHAILRRQEDFYPFLKDNREKIEKILTFRIPYYVGPLARGNSRFAWMTRKSEETITPWNFEEVVDKGASAQSFIERMTNFDKNLPNEKVLPKHSLLYEYFTVYNELTKVKYVTEGMRKPAFLSGEQKKAIVDLLFKTNRKVTVKQLKEDYFKKIECFDSVEISGVEDRFNASLGTYHDLLKIIKDKDFLDNEENEDILEDIVLTLTLFEDREMIEERLKTYAHLFDDKVMKQLKRRRYTGWGRLSRKLINGIRDKQSGKTILDFLKSDGFANRNFMQLIHDDSLTFKEDIQKAQVSGQGDSLHEHIANLAGSPAIKKGILQTVKVVDELVKVMGRHKPENIVIEMARENQTTQKGQKNSRERMKRIEEGIKELGSQILKEHPVENTQLQNEKLYLYYLQNGRDMYVDQELDINRLSDYDVDHIVPQSFLKDDSIDNKVLTRSDKARGKSDNVPSEEVVKKMKNYWRQLLNAKLITQRKFDNLTKAERGGLSELDKAGFIKRQLVETRQITKHVAQILDSRMNTKYDENDKLIREVKVITLKSKLVSDFRKDFQFYKVREINNYHHAHDAYLNAVVGTALIKKYPKLESEFVYGDYKVYDVRKMIAKSEQEIGKATAKYFFYSNIMNFFKTEITLANGEIRKRPLIETNGETGEIVWDKGRDFATVRKVLSMPQVNIVKKTEVQTGGFSKESILPKRNSDKLIARKKDWDPKKYGGFDSPTVAYSVLVVAKVEKGKSKKLKSVKELLGITIMERSSFEKNPIDFLEAKGYKEVKKDLIIKLPKYSLFELENGRKRMLASAGELQKGNELALPSKYVNFLYLASHYEKLKGSPEDNEQKQLFVEQHKHYLDEIIEQISEFSKRVILADANLDKVLSAYNKHRDKPIREQAENIIHLFTLTNLGAPAAFKYFDTTIDRKRYTSTKEVLDATLIHQSITGLYETRIDLSQLGGDGGGGSGSSGGGGGTLNIEDEYRLHETSKGPDVPLGSTWLSDFPQAWAETGGMGLAVRQAPLIIPLKATSTPVSIKQYPMSQEARLGIKPHIQRLLDQGILVPCQSPWNTPLLPVKKPGTNDYRPVQDLREVNKRVEDIHPTVPNPYNLLSGLPPSHQWYTVLDLKDAFFCLRLHPTSQSLFAFEWRDPEMGISGQLTWTRLPQGFKNSPTLFNEALHRDLADFRIQHPDLILLQYVDDLLLAATSELDCQQGTRALLQTLGDLGYRASAKKAQICQKQVKYLGYLLKEGQRWLTEARKETVMGQPTPKTPRQLREFLGKAGFCRLFIPGFAEMAAPLYPLTKPGTLFEWGPDQQKAYQEIKQALLTAPALGLPDLTKPFELFVDEKQGYAKGVLTQKLGPWRRPVAYLSKKLDPVAAGWPPCLRMVAAIAVLTKDAGKLTMGQPLVILAPHAVEALVKQPPDRWLSNARMTHYQALLLDTDRVQFGPIVALNPATLLPLPEEGLQHDCLDILAEAHGTRPDLTDQPLPDADHTWYTDGSSFLQEGQRKAGAAVTTETEVVWAKALPAGTSAQRAELIALTQALKMAEGKKLNVYTDSRYAFATAHIHGEIYRRRGWLTSEGKEIKNKDEILALLKALFLPKRLSIIHCPGHQKGNRAEARGNRMADQAAREVATRETPETSTLLAGKRTADGSEFEKRTADGSEFESPKKKAKVE

SEQ ID NO: 2546 - protein, 2091 aa, synthetic construct
MPAAKRVKLDGGDKKYSIGLDIGTNSVGWAVITDEYKVPSKKFKVLGNTDRHSIKKNLIGALLFDSGETAEATRLKRTARRRYTRRKNRICYLQEIFSNEMAKVDDSFFHRLEESFLVEEDKKHERHPIFGNIVDEVAYHEKYPTIYHLRKKLVDSTDKADLRLIYLALAHMIKFRGHFLIEGDLNPDNSDVDKLFIQLVQTYNQLFEENPINASGVDAKAILSARLSKSRRLENLIAQLPGEKKNGLFGNLIALSLGLTPNFKSNFDLAEDAKLQLSKDTYDDDLDNLLAQIGDQYADLFLAAKNLSDAILLSDILRVNTEITKAPLSASMIKRYDEHHQDLTLLKALVRQQLPEKYKEIFFDQSKNGYAGYIDGGASQEEFYKFIKPILEKMDGTEELLVKLNREDLLRKQRTFDNGSIPHQIHLGELHAILRRQEDFYPFLKDNREKIEKILTFRIPYYVGPLARGNSRFAWMTRKSEETITPWNFEEVVDKGASAQSFIERMTNFDKNLPNEKVLPKHSLLYEYFTVYNELTKVKYVTEGMRKPAFLSGEQKKAIVDLLFKTNRKVTVKQLKEDYFKKIECFDSVEISGVEDRFNASLGTYHDLLKIIKDKDFLDNEENEDILEDIVLTLTLFEDREMIEERLKTYAHLFDDKVMKQLKRRRYTGWGRLSRKLINGIRDKQSGKTILDFLKSDGFANRNFMQLIHDDSLTFKEDIQKAQVSGQGDSLHEHIANLAGSPAIKKGILQTVKVVDELVKVMGRHKPENIVIEMARENQTTQKGQKNSRERMKRIEEGIKELGSQILKEHPVENTQLQNEKLYLYYLQNGRDMYVDQELDINRLSDYDVDHIVPQSFLKDDSIDNKVLTRSDKARGKSDNVPSEEVVKKMKNYWRQLLNAKLITQRKFDNLTKAERGGLSELDKAGFIKRQLVETRQITKHVAQILDSRMNTKYDENDKLIREVKVITLKSKLVSDFRKDFQFYKVREINNYHHAHDAYLNAVVGTALIKKYPKLESEFVYGDYKVYDVRKMIAKSEQEIGKATAKYFFYSNIMNFFKTEITLANGEIRKRPLIETNGETGEIVWDKGRDFATVRKVLSMPQVNIVKKTEVQTGGFSKESILPKRNSDKLIARKKDWDPKKYGGFDSPTVAYSVLVVAKVEKGKSKKLKSVKELLGITIMERSSFEKNPIDFLEAKGYKEVKKDLIIKLPKYSLFELENGRKRMLASAGELQKGNELALPSKYVNFLYLASHYEKLKGSPEDNEQKQLFVEQHKHYLDEIIEQISEFSKRVILADANLDKVLSAYNKHRDKPIREQAENIIHLFTLTNLGAPAAFKYFDTTIDRKRYTSTKEVLDATLIHQSITGLYETRIDLSQLGGDGGPAPGGSGGTLNIEDEYRLHETSKGPDVPLGSTWLSDFPQAWAETGGMGLAVRQAPLIIPLKATSTPVSIKQYPMSQEARLGIKPHIQRLLDQGILVPCQSPWNTPLLPVKKPGTNDYRPVQDLREVNKRVEDIHPTVPNPYNLLSGLPPSHQWYTVLDLKDAFFCLRLHPTSQSLFAFEWRDPEMGISGQLTWTRLPQGFKNSPTLFNEALHRDLADFRIQHPDLILLQYVDDLLLAATSELDCQQGTRALLQTLGDLGYRASAKKAQICQKQVKYLGYLLKEGQRWLTEARKETVMGQPTPKTPRQLREFLGKAGFCRLFIPGFAEMAAPLYPLTKPGTLFEWGPDQQKAYQEIKQALLTAPALGLPDLTKPFELFVDEKQGYAKGVLTQKLGPWRRPVAYLSKKLDPVAAGWPPCLRMVAAIAVLTKDAGKLTMGQPLVILAPHAVEALVKQPPDRWLSNARMTHYQALLLDTDRVQFGPIVALNPATLLPLPEEGLQHDCLDILAEAHGTRPDLTDQPLPDADHTWYTDGSSFLQEGQRKAGAAVTTETEVVWAKALPAGTSAQRAELIALTQALKMAEGKKLNVYTDSRYAFATAHIHGEIYRRRGWLTSEGKEIKNKDEILALLKALFLPKRLSIIHCPGHQKGNRAEARGNRMADQAAREVATRETPETSTLLAGKRTADGSEFEKRTADGSEFESPKKKAKVE

SEQ ID NO: 2547 - protein, 2091 aa, synthetic construct
MPAAKRVKLDGGDKKYSIGLDIGTNSVGWAVITDEYKVPSKKFKVLGNTDRHSIKKNLIGALLFDSGETAEATRLKRTARRRYTRRKNRICYLQEIFSNEMAKVDDSFFHRLEESFLVEEDKKHERHPIFGNIVDEVAYHEKYPTIYHLRKKLVDSTDKADLRLIYLALAHMIKFRGHFLIEGDLNPDNSDVDKLFIQLVQTYNQLFEENPINASGVDAKAILSARLSKSRRLENLIAQLPGEKKNGLFGNLIALSLGLTPNFKSNFDLAEDAKLQLSKDTYDDDLDNLLAQIGDQYADLFLAAKNLSDAILLSDILRVNTEITKAPLSASMIKRYDEHHQDLTLLKALVRQQLPEKYKEIFFDQSKNGYAGYIDGGASQEEFYKFIKPILEKMDGTEELLVKLNREDLLRKQRTFDNGSIPHQIHLGELHAILRRQEDFYPFLKDNREKIEKILTFRIPYYVGPLARGNSRFAWMTRKSEETITPWNFEEVVDKGASAQSFIERMTNFDKNLPNEKVLPKHSLLYEYFTVYNELTKVKYVTEGMRKPAFLSGEQKKAIVDLLFKTNRKVTVKQLKEDYFKKIECFDSVEISGVEDRFNASLGTYHDLLKIIKDKDFLDNEENEDILEDIVLTLTLFEDREMIEERLKTYAHLFDDKVMKQLKRRRYTGWGRLSRKLINGIRDKQSGKTILDFLKSDGFANRNFMQLIHDDSLTFKEDIQKAQVSGQGDSLHEHIANLAGSPAIKKGILQTVKVVDELVKVMGRHKPENIVIEMARENQTTQKGQKNSRERMKRIEEGIKELGSQILKEHPVENTQLQNEKLYLYYLQNGRDMYVDQELDINRLSDYDVDHIVPQSFLKDDSIDNKVLTRSDKARGKSDNVPSEEVVKKMKNYWRQLLNAKLITQRKFDNLTKAERGGLSELDKAGFIKRQLVETRQITKHVAQILDSRMNTKYDENDKLIREVKVITLKSKLVSDFRKDFQFYKVREINNYHHAHDAYLNAVVGTALIKKYPKLESEFVYGDYKVYDVRKMIAKSEQEIGKATAKYFFYSNIMNFFKTEITLANGEIRKRPLIETNGETGEIVWDKGRDFATVRKVLSMPQVNIVKKTEVQTGGFSKESILPKRNSDKLIARKKDWDPKKYGGFDSPTVAYSVLVVAKVEKGKSKKLKSVKELLGITIMERSSFEKNPIDFLEAKGYKEVKKDLIIKLPKYSLFELENGRKRMLASAGELQKGNELALPSKYVNFLYLASHYEKLKGSPEDNEQKQLFVEQHKHYLDEIIEQISEFSKRVILADANLDKVLSAYNKHRDKPIREQAENIIHLFTLTNLGAPAAFKYFDTTIDRKRYTSTKEVLDATLIHQSITGLYETRIDLSQLGGDGGGGGPAPGGTLNIEDEYRLHETSKGPDVPLGSTWLSDFPQAWAETGGMGLAVRQAPLIIPLKATSTPVSIKQYPMSQEARLGIKPHIQRLLDQGILVPCQSPWNTPLLPVKKPGTNDYRPVQDLREVNKRVEDIHPTVPNPYNLLSGLPPSHQWYTVLDLKDAFFCLRLHPTSQSLFAFEWRDPEMGISGQLTWTRLPQGFKNSPTLFNEALHRDLADFRIQHPDLILLQYVDDLLLAATSELDCQQGTRALLQTLGDLGYRASAKKAQICQKQVKYLGYLLKEGQRWLTEARKETVMGQPTPKTPRQLREFLGKAGFCRLFIPGFAEMAAPLYPLTKPGTLFEWGPDQQKAYQEIKQALLTAPALGLPDLTKPFELFVDEKQGYAKGVLTQKLGPWRRPVAYLSKKLDPVAAGWPPCLRMVAAIAVLTKDAGKLTMGQPLVILAPHAVEALVKQPPDRWLSNARMTHYQALLLDTDRVQFGPIVALNPATLLPLPEEGLQHDCLDILAEAHGTRPDLTDQPLPDADHTWYTDGSSFLQEGQRKAGAAVTTETEVVWAKALPAGTSAQRAELIALTQALKMAEGKKLNVYTDSRYAFATAHIHGEIYRRRGWLTSEGKEIKNKDEILALLKALFLPKRLSIIHCPGHQKGNRAEARGNRMADQAAREVATRETPETSTLLAGKRTADGSEFEKRTADGSEFESPKKKAKVE

SEQ ID NO: 2548 - protein, 2096 aa, synthetic construct
MPAAKRVKLDGGDKKYSIGLDIGTNSVGWAVITDEYKVPSKKFKVLGNTDRHSIKKNLIGALLFDSGETAEATRLKRTARRRYTRRKNRICYLQEIFSNEMAKVDDSFFHRLEESFLVEEDKKHERHPIFGNIVDEVAYHEKYPTIYHLRKKLVDSTDKADLRLIYLALAHMIKFRGHFLIEGDLNPDNSDVDKLFIQLVQTYNQLFEENPINASGVDAKAILSARLSKSRRLENLIAQLPGEKKNGLFGNLIALSLGLTPNFKSNFDLAEDAKLQLSKDTYDDDLDNLLAQIGDQYADLFLAAKNLSDAILLSDILRVNTEITKAPLSASMIKRYDEHHQDLTLLKALVRQQLPEKYKEIFFDQSKNGYAGYIDGGASQEEFYKFIKPILEKMDGTEELLVKLNREDLLRKQRTFDNGSIPHQIHLGELHAILRRQEDFYPFLKDNREKIEKILTFRIPYYVGPLARGNSRFAWMTRKSEETITPWNFEEVVDKGASAQSFIERMTNFDKNLPNEKVLPKHSLLYEYFTVYNELTKVKYVTEGMRKPAFLSGEQKKAIVDLLFKTNRKVTVKQLKEDYFKKIECFDSVEISGVEDRFNASLGTYHDLLKIIKDKDFLDNEENEDILEDIVLTLTLFEDREMIEERLKTYAHLFDDKVMKQLKRRRYTGWGRLSRKLINGIRDKQSGKTILDFLKSDGFANRNFMQLIHDDSLTFKEDIQKAQVSGQGDSLHEHIANLAGSPAIKKGILQTVKVVDELVKVMGRHKPENIVIEMARENQTTQKGQKNSRERMKRIEEGIKELGSQILKEHPVENTQLQNEKLYLYYLQNGRDMYVDQELDINRLSDYDVDHIVPQSFLKDDSIDNKVLTRSDKARGKSDNVPSEEVVKKMKNYWRQLLNAKLITQRKFDNLTKAERGGLSELDKAGFIKRQLVETRQITKHVAQILDSRMNTKYDENDKLIREVKVITLKSKLVSDFRKDFQFYKVREINNYHHAHDAYLNAVVGTALIKKYPKLESEFVYGDYKVYDVRKMIAKSEQEIGKATAKYFFYSNIMNFFKTEITLANGEIRKRPLIETNGETGEIVWDKGRDFATVRKVLSMPQVNIVKKTEVQTGGFSKESILPKRNSDKLIARKKDWDPKKYGGFDSPTVAYSVLVVAKVEKGKSKKLKSVKELLGITIMERSSFEKNPIDFLEAKGYKEVKKDLIIKLPKYSLFELENGRKRMLASAGELQKGNELALPSKYVNFLYLASHYEKLKGSPEDNEQKQLFVEQHKHYLDEIIEQISEFSKRVILADANLDKVLSAYNKHRDKPIREQAENIIHLFTLTNLGAPAAFKYFDTTIDRKRYTSTKEVLDATLIHQSITGLYETRIDLSQLGGDGGEAAAKGGSGSSGGTLNIEDEYRLHETSKGPDVPLGSTWLSDFPQAWAETGGMGLAVRQAPLIIPLKATSTPVSIKQYPMSQEARLGIKPHIQRLLDQGILVPCQSPWNTPLLPVKKPGTNDYRPVQDLREVNKRVEDIHPTVPNPYNLLSGLPPSHQWYTVLDLKDAFFCLRLHPTSQSLFAFEWRDPEMGISGQLTWTRLPQGFKNSPTLFNEALHRDLADFRIQHPDLILLQYVDDLLLAATSELDCQQGTRALLQTLGDLGYRASAKKAQICQKQVKYLGYLLKEGQRWLTEARKETVMGQPTPKTPRQLREFLGKAGFCRLFIPGFAEMAAPLYPLTKPGTLFEWGPDQQKAYQEIKQALLTAPALGLPDLTKPFELFVDEKQGYAKGVLTQKLGPWRRPVAYLSKKLDPVAAGWPPCLRMVAAIAVLTKDAGKLTMGQPLVILAPHAVEALVKQPPDRWLSNARMTHYQALLLDTDRVQFGPIVALNPATLLPLPEEGLQHDCLDILAEAHGTRPDLTDQPLPDADHTWYTDGSSFLQEGQRKAGAAVTTETEVVWAKALPAGTSAQRAELIALTQALKMAEGKKLNVYTDSRYAFATAHIHGEIYRRRGWLTSEGKEIKNKDEILALLKALFLPKRLSIIHCPGHQKGNRAEARGNRMADQAAREVATRETPETSTLLAGKRTADGSEFEKRTADGSEFESPKKKAKVE

SEQ ID NO: 2549 - protein, 2093 aa, synthetic construct
MPAAKRVKLDGGDKKYSIGLDIGTNSVGWAVITDEYKVPSKKFKVLGNTDRHSIKKNLIGALLFDSGETAEATRLKRTARRRYTRRKNRICYLQEIFSNEMAKVDDSFFHRLEESFLVEEDKKHERHPIFGNIVDEVAYHEKYPTIYHLRKKLVDSTDKADLRLIYLALAHMIKFRGHFLIEGDLNPDNSDVDKLFIQLVQTYNQLFEENPINASGVDAKAILSARLSKSRRLENLIAQLPGEKKNGLFGNLIALSLGLTPNFKSNFDLAEDAKLQLSKDTYDDDLDNLLAQIGDQYADLFLAAKNLSDAILLSDILRVNTEITKAPLSASMIKRYDEHHQDLTLLKALVRQQLPEKYKEIFFDQSKNGYAGYIDGGASQEEFYKFIKPILEKMDGTEELLVKLNREDLLRKQRTFDNGSIPHQIHLGELHAILRRQEDFYPFLKDNREKIEKILTFRIPYYVGPLARGNSRFAWMTRKSEETITPWNFEEVVDKGASAQSFIERMTNFDKNLPNEKVLPKHSLLYEYFTVYNELTKVKYVTEGMRKPAFLSGEQKKAIVDLLFKTNRKVTVKQLKEDYFKKIECFDSVEISGVEDRFNASLGTYHDLLKIIKDKDFLDNEENEDILEDIVLTLTLFEDREMIEERLKTYAHLFDDKVMKQLKRRRYTGWGRLSRKLINGIRDKQSGKTILDFLKSDGFANRNFMQLIHDDSLTFKEDIQKAQVSGQGDSLHEHIANLAGSPAIKKGILQTVKVVDELVKVMGRHKPENIVIEMARENQTTQKGQKNSRERMKRIEEGIKELGSQILKEHPVENTQLQNEKLYLYYLQNGRDMYVDQELDINRLSDYDVDHIVPQSFLKDDSIDNKVLTRSDKARGKSDNVPSEEVVKKMKNYWRQLLNAKLITQRKFDNLTKAERGGLSELDKAGFIKRQLVETRQITKHVAQILDSRMNTKYDENDKLIREVKVITLKSKLVSDFRKDFQFYKVREINNYHHAHDAYLNAVVGTALIKKYPKLESEFVYGDYKVYDVRKMIAKSEQEIGKATAKYFFYSNIMNFFKTEITLANGEIRKRPLIETNGETGEIVWDKGRDFATVRKVLSMPQVNIVKKTEVQTGGFSKESILPKRNSDKLIARKKDWDPKKYGGFDSPTVAYSVLVVAKVEKGKSKKLKSVKELLGITIMERSSFEKNPIDFLEAKGYKEVKKDLIIKLPKYSLFELENGRKRMLASAGELQKGNELALPSKYVNFLYLASHYEKLKGSPEDNEQKQLFVEQHKHYLDEIIEQISEFSKRVILADANLDKVLSAYNKHRDKPIREQAENIIHLFTLTNLGAPAAFKYFDTTIDRKRYTSTKEVLDATLIHQSITGLYETRIDLSQLGGDGGGGGGGGGGGGTLNIEDEYRLHETSKGPDVPLGSTWLSDFPQAWAETGGMGLAVRQAPLIIPLKATSTPVSIKQYPMSQEARLGIKPHIQRLLDQGILVPCQSPWNTPLLPVKKPGTNDYRPVQDLREVNKRVEDIHPTVPNPYNLLSGLPPSHQWYTVLDLKDAFFCLRLHPTSQSLFAFEWRDPEMGISGQLTWTRLPQGFKNSPTLFNEALHRDLADFRIQHPDLILLQYVDDLLLAATSELDCQQGTRALLQTLGDLGYRASAKKAQICQKQVKYLGYLLKEGQRWLTEARKETVMGQPTPKTPRQLREFLGKAGFCRLFIPGFAEMAAPLYPLTKPGTLFEWGPDQQKAYQEIKQALLTAPALGLPDLTKPFELFVDEKQGYAKGVLTQKLGPWRRPVAYLSKKLDPVAAGWPPCLRMVAAIAVLTKDAGKLTMGQPLVILAPHAVEALVKQPPDRWLSNARMTHYQALLLDTDRVQFGPIVALNPATLLPLPEEGLQHDCLDILAEAHGTRPDLTDQPLPDADHTWYTDGSSFLQEGQRKAGAAVTTETEVVWAKALPAGTSAQRAELIALTQALKMAEGKKLNVYTDSRYAFATAHIHGEIYRRRGWLTSEGKEIKNKDEILALLKALFLPKRLSIIHCPGHQKGNRAEARGNRMADQAAREVATRETPETSTLLAGKRTADGSEFEKRTADGSEFESPKKKAKVE

SEQ ID NO: 2550 - protein, 2096 aa, synthetic construct
MPAAKRVKLDGGDKKYSIGLDIGTNSVGWAVITDEYKVPSKKFKVLGNTDRHSIKKNLIGALLFDSGETAEATRLKRTARRRYTRRKNRICYLQEIFSNEMAKVDDSFFHRLEESFLVEEDKKHERHPIFGNIVDEVAYHEKYPTIYHLRKKLVDSTDKADLRLIYLALAHMIKFRGHFLIEGDLNPDNSDVDKLFIQLVQTYNQLFEENPINASGVDAKAILSARLSKSRRLENLIAQLPGEKKNGLFGNLIALSLGLTPNFKSNFDLAEDAKLQLSKDTYDDDLDNLLAQIGDQYADLFLAAKNLSDAILLSDILRVNTEITKAPLSASMIKRYDEHHQDLTLLKALVRQQLPEKYKEIFFDQSKNGYAGYIDGGASQEEFYKFIKPILEKMDGTEELLVKLNREDLLRKQRTFDNGSIPHQIHLGELHAILRRQEDFYPFLKDNREKIEKILTFRIPYYVGPLARGNSRFAWMTRKSEETITPWNFEEVVDKGASAQSFIERMTNFDKNLPNEKVLPKHSLLYEYFTVYNELTKVKYVTEGMRKPAFLSGEQKKAIVDLLFKTNRKVTVKQLKEDYFKKIECFDSVEISGVEDRFNASLGTYHDLLKIIKDKDFLDNEENEDILEDIVLTLTLFEDREMIEERLKTYAHLFDDKVMKQLKRRRYTGWGRLSRKLINGIRDKQSGKTILDFLKSDGFANRNFMQLIHDDSLTFKEDIQKAQVSGQGDSLHEHIANLAGSPAIKKGILQTVKVVDELVKVMGRHKPENIVIEMARENQTTQKGQKNSRERMKRIEEGIKELGSQILKEHPVENTQLQNEKLYLYYLQNGRDMYVDQELDINRLSDYDVDHIVPQSFLKDDSIDNKVLTRSDKARGKSDNVPSEEVVKKMKNYWRQLLNAKLITQRKFDNLTKAERGGLSELDKAGFIKRQLVETRQITKHVAQILDSRMNTKYDENDKLIREVKVITLKSKLVSDFRKDFQFYKVREINNYHHAHDAYLNAVVGTALIKKYPKLESEFVYGDYKVYDVRKMIAKSEQEIGKATAKYFFYSNIMNFFKTEITLANGEIRKRPLIETNGETGEIVWDKGRDFATVRKVLSMPQVNIVKKTEVQTGGFSKESILPKRNSDKLIARKKDWDPKKYGGFDSPTVAYSVLVVAKVEKGKSKKLKSVKELLGITIMERSSFEKNPIDFLEAKGYKEVKKDLIIKLPKYSLFELENGRKRMLASAGELQKGNELALPSKYVNFLYLASHYEKLKGSPEDNEQKQLFVEQHKHYLDEIIEQISEFSKRVILADANLDKVLSAYNKHRDKPIREQAENIIHLFTLTNLGAPAAFKYFDTTIDRKRYTSTKEVLDATLIHQSITGLYETRIDLSQLGGDGGGSSEAAAKGGGGGTLNIEDEYRLHETSKGPDVPLGSTWLSDFPQAWAETGGMGLAVRQAPLIIPLKATSTPVSIKQYPMSQEARLGIKPHIQRLLDQGILVPCQSPWNTPLLPVKKPGTNDYRPVQDLREVNKRVEDIHPTVPNPYNLLSGLPPSHQWYTVLDLKDAFFCLRLHPTSQSLFAFEWRDPEMGISGQLTWTRLPQGFKNSPTLFNEALHRDLADFRIQHPDLILLQYVDDLLLAATSELDCQQGTRALLQTLGDLGYRASAKKAQICQKQVKYLGYLLKEGQRWLTEARKETVMGQPTPKTPRQLREFLGKAGFCRLFIPGFAEMAAPLYPLTKPGTLFEWGPDQQKAYQEIKQALLTAPALGLPDLTKPFELFVDEKQGYAKGVLTQKLGPWRRPVAYLSKKLDPVAAGWPPCLRMVAAIAVLTKDAGKLTMGQPLVILAPHAVEALVKQPPDRWLSNARMTHYQALLLDTDRVQFGPIVALNPATLLPLPEEGLQHDCLDILAEAHGTRPDLTDQPLPDADHTWYTDGSSFLQEGQRKAGAAVTTETEVVWAKALPAGTSAQRAELIALTQALKMAEGKKLNVYTDSRYAFATAHIHGEIYRRRGWLTSEGKEIKNKDEILALLKALFLPKRLSIIHCPGHQKGNRAEARGNRMADQAAREVATRETPETSTLLAGKRTADGSEFEKRTADGSEFESPKKKAKVE

SEQ ID NO: 2551 - protein, 2096 aa, synthetic construct
MPAAKRVKLDGGDKKYSIGLDIGTNSVGWAVITDEYKVPSKKFKVLGNTDRHSIKKNLIGALLFDSGETAEATRLKRTARRRYTRRKNRICYLQEIFSNEMAKVDDSFFHRLEESFLVEEDKKHERHPIFGNIVDEVAYHEKYPTIYHLRKKLVDSTDKADLRLIYLALAHMIKFRGHFLIEGDLNPDNSDVDKLFIQLVQTYNQLFEENPINASGVDAKAILSARLSKSRRLENLIAQLPGEKKNGLFGNLIALSLGLTPNFKSNFDLAEDAKLQLSKDTYDDDLDNLLAQIGDQYADLFLAAKNLSDAILLSDILRVNTEITKAPLSASMIKRYDEHHQDLTLLKALVRQQLPEKYKEIFFDQSKNGYAGYIDGGASQEEFYKFIKPILEKMDGTEELLVKLNREDLLRKQRTFDNGSIPHQIHLGELHAILRRQEDFYPFLKDNREKIEKILTFRIPYYVGPLARGNSRFAWMTRKSEETITPWNFEEVVDKGASAQSFIERMTNFDKNLPNEKVLPKHSLLYEYFTVYNELTKVKYVTEGMRKPAFLSGEQKKAIVDLLFKTNRKVTVKQLKEDYFKKIECFDSVEISGVEDRFNASLGTYHDLLKIIKDKDFLDNEENEDILEDIVLTLTLFEDREMIEERLKTYAHLFDDKVMKQLKRRRYTGWGRLSRKLINGIRDKQSGKTILDFLKSDGFANRNFMQLIHDDSLTFKEDIQKAQVSGQGDSLHEHIANLAGSPAIKKGILQTVKVVDELVKVMGRHKPENIVIEMARENQTTQKGQKNSRERMKRIEEGIKELGSQILKEHPVENTQLQNEKLYLYYLQNGRDMYVDQELDINRLSDYDVDHIVPQSFLKDDSIDNKVLTRSDKARGKSDNVPSEEVVKKMKNYWRQLLNAKLITQRKFDNLTKAERGGLSELDKAGFIKRQLVETRQITKHVAQILDSRMNTKYDENDKLIREVKVITLKSKLVSDFRKDFQFYKVREINNYHHAHDAYLNAVVGTALIKKYPKLESEFVYGDYKVYDVRKMIAKSEQEIGKATAKYFFYSNIMNFFKTEITLANGEIRKRPLIETNGETGEIVWDKGRDFATVRKVLSMPQVNIVKKTEVQTGGFSKESILPKRNSDKLIARKKDWDPKKYGGFDSPTVAYSVLVVAKVEKGKSKKLKSVKELLGITIMERSSFEKNPIDFLEAKGYKEVKKDLIIKLPKYSLFELENGRKRMLASAGELQKGNELALPSKYVNFLYLASHYEKLKGSPEDNEQKQLFVEQHKHYLDEIIEQISEFSKRVILADANLDKVLSAYNKHRDKPIREQAENIIHLFTLTNLGAPAAFKYFDTTIDRKRYTSTKEVLDATLIHQSITGLYETRIDLSQLGGDGGEAAAKGGSGGGGGTLNIEDEYRLHETSKGPDVPLGSTWLSDFPQAWAETGGMGLAVRQAPLIIPLKATSTPVSIKQYPMSQEARLGIKPHIQRLLDQGILVPCQSPWNTPLLPVKKPGTNDYRPVQDLREVNKRVEDIHPTVPNPYNLLSGLPPSHQWYTVLDLKDAFFCLRLHPTSQSLFAFEWRDPEMGISGQLTWTRLPQGFKNSPTLFNEALHRDLADFRIQHPDLILLQYVDDLLLAATSELDCQQGTRALLQTLGDLGYRASAKKAQICQKQVKYLGYLLKEGQRWLTEARKETVMGQPTPKTPRQLREFLGKAGFCRLFIPGFAEMAAPLYPLTKPGTLFEWGPDQQKAYQEIKQALLTAPALGLPDLTKPFELFVDEKQGYAKGVLTQKLGPWRRPVAYLSKKLDPVAAGWPPCLRMVAAIAVLTKDAGKLTMGQPLVILAPHAVEALVKQPPDRWLSNARMTHYQALLLDTDRVQFGPIVALNPATLLPLPEEGLQHDCLDILAEAHGTRPDLTDQPLPDADHTWYTDGSSFLQEGQRKAGAAVTTETEVVWAKALPAGTSAQRAELIALTQALKMAEGKKLNVYTDSRYAFATAHIHGEIYRRRGWLTSEGKEIKNKDEILALLKALFLPKRLSIIHCPGHQKGNRAEARGNRMADQAAREVATRETPETSTLLAGKRTADGSEFEKRTADGSEFESPKKKAKVE

SEQ ID NO: 2552 - protein, 2094 aa, synthetic construct
MPAAKRVKLDGGDKKYSIGLDIGTNSVGWAVITDEYKVPSKKFKVLGNTDRHSIKKNLIGALLFDSGETAEATRLKRTARRRYTRRKNRICYLQEIFSNEMAKVDDSFFHRLEESFLVEEDKKHERHPIFGNIVDEVAYHEKYPTIYHLRKKLVDSTDKADLRLIYLALAHMIKFRGHFLIEGDLNPDNSDVDKLFIQLVQTYNQLFEENPINASGVDAKAILSARLSKSRRLENLIAQLPGEKKNGLFGNLIALSLGLTPNFKSNFDLAEDAKLQLSKDTYDDDLDNLLAQIGDQYADLFLAAKNLSDAILLSDILRVNTEITKAPLSASMIKRYDEHHQDLTLLKALVRQQLPEKYKEIFFDQSKNGYAGYIDGGASQEEFYKFIKPILEKMDGTEELLVKLNREDLLRKQRTFDNGSIPHQIHLGELHAILRRQEDFYPFLKDNREKIEKILTFRIPYYVGPLARGNSRFAWMTRKSEETITPWNFEEVVDKGASAQSFIERMTNFDKNLPNEKVLPKHSLLYEYFTVYNELTKVKYVTEGMRKPAFLSGEQKKAIVDLLFKTNRKVTVKQLKEDYFKKIECFDSVEISGVEDRFNASLGTYHDLLKIIKDKDFLDNEENEDILEDIVLTLTLFEDREMIEERLKTYAHLFDDKVMKQLKRRRYTGWGRLSRKLINGIRDKQSGKTILDFLKSDGFANRNFMQLIHDDSLTFKEDIQKAQVSGQGDSLHEHIANLAGSPAIKKGILQTVKVVDELVKVMGRHKPENIVIEMARENQTTQKGQKNSRERMKRIEEGIKELGSQILKEHPVENTQLQNEKLYLYYLQNGRDMYVDQELDINRLSDYDVDHIVPQSFLKDDSIDNKVLTRSDKARGKSDNVPSEEVVKKMKNYWRQLLNAKLITQRKFDNLTKAERGGLSELDKAGFIKRQLVETRQITKHVAQILDSRMNTKYDENDKLIREVKVITLKSKLVSDFRKDFQFYKVREINNYHHAHDAYLNAVVGTALIKKYPKLESEFVYGDYKVYDVRKMIAKSEQEIGKATAKYFFYSNIMNFFKTEITLANGEIRKRPLIETNGETGEIVWDKGRDFATVRKVLSMPQVNIVKKTEVQTGGFSKESILPKRNSDKLIARKKDWDPKKYGGFDSPTVAYSVLVVAKVEKGKSKKLKSVKELLGITIMERSSFEKNPIDFLEAKGYKEVKKDLIIKLPKYSLFELENGRKRMLASAGELQKGNELALPSKYVNFLYLASHYEKLKGSPEDNEQKQLFVEQHKHYLDEIIEQISEFSKRVILADANLDKVLSAYNKHRDKPIREQAENIIHLFTLTNLGAPAAFKYFDTTIDRKRYTSTKEVLDATLIHQSITGLYETRIDLSQLGGDGGGSSPAPGGSGGTLNIEDEYRLHETSKGPDVPLGSTWLSDFPQAWAETGGMGLAVRQAPLIIPLKATSTPVSIKQYPMSQEARLGIKPHIQRLLDQGILVPCQSPWNTPLLPVKKPGTNDYRPVQDLREVNKRVEDIHPTVPNPYNLLSGLPPSHQWYTVLDLKDAFFCLRLHPTSQSLFAFEWRDPEMGISGQLTWTRLPQGFKNSPTLFNEALHRDLADFRIQHPDLILLQYVDDLLLAATSELDCQQGTRALLQTLGDLGYRASAKKAQICQKQVKYLGYLLKEGQRWLTEARKETVMGQPTPKTPRQLREFLGKAGFCRLFIPGFAEMAAPLYPLTKPGTLFEWGPDQQKAYQEIKQALLTAPALGLPDLTKPFELFVDEKQGYAKGVLTQKLGPWRRPVAYLSKKLDPVAAGWPPCLRMVAAIAVLTKDAGKLTMGQPLVILAPHAVEALVKQPPDRWLSNARMTHYQALLLDTDRVQFGPIVALNPATLLPLPEEGLQHDCLDILAEAHGTRPDLTDQPLPDADHTWYTDGSSFLQEGQRKAGAAVTTETEVVWAKALPAGTSAQRAELIALTQALKMAEGKKLNVYTDSRYAFATAHIHGEIYRRRGWLTSEGKEIKNKDEILALLKALFLPKRLSIIHCPGHQKGNRAEARGNRMADQAAREVATRETPETSTLLAGKRTADGSEFEKRTADGSEFESPKKKAKVE

SEQ ID NO: 2553 - protein, 2096 aa, synthetic construct
MPAAKRVKLDGGDKKYSIGLDIGTNSVGWAVITDEYKVPSKKFKVLGNTDRHSIKKNLIGALLFDSGETAEATRLKRTARRRYTRRKNRICYLQEIFSNEMAKVDDSFFHRLEESFLVEEDKKHERHPIFGNIVDEVAYHEKYPTIYHLRKKLVDSTDKADLRLIYLALAHMIKFRGHFLIEGDLNPDNSDVDKLFIQLVQTYNQLFEENPINASGVDAKAILSARLSKSRRLENLIAQLPGEKKNGLFGNLIALSLGLTPNFKSNFDLAEDAKLQLSKDTYDDDLDNLLAQIGDQYADLFLAAKNLSDAILLSDILRVNTEITKAPLSASMIKRYDEHHQDLTLLKALVRQQLPEKYKEIFFDQSKNGYAGYIDGGASQEEFYKFIKPILEKMDGTEELLVKLNREDLLRKQRTFDNGSIPHQIHLGELHAILRRQEDFYPFLKDNREKIEKILTFRIPYYVGPLARGNSRFAWMTRKSEETITPWNFEEVVDKGASAQSFIERMTNFDKNLPNEKVLPKHSLLYEYFTVYNELTKVKYVTEGMRKPAFLSGEQKKAIVDLLFKTNRKVTVKQLKEDYFKKIECFDSVEISGVEDRFNASLGTYHDLLKIIKDKDFLDNEENEDILEDIVLTLTLFEDREMIEERLKTYAHLFDDKVMKQLKRRRYTGWGRLSRKLINGIRDKQSGKTILDFLKSDGFANRNFMQLIHDDSLTFKEDIQKAQVSGQGDSLHEHIANLAGSPAIKKGILQTVKVVDELVKVMGRHKPENIVIEMARENQTTQKGQKNSRERMKRIEEGIKELGSQILKEHPVENTQLQNEKLYLYYLQNGRDMYVDQELDINRLSDYDVDHIVPQSFLKDDSIDNKVLTRSDKARGKSDNVPSEEVVKKMKNYWRQLLNAKLITQRKFDNLTKAERGGLSELDKAGFIKRQLVETRQITKHVAQILDSRMNTKYDENDKLIREVKVITLKSKLVSDFRKDFQFYKVREINNYHHAHDAYLNAVVGTALIKKYPKLESEFVYGDYKVYDVRKMIAKSEQEIGKATAKYFFYSNIMNFFKTEITLANGEIRKRPLIETNGETGEIVWDKGRDFATVRKVLSMPQVNIVKKTEVQTGGFSKESILPKRNSDKLIARKKDWDPKKYGGFDSPTVAYSVLVVAKVEKGKSKKLKSVKELLGITIMERSSFEKNPIDFLEAKGYKEVKKDLIIKLPKYSLFELENGRKRMLASAGELQKGNELALPSKYVNFLYLASHYEKLKGSPEDNEQKQLFVEQHKHYLDEIIEQISEFSKRVILADANLDKVLSAYNKHRDKPIREQAENIIHLFTLTNLGAPAAFKYFDTTIDRKRYTSTKEVLDATLIHQSITGLYETRIDLSQLGGDGGGSSEAAAKGGSGGTLNIEDEYRLHETSKGPDVPLGSTWLSDFPQAWAETGGMGLAVRQAPLIIPLKATSTPVSIKQYPMSQEARLGIKPHIQRLLDQGILVPCQSPWNTPLLPVKKPGTNDYRPVQDLREVNKRVEDIHPTVPNPYNLLSGLPPSHQWYTVLDLKDAFFCLRLHPTSQSLFAFEWRDPEMGISGQLTWTRLPQGFKNSPTLFNEALHRDLADFRIQHPDLILLQYVDDLLLAATSELDCQQGTRALLQTLGDLGYRASAKKAQICQKQVKYLGYLLKEGQRWLTEARKETVMGQPTPKTPRQLREFLGKAGFCRLFIPGFAEMAAPLYPLTKPGTLFEWGPDQQKAYQEIKQALLTAPALGLPDLTKPFELFVDEKQGYAKGVLTQKLGPWRRPVAYLSKKLDPVAAGWPPCLRMVAAIAVLTKDAGKLTMGQPLVILAPHAVEALVKQPPDRWLSNARMTHYQALLLDTDRVQFGPIVALNPATLLPLPEEGLQHDCLDILAEAHGTRPDLTDQPLPDADHTWYTDGSSFLQEGQRKAGAAVTTETEVVWAKALPAGTSAQRAELIALTQALKMAEGKKLNVYTDSRYAFATAHIHGEIYRRRGWLTSEGKEIKNKDEILALLKALFLPKRLSIIHCPGHQKGNRAEARGNRMADQAAREVATRETPETSTLLAGKRTADGSEFEKRTADGSEFESPKKKAKVE

SEQ ID NO: 2554 - protein, 2094 aa, synthetic construct
MPAAKRVKLDGGDKKYSIGLDIGTNSVGWAVITDEYKVPSKKFKVLGNTDRHSIKKNLIGALLFDSGETAEATRLKRTARRRYTRRKNRICYLQEIFSNEMAKVDDSFFHRLEESFLVEEDKKHERHPIFGNIVDEVAYHEKYPTIYHLRKKLVDSTDKADLRLIYLALAHMIKFRGHFLIEGDLNPDNSDVDKLFIQLVQTYNQLFEENPINASGVDAKAILSARLSKSRRLENLIAQLPGEKKNGLFGNLIALSLGLTPNFKSNFDLAEDAKLQLSKDTYDDDLDNLLAQIGDQYADLFLAAKNLSDAILLSDILRVNTEITKAPLSASMIKRYDEHHQDLTLLKALVRQQLPEKYKEIFFDQSKNGYAGYIDGGASQEEFYKFIKPILEKMDGTEELLVKLNREDLLRKQRTFDNGSIPHQIHLGELHAILRRQEDFYPFLKDNREKIEKILTFRIPYYVGPLARGNSRFAWMTRKSEETITPWNFEEVVDKGASAQSFIERMTNFDKNLPNEKVLPKHSLLYEYFTVYNELTKVKYVTEGMRKPAFLSGEQKKAIVDLLFKTNRKVTVKQLKEDYFKKIECFDSVEISGVEDRFNASLGTYHDLLKIIKDKDFLDNEENEDILEDIVLTLTLFEDREMIEERLKTYAHLFDDKVMKQLKRRRYTGWGRLSRKLINGIRDKQSGKTILDFLKSDGFANRNFMQLIHDDSLTFKEDIQKAQVSGQGDSLHEHIANLAGSPAIKKGILQTVKVVDELVKVMGRHKPENIVIEMARENQTTQKGQKNSRERMKRIEEGIKELGSQILKEHPVENTQLQNEKLYLYYLQNGRDMYVDQELDINRLSDYDVDHIVPQSFLKDDSIDNKVLTRSDKARGKSDNVPSEEVVKKMKNYWRQLLNAKLITQRKFDNLTKAERGGLSELDKAGFIKRQLVETRQITKHVAQILDSRMNTKYDENDKLIREVKVITLKSKLVSDFRKDFQFYKVREINNYHHAHDAYLNAVVGTALIKKYPKLESEFVYGDYKVYDVRKMIAKSEQEIGKATAKYFFYSNIMNFFKTEITLANGEIRKRPLIETNGETGEIVWDKGRDFATVRKVLSMPQVNIVKKTEVQTGGFSKESILPKRNSDKLIARKKDWDPKKYGGFDSPTVAYSVLVVAKVEKGKSKKLKSVKELLGITIMERSSFEKNPIDFLEAKGYKEVKKDLIIKLPKYSLFELENGRKRMLASAGELQKGNELALPSKYVNFLYLASHYEKLKGSPEDNEQKQLFVEQHKHYLDEIIEQISEFSKRVILADANLDKVLSAYNKHRDKPIREQAENIIHLFTLTNLGAPAAFKYFDTTIDRKRYTSTKEVLDATLIHQSITGLYETRIDLSQLGGDGGGSSGGGPAPGGTLNIEDEYRLHETSKGPDVPLGSTWLSDFPQAWAETGGMGLAVRQAPLIIPLKATSTPVSIKQYPMSQEARLGIKPHIQRLLDQGILVPCQSPWNTPLLPVKKPGTNDYRPVQDLREVNKRVEDIHPTVPNPYNLLSGLPPSHQWYTVLDLKDAFFCLRLHPTSQSLFAFEWRDPEMGISGQLTWTRLPQGFKNSPTLFNEALHRDLADFRIQHPDLILLQYVDDLLLAATSELDCQQGTRALLQTLGDLGYRASAKKAQICQKQVKYLGYLLKEGQRWLTEARKETVMGQPTPKTPRQLREFLGKAGFCRLFIPGFAEMAAPLYPLTKPGTLFEWGPDQQKAYQEIKQALLTAPALGLPDLTKPFELFVDEKQGYAKGVLTQKLGPWRRPVAYLSKKLDPVAAGWPPCLRMVAAIAVLTKDAGKLTMGQPLVILAPHAVEALVKQPPDRWLSNARMTHYQALLLDTDRVQFGPIVALNPATLLPLPEEGLQHDCLDILAEAHGTRPDLTDQPLPDADHTWYTDGSSFLQEGQRKAGAAVTTETEVVWAKALPAGTSAQRAELIALTQALKMAEGKKLNVYTDSRYAFATAHIHGEIYRRRGWLTSEGKEIKNKDEILALLKALFLPKRLSIIHCPGHQKGNRAEARGNRMADQAAREVATRETPETSTLLAGKRTADGSEFEKRTADGSEFESPKKKAKVE

SEQ ID NO: 2555 - protein, 2100 aa, synthetic construct
MPAAKRVKLDGGDKKYSIGLDIGTNSVGWAVITDEYKVPSKKFKVLGNTDRHSIKKNLIGALLFDSGETAEATRLKRTARRRYTRRKNRICYLQEIFSNEMAKVDDSFFHRLEESFLVEEDKKHERHPIFGNIVDEVAYHEKYPTIYHLRKKLVDSTDKADLRLIYLALAHMIKFRGHFLIEGDLNPDNSDVDKLFIQLVQTYNQLFEENPINASGVDAKAILSARLSKSRRLENLIAQLPGEKKNGLFGNLIALSLGLTPNFKSNFDLAEDAKLQLSKDTYDDDLDNLLAQIGDQYADLFLAAKNLSDAILLSDILRVNTEITKAPLSASMIKRYDEHHQDLTLLKALVRQQLPEKYKEIFFDQSKNGYAGYIDGGASQEEFYKFIKPILEKMDGTEELLVKLNREDLLRKQRTFDNGSIPHQIHLGELHAILRRQEDFYPFLKDNREKIEKILTFRIPYYVGPLARGNSRFAWMTRKSEETITPWNFEEVVDKGASAQSFIERMTNFDKNLPNEKVLPKHSLLYEYFTVYNELTKVKYVTEGMRKPAFLSGEQKKAIVDLLFKTNRKVTVKQLKEDYFKKIECFDSVEISGVEDRFNASLGTYHDLLKIIKDKDFLDNEENEDILEDIVLTLTLFEDREMIEERLKTYAHLFDDKVMKQLKRRRYTGWGRLSRKLINGIRDKQSGKTILDFLKSDGFANRNFMQLIHDDSLTFKEDIQKAQVSGQGDSLHEHIANLAGSPAIKKGILQTVKVVDELVKVMGRHKPENIVIEMARENQTTQKGQKNSRERMKRIEEGIKELGSQILKEHPVENTQLQNEKLYLYYLQNGRDMYVDQELDINRLSDYDVDHIVPQSFLKDDSIDNKVLTRSDKARGKSDNVPSEEVVKKMKNYWRQLLNAKLITQRKFDNLTKAERGGLSELDKAGFIKRQLVETRQITKHVAQILDSRMNTKYDENDKLIREVKVITLKSKLVSDFRKDFQFYKVREINNYHHAHDAYLNAVVGTALIKKYPKLESEFVYGDYKVYDVRKMIAKSEQEIGKATAKYFFYSNIMNFFKTEITLANGEIRKRPLIETNGETGEIVWDKGRDFATVRKVLSMPQVNIVKKTEVQTGGFSKESILPKRNSDKLIARKKDWDPKKYGGFDSPTVAYSVLVVAKVEKGKSKKLKSVKELLGITIMERSSFEKNPIDFLEAKGYKEVKKDLIIKLPKYSLFELENGRKRMLASAGELQKGNELALPSKYVNFLYLASHYEKLKGSPEDNEQKQLFVEQHKHYLDEIIEQISEFSKRVILADANLDKVLSAYNKHRDKPIREQAENIIHLFTLTNLGAPAAFKYFDTTIDRKRYTSTKEVLDATLIHQSITGLYETRIDLSQLGGDGGGGSGGSGGSGGSGGSGGTLNIEDEYRLHETSKGPDVPLGSTWLSDFPQAWAETGGMGLAVRQAPLIIPLKATSTPVSIKQYPMSQEARLGIKPHIQRLLDQGILVPCQSPWNTPLLPVKKPGTNDYRPVQDLREVNKRVEDIHPTVPNPYNLLSGLPPSHQWYTVLDLKDAFFCLRLHPTSQSLFAFEWRDPEMGISGQLTWTRLPQGFKNSPTLFNEALHRDLADFRIQHPDLILLQYVDDLLLAATSELDCQQGTRALLQTLGDLGYRASAKKAQICQKQVKYLGYLLKEGQRWLTEARKETVMGQPTPKTPRQLREFLGKAGFCRLFIPGFAEMAAPLYPLTKPGTLFEWGPDQQKAYQEIKQALLTAPALGLPDLTKPFELFVDEKQGYAKGVLTQKLGPWRRPVAYLSKKLDPVAAGWPPCLRMVAAIAVLTKDAGKLTMGQPLVILAPHAVEALVKQPPDRWLSNARMTHYQALLLDTDRVQFGPIVALNPATLLPLPEEGLQHDCLDILAEAHGTRPDLTDQPLPDADHTWYTDGSSFLQEGQRKAGAAVTTETEVVWAKALPAGTSAQRAELIALTQALKMAEGKKLNVYTDSRYAFATAHIHGEIYRRRGWLTSEGKEIKNKDEILALLKALFLPKRLSIIHCPGHQKGNRAEARGNRMADQAAREVATRETPETSTLLAGKRTADGSEFEKRTADGSEFESPKKKAKVE

SEQ ID NO: 2556 - protein, 2096 aa, synthetic construct
MPAAKRVKLDGGDKKYSIGLDIGTNSVGWAVITDEYKVPSKKFKVLGNTDRHSIKKNLIGALLFDSGETAEATRLKRTARRRYTRRKNRICYLQEIFSNEMAKVDDSFFHRLEESFLVEEDKKHERHPIFGNIVDEVAYHEKYPTIYHLRKKLVDSTDKADLRLIYLALAHMIKFRGHFLIEGDLNPDNSDVDKLFIQLVQTYNQLFEENPINASGVDAKAILSARLSKSRRLENLIAQLPGEKKNGLFGNLIALSLGLTPNFKSNFDLAEDAKLQLSKDTYDDDLDNLLAQIGDQYADLFLAAKNLSDAILLSDILRVNTEITKAPLSASMIKRYDEHHQDLTLLKALVRQQLPEKYKEIFFDQSKNGYAGYIDGGASQEEFYKFIKPILEKMDGTEELLVKLNREDLLRKQRTFDNGSIPHQIHLGELHAILRRQEDFYPFLKDNREKIEKILTFRIPYYVGPLARGNSRFAWMTRKSEETITPWNFEEVVDKGASAQSFIERMTNFDKNLPNEKVLPKHSLLYEYFTVYNELTKVKYVTEGMRKPAFLSGEQKKAIVDLLFKTNRKVTVKQLKEDYFKKIECFDSVEISGVEDRFNASLGTYHDLLKIIKDKDFLDNEENEDILEDIVLTLTLFEDREMIEERLKTYAHLFDDKVMKQLKRRRYTGWGRLSRKLINGIRDKQSGKTILDFLKSDGFANRNFMQLIHDDSLTFKEDIQKAQVSGQGDSLHEHIANLAGSPAIKKGILQTVKVVDELVKVMGRHKPENIVIEMARENQTTQKGQKNSRERMKRIEEGIKELGSQILKEHPVENTQLQNEKLYLYYLQNGRDMYVDQELDINRLSDYDVDHIVPQSFLKDDSIDNKVLTRSDKARGKSDNVPSEEVVKKMKNYWRQLLNAKLITQRKFDNLTKAERGGLSELDKAGFIKRQLVETRQITKHVAQILDSRMNTKYDENDKLIREVKVITLKSKLVSDFRKDFQFYKVREINNYHHAHDAYLNAVVGTALIKKYPKLESEFVYGDYKVYDVRKMIAKSEQEIGKATAKYFFYSNIMNFFKTEITLANGEIRKRPLIETNGETGEIVWDKGRDFATVRKVLSMPQVNIVKKTEVQTGGFSKESILPKRNSDKLIARKKDWDPKKYGGFDSPTVAYSVLVVAKVEKGKSKKLKSVKELLGITIMERSSFEKNPIDFLEAKGYKEVKKDLIIKLPKYSLFELENGRKRMLASAGELQKGNELALPSKYVNFLYLASHYEKLKGSPEDNEQKQLFVEQHKHYLDEIIEQISEFSKRVILADANLDKVLSAYNKHRDKPIREQAENIIHLFTLTNLGAPAAFKYFDTTIDRKRYTSTKEVLDATLIHQSITGLYETRIDLSQLGGDGGEAAAKGGGPAPGGTLNIEDEYRLHETSKGPDVPLGSTWLSDFPQAWAETGGMGLAVRQAPLIIPLKATSTPVSIKQYPMSQEARLGIKPHIQRLLDQGILVPCQSPWNTPLLPVKKPGTNDYRPVQDLREVNKRVEDIHPTVPNPYNLLSGLPPSHQWYTVLDLKDAFFCLRLHPTSQSLFAFEWRDPEMGISGQLTWTRLPQGFKNSPTLFNEALHRDLADFRIQHPDLILLQYVDDLLLAATSELDCQQGTRALLQTLGDLGYRASAKKAQICQKQVKYLGYLLKEGQRWLTEARKETVMGQPTPKTPRQLREFLGKAGFCRLFIPGFAEMAAPLYPLTKPGTLFEWGPDQQKAYQEIKQALLTAPALGLPDLTKPFELFVDEKQGYAKGVLTQKLGPWRRPVAYLSKKLDPVAAGWPPCLRMVAAIAVLTKDAGKLTMGQPLVILAPHAVEALVKQPPDRWLSNARMTHYQALLLDTDRVQFGPIVALNPATLLPLPEEGLQHDCLDILAEAHGTRPDLTDQPLPDADHTWYTDGSSFLQEGQRKAGAAVTTETEVVWAKALPAGTSAQRAELIALTQALKMAEGKKLNVYTDSRYAFATAHIHGEIYRRRGWLTSEGKEIKNKDEILALLKALFLPKRLSIIHCPGHQKGNRAEARGNRMADQAAREVATRETPETSTLLAGKRTADGSEFEKRTADGSEFESPKKKAKVE

SEQ ID NO: 2557 - protein, 2094 aa, synthetic construct
MPAAKRVKLDGGDKKYSIGLDIGTNSVGWAVITDEYKVPSKKFKVLGNTDRHSIKKNLIGALLFDSGETAEATRLKRTARRRYTRRKNRICYLQEIFSNEMAKVDDSFFHRLEESFLVEEDKKHERHPIFGNIVDEVAYHEKYPTIYHLRKKLVDSTDKADLRLIYLALAHMIKFRGHFLIEGDLNPDNSDVDKLFIQLVQTYNQLFEENPINASGVDAKAILSARLSKSRRLENLIAQLPGEKKNGLFGNLIALSLGLTPNFKSNFDLAEDAKLQLSKDTYDDDLDNLLAQIGDQYADLFLAAKNLSDAILLSDILRVNTEITKAPLSASMIKRYDEHHQDLTLLKALVRQQLPEKYKEIFFDQSKNGYAGYIDGGASQEEFYKFIKPILEKMDGTEELLVKLNREDLLRKQRTFDNGSIPHQIHLGELHAILRRQEDFYPFLKDNREKIEKILTFRIPYYVGPLARGNSRFAWMTRKSEETITPWNFEEVVDKGASAQSFIERMTNFDKNLPNEKVLPKHSLLYEYFTVYNELTKVKYVTEGMRKPAFLSGEQKKAIVDLLFKTNRKVTVKQLKEDYFKKIECFDSVEISGVEDRFNASLGTYHDLLKIIKDKDFLDNEENEDILEDIVLTLTLFEDREMIEERLKTYAHLFDDKVMKQLKRRRYTGWGRLSRKLINGIRDKQSGKTILDFLKSDGFANRNFMQLIHDDSLTFKEDIQKAQVSGQGDSLHEHIANLAGSPAIKKGILQTVKVVDELVKVMGRHKPENIVIEMARENQTTQKGQKNSRERMKRIEEGIKELGSQILKEHPVENTQLQNEKLYLYYLQNGRDMYVDQELDINRLSDYDVDHIVPQSFLKDDSIDNKVLTRSDKARGKSDNVPSEEVVKKMKNYWRQLLNAKLITQRKFDNLTKAERGGLSELDKAGFIKRQLVETRQITKHVAQILDSRMNTKYDENDKLIREVKVITLKSKLVSDFRKDFQFYKVREINNYHHAHDAYLNAVVGTALIKKYPKLESEFVYGDYKVYDVRKMIAKSEQEIGKATAKYFFYSNIMNFFKTEITLANGEIRKRPLIETNGETGEIVWDKGRDFATVRKVLSMPQVNIVKKTEVQTGGFSKESILPKRNSDKLIARKKDWDPKKYGGFDSPTVAYSVLVVAKVEKGKSKKLKSVKELLGITIMERSSFEKNPIDFLEAKGYKEVKKDLIIKLPKYSLFELENGRKRMLASAGELQKGNELALPSKYVNFLYLASHYEKLKGSPEDNEQKQLFVEQHKHYLDEIIEQISEFSKRVILADANLDKVLSAYNKHRDKPIREQAENIIHLFTLTNLGAPAAFKYFDTTIDRKRYTSTKEVLDATLIHQSITGLYETRIDLSQLGGDGGGSSGSSGSSGGTLNIEDEYRLHETSKGPDVPLGSTWLSDFPQAWAETGGMGLAVRQAPLIIPLKATSTPVSIKQYPMSQEARLGIKPHIQRLLDQGILVPCQSPWNTPLLPVKKPGTNDYRPVQDLREVNKRVEDIHPTVPNPYNLLSGLPPSHQWYTVLDLKDAFFCLRLHPTSQSLFAFEWRDPEMGISGQLTWTRLPQGFKNSPTLFNEALHRDLADFRIQHPDLILLQYVDDLLLAATSELDCQQGTRALLQTLGDLGYRASAKKAQICQKQVKYLGYLLKEGQRWLTEARKETVMGQPTPKTPRQLREFLGKAGFCRLFIPGFAEMAAPLYPLTKPGTLFEWGPDQQKAYQEIKQALLTAPALGLPDLTKPFELFVDEKQGYAKGVLTQKLGPWRRPVAYLSKKLDPVAAGWPPCLRMVAAIAVLTKDAGKLTMGQPLVILAPHAVEALVKQPPDRWLSNARMTHYQALLLDTDRVQFGPIVALNPATLLPLPEEGLQHDCLDILAEAHGTRPDLTDQPLPDADHTWYTDGSSFLQEGQRKAGAAVTTETEVVWAKALPAGTSAQRAELIALTQALKMAEGKKLNVYTDSRYAFATAHIHGEIYRRRGWLTSEGKEIKNKDEILALLKALFLPKRLSIIHCPGHQKGNRAEARGNRMADQAAREVATRETPETSTLLAGKRTADGSEFEKRTADGSEFESPKKKAKVE

SEQ ID NO: 2558 - protein, 2094 aa, synthetic construct
MPAAKRVKLDGGDKKYSIGLDIGTNSVGWAVITDEYKVPSKKFKVLGNTDRHSIKKNLIGALLFDSGETAEATRLKRTARRRYTRRKNRICYLQEIFSNEMAKVDDSFFHRLEESFLVEEDKKHERHPIFGNIVDEVAYHEKYPTIYHLRKKLVDSTDKADLRLIYLALAHMIKFRGHFLIEGDLNPDNSDVDKLFIQLVQTYNQLFEENPINASGVDAKAILSARLSKSRRLENLIAQLPGEKKNGLFGNLIALSLGLTPNFKSNFDLAEDAKLQLSKDTYDDDLDNLLAQIGDQYADLFLAAKNLSDAILLSDILRVNTEITKAPLSASMIKRYDEHHQDLTLLKALVRQQLPEKYKEIFFDQSKNGYAGYIDGGASQEEFYKFIKPILEKMDGTEELLVKLNREDLLRKQRTFDNGSIPHQIHLGELHAILRRQEDFYPFLKDNREKIEKILTFRIPYYVGPLARGNSRFAWMTRKSEETITPWNFEEVVDKGASAQSFIERMTNFDKNLPNEKVLPKHSLLYEYFTVYNELTKVKYVTEGMRKPAFLSGEQKKAIVDLLFKTNRKVTVKQLKEDYFKKIECFDSVEISGVEDRFNASLGTYHDLLKIIKDKDFLDNEENEDILEDIVLTLTLFEDREMIEERLKTYAHLFDDKVMKQLKRRRYTGWGRLSRKLINGIRDKQSGKTILDFLKSDGFANRNFMQLIHDDSLTFKEDIQKAQVSGQGDSLHEHIANLAGSPAIKKGILQTVKVVDELVKVMGRHKPENIVIEMARENQTTQKGQKNSRERMKRIEEGIKELGSQILKEHPVENTQLQNEKLYLYYLQNGRDMYVDQELDINRLSDYDVDHIVPQSFLKDDSIDNKVLTRSDKARGKSDNVPSEEVVKKMKNYWRQLLNAKLITQRKFDNLTKAERGGLSELDKAGFIKRQLVETRQITKHVAQILDSRMNTKYDENDKLIREVKVITLKSKLVSDFRKDFQFYKVREINNYHHAHDAYLNAVVGTALIKKYPKLESEFVYGDYKVYDVRKMIAKSEQEIGKATAKYFFYSNIMNFFKTEITLANGEIRKRPLIETNGETGEIVWDKGRDFATVRKVLSMPQVNIVKKTEVQTGGFSKESILPKRNSDKLIARKKDWDPKKYGGFDSPTVAYSVLVVAKVEKGKSKKLKSVKELLGITIMERSSFEKNPIDFLEAKGYKEVKKDLIIKLPKYSLFELENGRKRMLASAGELQKGNELALPSKYVNFLYLASHYEKLKGSPEDNEQKQLFVEQHKHYLDEIIEQISEFSKRVILADANLDKVLSAYNKHRDKPIREQAENIIHLFTLTNLGAPAAFKYFDTTIDRKRYTSTKEVLDATLIHQSITGLYETRIDLSQLGGDGGGGSGSSPAPGGTLNIEDEYRLHETSKGPDVPLGSTWLSDFPQAWAETGGMGLAVRQAPLIIPLKATSTPVSIKQYPMSQEARLGIKPHIQRLLDQGILVPCQSPWNTPLLPVKKPGTNDYRPVQDLREVNKRVEDIHPTVPNPYNLLSGLPPSHQWYTVLDLKDAFFCLRLHPTSQSLFAFEWRDPEMGISGQLTWTRLPQGFKNSPTLFNEALHRDLADFRIQHPDLILLQYVDDLLLAATSELDCQQGTRALLQTLGDLGYRASAKKAQICQKQVKYLGYLLKEGQRWLTEARKETVMGQPTPKTPRQLREFLGKAGFCRLFIPGFAEMAAPLYPLTKPGTLFEWGPDQQKAYQEIKQALLTAPALGLPDLTKPFELFVDEKQGYAKGVLTQKLGPWRRPVAYLSKKLDPVAAGWPPCLRMVAAIAVLTKDAGKLTMGQPLVILAPHAVEALVKQPPDRWLSNARMTHYQALLLDTDRVQFGPIVALNPATLLPLPEEGLQHDCLDILAEAHGTRPDLTDQPLPDADHTWYTDGSSFLQEGQRKAGAAVTTETEVVWAKALPAGTSAQRAELIALTQALKMAEGKKLNVYTDSRYAFATAHIHGEIYRRRGWLTSEGKEIKNKDEILALLKALFLPKRLSIIHCPGHQKGNRAEARGNRMADQAAREVATRETPETSTLLAGKRTADGSEFEKRTADGSEFESPKKKAKVE

SEQ ID NO: 2559 - protein, 2091 aa, synthetic construct
MPAAKRVKLDGGDKKYSIGLDIGTNSVGWAVITDEYKVPSKKFKVLGNTDRHSIKKNLIGALLFDSGETAEATRLKRTARRRYTRRKNRICYLQEIFSNEMAKVDDSFFHRLEESFLVEEDKKHERHPIFGNIVDEVAYHEKYPTIYHLRKKLVDSTDKADLRLIYLALAHMIKFRGHFLIEGDLNPDNSDVDKLFIQLVQTYNQLFEENPINASGVDAKAILSARLSKSRRLENLIAQLPGEKKNGLFGNLIALSLGLTPNFKSNFDLAEDAKLQLSKDTYDDDLDNLLAQIGDQYADLFLAAKNLSDAILLSDILRVNTEITKAPLSASMIKRYDEHHQDLTLLKALVRQQLPEKYKEIFFDQSKNGYAGYIDGGASQEEFYKFIKPILEKMDGTEELLVKLNREDLLRKQRTFDNGSIPHQIHLGELHAILRRQEDFYPFLKDNREKIEKILTFRIPYYVGPLARGNSRFAWMTRKSEETITPWNFEEVVDKGASAQSFIERMTNFDKNLPNEKVLPKHSLLYEYFTVYNELTKVKYVTEGMRKPAFLSGEQKKAIVDLLFKTNRKVTVKQLKEDYFKKIECFDSVEISGVEDRFNASLGTYHDLLKIIKDKDFLDNEENEDILEDIVLTLTLFEDREMIEERLKTYAHLFDDKVMKQLKRRRYTGWGRLSRKLINGIRDKQSGKTILDFLKSDGFANRNFMQLIHDDSLTFKEDIQKAQVSGQGDSLHEHIANLAGSPAIKKGILQTVKVVDELVKVMGRHKPENIVIEMARENQTTQKGQKNSRERMKRIEEGIKELGSQILKEHPVENTQLQNEKLYLYYLQNGRDMYVDQELDINRLSDYDVDHIVPQSFLKDDSIDNKVLTRSDKARGKSDNVPSEEVVKKMKNYWRQLLNAKLITQRKFDNLTKAERGGLSELDKAGFIKRQLVETRQITKHVAQILDSRMNTKYDENDKLIREVKVITLKSKLVSDFRKDFQFYKVREINNYHHAHDAYLNAVVGTALIKKYPKLESEFVYGDYKVYDVRKMIAKSEQEIGKATAKYFFYSNIMNFFKTEITLANGEIRKRPLIETNGETGEIVWDKGRDFATVRKVLSMPQVNIVKKTEVQTGGFSKESILPKRNSDKLIARKKDWDPKKYGGFDSPTVAYSVLVVAKVEKGKSKKLKSVKELLGITIMERSSFEKNPIDFLEAKGYKEVKKDLIIKLPKYSLFELENGRKRMLASAGELQKGNELALPSKYVNFLYLASHYEKLKGSPEDNEQKQLFVEQHKHYLDEIIEQISEFSKRVILADANLDKVLSAYNKHRDKPIREQAENIIHLFTLTNLGAPAAFKYFDTTIDRKRYTSTKEVLDATLIHQSITGLYETRIDLSQLGGDGGGGSGGGGGTLNIEDEYRLHETSKGPDVPLGSTWLSDFPQAWAETGGMGLAVRQAPLIIPLKATSTPVSIKQYPMSQEARLGIKPHIQRLLDQGILVPCQSPWNTPLLPVKKPGTNDYRPVQDLREVNKRVEDIHPTVPNPYNLLSGLPPSHQWYTVLDLKDAFFCLRLHPTSQSLFAFEWRDPEMGISGQLTWTRLPQGFKNSPTLFNEALHRDLADFRIQHPDLILLQYVDDLLLAATSELDCQQGTRALLQTLGDLGYRASAKKAQICQKQVKYLGYLLKEGQRWLTEARKETVMGQPTPKTPRQLREFLGKAGFCRLFIPGFAEMAAPLYPLTKPGTLFEWGPDQQKAYQEIKQALLTAPALGLPDLTKPFELFVDEKQGYAKGVLTQKLGPWRRPVAYLSKKLDPVAAGWPPCLRMVAAIAVLTKDAGKLTMGQPLVILAPHAVEALVKQPPDRWLSNARMTHYQALLLDTDRVQFGPIVALNPATLLPLPEEGLQHDCLDILAEAHGTRPDLTDQPLPDADHTWYTDGSSFLQEGQRKAGAAVTTETEVVWAKALPAGTSAQRAELIALTQALKMAEGKKLNVYTDSRYAFATAHIHGEIYRRRGWLTSEGKEIKNKDEILALLKALFLPKRLSIIHCPGHQKGNRAEARGNRMADQAAREVATRETPETSTLLAGKRTADGSEFEKRTADGSEFESPKKKAKVE

SEQ ID NO: 2560 - protein, 2092 aa, synthetic construct
MPAAKRVKLDGGDKKYSIGLDIGTNSVGWAVITDEYKVPSKKFKVLGNTDRHSIKKNLIGALLFDSGETAEATRLKRTARRRYTRRKNRICYLQEIFSNEMAKVDDSFFHRLEESFLVEEDKKHERHPIFGNIVDEVAYHEKYPTIYHLRKKLVDSTDKADLRLIYLALAHMIKFRGHFLIEGDLNPDNSDVDKLFIQLVQTYNQLFEENPINASGVDAKAILSARLSKSRRLENLIAQLPGEKKNGLFGNLIALSLGLTPNFKSNFDLAEDAKLQLSKDTYDDDLDNLLAQIGDQYADLFLAAKNLSDAILLSDILRVNTEITKAPLSASMIKRYDEHHQDLTLLKALVRQQLPEKYKEIFFDQSKNGYAGYIDGGASQEEFYKFIKPILEKMDGTEELLVKLNREDLLRKQRTFDNGSIPHQIHLGELHAILRRQEDFYPFLKDNREKIEKILTFRIPYYVGPLARGNSRFAWMTRKSEETITPWNFEEVVDKGASAQSFIERMTNFDKNLPNEKVLPKHSLLYEYFTVYNELTKVKYVTEGMRKPAFLSGEQKKAIVDLLFKTNRKVTVKQLKEDYFKKIECFDSVEISGVEDRFNASLGTYHDLLKIIKDKDFLDNEENEDILEDIVLTLTLFEDREMIEERLKTYAHLFDDKVMKQLKRRRYTGWGRLSRKLINGIRDKQSGKTILDFLKSDGFANRNFMQLIHDDSLTFKEDIQKAQVSGQGDSLHEHIANLAGSPAIKKGILQTVKVVDELVKVMGRHKPENIVIEMARENQTTQKGQKNSRERMKRIEEGIKELGSQILKEHPVENTQLQNEKLYLYYLQNGRDMYVDQELDINRLSDYDVDHIVPQSFLKDDSIDNKVLTRSDKARGKSDNVPSEEVVKKMKNYWRQLLNAKLITQRKFDNLTKAERGGLSELDKAGFIKRQLVETRQITKHVAQILDSRMNTKYDENDKLIREVKVITLKSKLVSDFRKDFQFYKVREINNYHHAHDAYLNAVVGTALIKKYPKLESEFVYGDYKVYDVRKMIAKSEQEIGKATAKYFFYSNIMNFFKTEITLANGEIRKRPLIETNGETGEIVWDKGRDFATVRKVLSMPQVNIVKKTEVQTGGFSKESILPKRNSDKLIARKKDWDPKKYGGFDSPTVAYSVLVVAKVEKGKSKKLKSVKELLGITIMERSSFEKNPIDFLEAKGYKEVKKDLIIKLPKYSLFELENGRKRMLASAGELQKGNELALPSKYVNFLYLASHYEKLKGSPEDNEQKQLFVEQHKHYLDEIIEQISEFSKRVILADANLDKVLSAYNKHRDKPIREQAENIIHLFTLTNLGAPAAFKYFDTTIDRKRYTSTKEVLDATLIHQSITGLYETRIDLSQLGGDGGGGGGGGGGGTLNIEDEYRLHETSKGPDVPLGSTWLSDFPQAWAETGGMGLAVRQAPLIIPLKATSTPVSIKQYPMSQEARLGIKPHIQRLLDQGILVPCQSPWNTPLLPVKKPGTNDYRPVQDLREVNKRVEDIHPTVPNPYNLLSGLPPSHQWYTVLDLKDAFFCLRLHPTSQSLFAFEWRDPEMGISGQLTWTRLPQGFKNSPTLFNEALHRDLADFRIQHPDLILLQYVDDLLLAATSELDCQQGTRALLQTLGDLGYRASAKKAQICQKQVKYLGYLLKEGQRWLTEARKETVMGQPTPKTPRQLREFLGKAGFCRLFIPGFAEMAAPLYPLTKPGTLFEWGPDQQKAYQEIKQALLTAPALGLPDLTKPFELFVDEKQGYAKGVLTQKLGPWRRPVAYLSKKLDPVAAGWPPCLRMVAAIAVLTKDAGKLTMGQPLVILAPHAVEALVKQPPDRWLSNARMTHYQALLLDTDRVQFGPIVALNPATLLPLPEEGLQHDCLDILAEAHGTRPDLTDQPLPDADHTWYTDGSSFLQEGQRKAGAAVTTETEVVWAKALPAGTSAQRAELIALTQALKMAEGKKLNVYTDSRYAFATAHIHGEIYRRRGWLTSEGKEIKNKDEILALLKALFLPKRLSIIHCPGHQKGNRAEARGNRMADQAAREVATRETPETSTLLAGKRTADGSEFEKRTADGSEFESPKKKAKVE

SEQ ID NO: 2561 - protein, 2100 aa, synthetic construct
MPAAKRVKLDGGDKKYSIGLDIGTNSVGWAVITDEYKVPSKKFKVLGNTDRHSIKKNLIGALLFDSGETAEATRLKRTARRRYTRRKNRICYLQEIFSNEMAKVDDSFFHRLEESFLVEEDKKHERHPIFGNIVDEVAYHEKYPTIYHLRKKLVDSTDKADLRLIYLALAHMIKFRGHFLIEGDLNPDNSDVDKLFIQLVQTYNQLFEENPINASGVDAKAILSARLSKSRRLENLIAQLPGEKKNGLFGNLIALSLGLTPNFKSNFDLAEDAKLQLSKDTYDDDLDNLLAQIGDQYADLFLAAKNLSDAILLSDILRVNTEITKAPLSASMIKRYDEHHQDLTLLKALVRQQLPEKYKEIFFDQSKNGYAGYIDGGASQEEFYKFIKPILEKMDGTEELLVKLNREDLLRKQRTFDNGSIPHQIHLGELHAILRRQEDFYPFLKDNREKIEKILTFRIPYYVGPLARGNSRFAWMTRKSEETITPWNFEEVVDKGASAQSFIERMTNFDKNLPNEKVLPKHSLLYEYFTVYNELTKVKYVTEGMRKPAFLSGEQKKAIVDLLFKTNRKVTVKQLKEDYFKKIECFDSVEISGVEDRFNASLGTYHDLLKIIKDKDFLDNEENEDILEDIVLTLTLFEDREMIEERLKTYAHLFDDKVMKQLKRRRYTGWGRLSRKLINGIRDKQSGKTILDFLKSDGFANRNFMQLIHDDSLTFKEDIQKAQVSGQGDSLHEHIANLAGSPAIKKGILQTVKVVDELVKVMGRHKPENIVIEMARENQTTQKGQKNSRERMKRIEEGIKELGSQILKEHPVENTQLQNEKLYLYYLQNGRDMYVDQELDINRLSDYDVDHIVPQSFLKDDSIDNKVLTRSDKARGKSDNVPSEEVVKKMKNYWRQLLNAKLITQRKFDNLTKAERGGLSELDKAGFIKRQLVETRQITKHVAQILDSRMNTKYDENDKLIREVKVITLKSKLVSDFRKDFQFYKVREINNYHHAHDAYLNAVVGTALIKKYPKLESEFVYGDYKVYDVRKMIAKSEQEIGKATAKYFFYSNIMNFFKTEITLANGEIRKRPLIETNGETGEIVWDKGRDFATVRKVLSMPQVNIVKKTEVQTGGFSKESILPKRNSDKLIARKKDWDPKKYGGFDSPTVAYSVLVVAKVEKGKSKKLKSVKELLGITIMERSSFEKNPIDFLEAKGYKEVKKDLIIKLPKYSLFELENGRKRMLASAGELQKGNELALPSKYVNFLYLASHYEKLKGSPEDNEQKQLFVEQHKHYLDEIIEQISEFSKRVILADANLDKVLSAYNKHRDKPIREQAENIIHLFTLTNLGAPAAFKYFDTTIDRKRYTSTKEVLDATLIHQSITGLYETRIDLSQLGGDGGEAAAKGGGGSEAAAKGGTLNIEDEYRLHETSKGPDVPLGSTWLSDFPQAWAETGGMGLAVRQAPLIIPLKATSTPVSIKQYPMSQEARLGIKPHIQRLLDQGILVPCQSPWNTPLLPVKKPGTNDYRPVQDLREVNKRVEDIHPTVPNPYNLLSGLPPSHQWYTVLDLKDAFFCLRLHPTSQSLFAFEWRDPEMGISGQLTWTRLPQGFKNSPTLFNEALHRDLADFRIQHPDLILLQYVDDLLLAATSELDCQQGTRALLQTLGDLGYRASAKKAQICQKQVKYLGYLLKEGQRWLTEARKETVMGQPTPKTPRQLREFLGKAGFCRLFIPGFAEMAAPLYPLTKPGTLFEWGPDQQKAYQEIKQALLTAPALGLPDLTKPFELFVDEKQGYAKGVLTQKLGPWRRPVAYLSKKLDPVAAGWPPCLRMVAAIAVLTKDAGKLTMGQPLVILAPHAVEALVKQPPDRWLSNARMTHYQALLLDTDRVQFGPIVALNPATLLPLPEEGLQHDCLDILAEAHGTRPDLTDQPLPDADHTWYTDGSSFLQEGQRKAGAAVTTETEVVWAKALPAGTSAQRAELIALTQALKMAEGKKLNVYTDSRYAFATAHIHGEIYRRRGWLTSEGKEIKNKDEILALLKALFLPKRLSIIHCPGHQKGNRAEARGNRMADQAAREVATRETPETSTLLAGKRTADGSEFEKRTADGSEFESPKKKAKVE

SEQ ID NO: 2562 - protein, 2091 aa, synthetic construct
MPAAKRVKLDGGDKKYSIGLDIGTNSVGWAVITDEYKVPSKKFKVLGNTDRHSIKKNLIGALLFDSGETAEATRLKRTARRRYTRRKNRICYLQEIFSNEMAKVDDSFFHRLEESFLVEEDKKHERHPIFGNIVDEVAYHEKYPTIYHLRKKLVDSTDKADLRLIYLALAHMIKFRGHFLIEGDLNPDNSDVDKLFIQLVQTYNQLFEENPINASGVDAKAILSARLSKSRRLENLIAQLPGEKKNGLFGNLIALSLGLTPNFKSNFDLAEDAKLQLSKDTYDDDLDNLLAQIGDQYADLFLAAKNLSDAILLSDILRVNTEITKAPLSASMIKRYDEHHQDLTLLKALVRQQLPEKYKEIFFDQSKNGYAGYIDGGASQEEFYKFIKPILEKMDGTEELLVKLNREDLLRKQRTFDNGSIPHQIHLGELHAILRRQEDFYPFLKDNREKIEKILTFRIPYYVGPLARGNSRFAWMTRKSEETITPWNFEEVVDKGASAQSFIERMTNFDKNLPNEKVLPKHSLLYEYFTVYNELTKVKYVTEGMRKPAFLSGEQKKAIVDLLFKTNRKVTVKQLKEDYFKKIECFDSVEISGVEDRFNASLGTYHDLLKIIKDKDFLDNEENEDILEDIVLTLTLFEDREMIEERLKTYAHLFDDKVMKQLKRRRYTGWGRLSRKLINGIRDKQSGKTILDFLKSDGFANRNFMQLIHDDSLTFKEDIQKAQVSGQGDSLHEHIANLAGSPAIKKGILQTVKVVDELVKVMGRHKPENIVIEMARENQTTQKGQKNSRERMKRIEEGIKELGSQILKEHPVENTQLQNEKLYLYYLQNGRDMYVDQELDINRLSDYDVDHIVPQSFLKDDSIDNKVLTRSDKARGKSDNVPSEEVVKKMKNYWRQLLNAKLITQRKFDNLTKAERGGLSELDKAGFIKRQLVETRQITKHVAQILDSRMNTKYDENDKLIREVKVITLKSKLVSDFRKDFQFYKVREINNYHHAHDAYLNAVVGTALIKKYPKLESEFVYGDYKVYDVRKMIAKSEQEIGKATAKYFFYSNIMNFFKTEITLANGEIRKRPLIETNGETGEIVWDKGRDFATVRKVLSMPQVNIVKKTEVQTGGFSKESILPKRNSDKLIARKKDWDPKKYGGFDSPTVAYSVLVVAKVEKGKSKKLKSVKELLGITIMERSSFEKNPIDFLEAKGYKEVKKDLIIKLPKYSLFELENGRKRMLASAGELQKGNELALPSKYVNFLYLASHYEKLKGSPEDNEQKQLFVEQHKHYLDEIIEQISEFSKRVILADANLDKVLSAYNKHRDKPIREQAENIIHLFTLTNLGAPAAFKYFDTTIDRKRYTSTKEVLDATLIHQSITGLYETRIDLSQLGGDGGGGGGGGGGTLNIEDEYRLHETSKGPDVPLGSTWLSDFPQAWAETGGMGLAVRQAPLIIPLKATSTPVSIKQYPMSQEARLGIKPHIQRLLDQGILVPCQSPWNTPLLPVKKPGTNDYRPVQDLREVNKRVEDIHPTVPNPYNLLSGLPPSHQWYTVLDLKDAFFCLRLHPTSQSLFAFEWRDPEMGISGQLTWTRLPQGFKNSPTLFNEALHRDLADFRIQHPDLILLQYVDDLLLAATSELDCQQGTRALLQTLGDLGYRASAKKAQICQKQVKYLGYLLKEGQRWLTEARKETVMGQPTPKTPRQLREFLGKAGFCRLFIPGFAEMAAPLYPLTKPGTLFEWGPDQQKAYQEIKQALLTAPALGLPDLTKPFELFVDEKQGYAKGVLTQKLGPWRRPVAYLSKKLDPVAAGWPPCLRMVAAIAVLTKDAGKLTMGQPLVILAPHAVEALVKQPPDRWLSNARMTHYQALLLDTDRVQFGPIVALNPATLLPLPEEGLQHDCLDILAEAHGTRPDLTDQPLPDADHTWYTDGSSFLQEGQRKAGAAVTTETEVVWAKALPAGTSAQRAELIALTQALKMAEGKKLNVYTDSRYAFATAHIHGEIYRRRGWLTSEGKEIKNKDEILALLKALFLPKRLSIIHCPGHQKGNRAEARGNRMADQAAREVATRETPETSTLLAGKRTADGSEFEKRTADGSEFESPKKKAKVE

SEQ ID NO: 2563 - protein, 2094 aa, synthetic construct
MPAAKRVKLDGGDKKYSIGLDIGTNSVGWAVITDEYKVPSKKFKVLGNTDRHSIKKNLIGALLFDSGETAEATRLKRTARRRYTRRKNRICYLQEIFSNEMAKVDDSFFHRLEESFLVEEDKKHERHPIFGNIVDEVAYHEKYPTIYHLRKKLVDSTDKADLRLIYLALAHMIKFRGHFLIEGDLNPDNSDVDKLFIQLVQTYNQLFEENPINASGVDAKAILSARLSKSRRLENLIAQLPGEKKNGLFGNLIALSLGLTPNFKSNFDLAEDAKLQLSKDTYDDDLDNLLAQIGDQYADLFLAAKNLSDAILLSDILRVNTEITKAPLSASMIKRYDEHHQDLTLLKALVRQQLPEKYKEIFFDQSKNGYAGYIDGGASQEEFYKFIKPILEKMDGTEELLVKLNREDLLRKQRTFDNGSIPHQIHLGELHAILRRQEDFYPFLKDNREKIEKILTFRIPYYVGPLARGNSRFAWMTRKSEETITPWNFEEVVDKGASAQSFIERMTNFDKNLPNEKVLPKHSLLYEYFTVYNELTKVKYVTEGMRKPAFLSGEQKKAIVDLLFKTNRKVTVKQLKEDYFKKIECFDSVEISGVEDRFNASLGTYHDLLKIIKDKDFLDNEENEDILEDIVLTLTLFEDREMIEERLKTYAHLFDDKVMKQLKRRRYTGWGRLSRKLINGIRDKQSGKTILDFLKSDGFANRNFMQLIHDDSLTFKEDIQKAQVSGQGDSLHEHIANLAGSPAIKKGILQTVKVVDELVKVMGRHKPENIVIEMARENQTTQKGQKNSRERMKRIEEGIKELGSQILKEHPVENTQLQNEKLYLYYLQNGRDMYVDQELDINRLSDYDVDHIVPQSFLKDDSIDNKVLTRSDKARGKSDNVPSEEVVKKMKNYWRQLLNAKLITQRKFDNLTKAERGGLSELDKAGFIKRQLVETRQITKHVAQILDSRMNTKYDENDKLIREVKVITLKSKLVSDFRKDFQFYKVREINNYHHAHDAYLNAVVGTALIKKYPKLESEFVYGDYKVYDVRKMIAKSEQEIGKATAKYFFYSNIMNFFKTEITLANGEIRKRPLIETNGETGEIVWDKGRDFATVRKVLSMPQVNIVKKTEVQTGGFSKESILPKRNSDKLIARKKDWDPKKYGGFDSPTVAYSVLVVAKVEKGKSKKLKSVKELLGITIMERSSFEKNPIDFLEAKGYKEVKKDLIIKLPKYSLFELENGRKRMLASAGELQKGNELALPSKYVNFLYLASHYEKLKGSPEDNEQKQLFVEQHKHYLDEIIEQISEFSKRVILADANLDKVLSAYNKHRDKPIREQAENIIHLFTLTNLGAPAAFKYFDTTIDRKRYTSTKEVLDATLIHQSITGLYETRIDLSQLGGDGGGGSPAPGSSGGTLNIEDEYRLHETSKGPDVPLGSTWLSDFPQAWAETGGMGLAVRQAPLIIPLKATSTPVSIKQYPMSQEARLGIKPHIQRLLDQGILVPCQSPWNTPLLPVKKPGTNDYRPVQDLREVNKRVEDIHPTVPNPYNLLSGLPPSHQWYTVLDLKDAFFCLRLHPTSQSLFAFEWRDPEMGISGQLTWTRLPQGFKNSPTLFNEALHRDLADFRIQHPDLILLQYVDDLLLAATSELDCQQGTRALLQTLGDLGYRASAKKAQICQKQVKYLGYLLKEGQRWLTEARKETVMGQPTPKTPRQLREFLGKAGFCRLFIPGFAEMAAPLYPLTKPGTLFEWGPDQQKAYQEIKQALLTAPALGLPDLTKPFELFVDEKQGYAKGVLTQKLGPWRRPVAYLSKKLDPVAAGWPPCLRMVAAIAVLTKDAGKLTMGQPLVILAPHAVEALVKQPPDRWLSNARMTHYQALLLDTDRVQFGPIVALNPATLLPLPEEGLQHDCLDILAEAHGTRPDLTDQPLPDADHTWYTDGSSFLQEGQRKAGAAVTTETEVVWAKALPAGTSAQRAELIALTQALKMAEGKKLNVYTDSRYAFATAHIHGEIYRRRGWLTSEGKEIKNKDEILALLKALFLPKRLSIIHCPGHQKGNRAEARGNRMADQAAREVATRETPETSTLLAGKRTADGSEFEKRTADGSEFESPKKKAKVE

SEQ ID NO: 2564 - protein, 2096 aa, synthetic construct
MPAAKRVKLDGGDKKYSIGLDIGTNSVGWAVITDEYKVPSKKFKVLGNTDRHSIKKNLIGALLFDSGETAEATRLKRTARRRYTRRKNRICYLQEIFSNEMAKVDDSFFHRLEESFLVEEDKKHERHPIFGNIVDEVAYHEKYPTIYHLRKKLVDSTDKADLRLIYLALAHMIKFRGHFLIEGDLNPDNSDVDKLFIQLVQTYNQLFEENPINASGVDAKAILSARLSKSRRLENLIAQLPGEKKNGLFGNLIALSLGLTPNFKSNFDLAEDAKLQLSKDTYDDDLDNLLAQIGDQYADLFLAAKNLSDAILLSDILRVNTEITKAPLSASMIKRYDEHHQDLTLLKALVRQQLPEKYKEIFFDQSKNGYAGYIDGGASQEEFYKFIKPILEKMDGTEELLVKLNREDLLRKQRTFDNGSIPHQIHLGELHAILRRQEDFYPFLKDNREKIEKILTFRIPYYVGPLARGNSRFAWMTRKSEETITPWNFEEVVDKGASAQSFIERMTNFDKNLPNEKVLPKHSLLYEYFTVYNELTKVKYVTEGMRKPAFLSGEQKKAIVDLLFKTNRKVTVKQLKEDYFKKIECFDSVEISGVEDRFNASLGTYHDLLKIIKDKDFLDNEENEDILEDIVLTLTLFEDREMIEERLKTYAHLFDDKVMKQLKRRRYTGWGRLSRKLINGIRDKQSGKTILDFLKSDGFANRNFMQLIHDDSLTFKEDIQKAQVSGQGDSLHEHIANLAGSPAIKKGILQTVKVVDELVKVMGRHKPENIVIEMARENQTTQKGQKNSRERMKRIEEGIKELGSQILKEHPVENTQLQNEKLYLYYLQNGRDMYVDQELDINRLSDYDVDHIVPQSFLKDDSIDNKVLTRSDKARGKSDNVPSEEVVKKMKNYWRQLLNAKLITQRKFDNLTKAERGGLSELDKAGFIKRQLVETRQITKHVAQILDSRMNTKYDENDKLIREVKVITLKSKLVSDFRKDFQFYKVREINNYHHAHDAYLNAVVGTALIKKYPKLESEFVYGDYKVYDVRKMIAKSEQEIGKATAKYFFYSNIMNFFKTEITLANGEIRKRPLIETNGETGEIVWDKGRDFATVRKVLSMPQVNIVKKTEVQTGGFSKESILPKRNSDKLIARKKDWDPKKYGGFDSPTVAYSVLVVAKVEKGKSKKLKSVKELLGITIMERSSFEKNPIDFLEAKGYKEVKKDLIIKLPKYSLFELENGRKRMLASAGELQKGNELALPSKYVNFLYLASHYEKLKGSPEDNEQKQLFVEQHKHYLDEIIEQISEFSKRVILADANLDKVLSAYNKHRDKPIREQAENIIHLFTLTNLGAPAAFKYFDTTIDRKRYTSTKEVLDATLIHQSITGLYETRIDLSQLGGDGGPAPGGSEAAAKGGTLNIEDEYRLHETSKGPDVPLGSTWLSDFPQAWAETGGMGLAVRQAPLIIPLKATSTPVSIKQYPMSQEARLGIKPHIQRLLDQGILVPCQSPWNTPLLPVKKPGTNDYRPVQDLREVNKRVEDIHPTVPNPYNLLSGLPPSHQWYTVLDLKDAFFCLRLHPTSQSLFAFEWRDPEMGISGQLTWTRLPQGFKNSPTLFNEALHRDLADFRIQHPDLILLQYVDDLLLAATSELDCQQGTRALLQTLGDLGYRASAKKAQICQKQVKYLGYLLKEGQRWLTEARKETVMGQPTPKTPRQLREFLGKAGFCRLFIPGFAEMAAPLYPLTKPGTLFEWGPDQQKAYQEIKQALLTAPALGLPDLTKPFELFVDEKQGYAKGVLTQKLGPWRRPVAYLSKKLDPVAAGWPPCLRMVAAIAVLTKDAGKLTMGQPLVILAPHAVEALVKQPPDRWLSNARMTHYQALLLDTDRVQFGPIVALNPATLLPLPEEGLQHDCLDILAEAHGTRPDLTDQPLPDADHTWYTDGSSFLQEGQRKAGAAVTTETEVVWAKALPAGTSAQRAELIALTQALKMAEGKKLNVYTDSRYAFATAHIHGEIYRRRGWLTSEGKEIKNKDEILALLKALFLPKRLSIIHCPGHQKGNRAEARGNRMADQAAREVATRETPETSTLLAGKRTADGSEFEKRTADGSEFESPKKKAKVE

SEQ ID NO: 2565 - protein, 2094 aa, synthetic construct
MPAAKRVKLDGGDKKYSIGLDIGTNSVGWAVITDEYKVPSKKFKVLGNTDRHSIKKNLIGALLFDSGETAEATRLKRTARRRYTRRKNRICYLQEIFSNEMAKVDDSFFHRLEESFLVEEDKKHERHPIFGNIVDEVAYHEKYPTIYHLRKKLVDSTDKADLRLIYLALAHMIKFRGHFLIEGDLNPDNSDVDKLFIQLVQTYNQLFEENPINASGVDAKAILSARLSKSRRLENLIAQLPGEKKNGLFGNLIALSLGLTPNFKSNFDLAEDAKLQLSKDTYDDDLDNLLAQIGDQYADLFLAAKNLSDAILLSDILRVNTEITKAPLSASMIKRYDEHHQDLTLLKALVRQQLPEKYKEIFFDQSKNGYAGYIDGGASQEEFYKFIKPILEKMDGTEELLVKLNREDLLRKQRTFDNGSIPHQIHLGELHAILRRQEDFYPFLKDNREKIEKILTFRIPYYVGPLARGNSRFAWMTRKSEETITPWNFEEVVDKGASAQSFIERMTNFDKNLPNEKVLPKHSLLYEYFTVYNELTKVKYVTEGMRKPAFLSGEQKKAIVDLLFKTNRKVTVKQLKEDYFKKIECFDSVEISGVEDRFNASLGTYHDLLKIIKDKDFLDNEENEDILEDIVLTLTLFEDREMIEERLKTYAHLFDDKVMKQLKRRRYTGWGRLSRKLINGIRDKQSGKTILDFLKSDGFANRNFMQLIHDDSLTFKEDIQKAQVSGQGDSLHEHIANLAGSPAIKKGILQTVKVVDELVKVMGRHKPENIVIEMARENQTTQKGQKNSRERMKRIEEGIKELGSQILKEHPVENTQLQNEKLYLYYLQNGRDMYVDQELDINRLSDYDVDHIVPQSFLKDDSIDNKVLTRSDKARGKSDNVPSEEVVKKMKNYWRQLLNAKLITQRKFDNLTKAERGGLSELDKAGFIKRQLVETRQITKHVAQILDSRMNTKYDENDKLIREVKVITLKSKLVSDFRKDFQFYKVREINNYHHAHDAYLNAVVGTALIKKYPKLESEFVYGDYKVYDVRKMIAKSEQEIGKATAKYFFYSNIMNFFKTEITLANGEIRKRPLIETNGETGEIVWDKGRDFATVRKVLSMPQVNIVKKTEVQTGGFSKESILPKRNSDKLIARKKDWDPKKYGGFDSPTVAYSVLVVAKVEKGKSKKLKSVKELLGITIMERSSFEKNPIDFLEAKGYKEVKKDLIIKLPKYSLFELENGRKRMLASAGELQKGNELALPSKYVNFLYLASHYEKLKGSPEDNEQKQLFVEQHKHYLDEIIEQISEFSKRVILADANLDKVLSAYNKHRDKPIREQAENIIHLFTLTNLGAPAAFKYFDTTIDRKRYTSTKEVLDATLIHQSITGLYETRIDLSQLGGDGGGSSGGGGGSGGTLNIEDEYRLHETSKGPDVPLGSTWLSDFPQAWAETGGMGLAVRQAPLIIPLKATSTPVSIKQYPMSQEARLGIKPHIQRLLDQGILVPCQSPWNTPLLPVKKPGTNDYRPVQDLREVNKRVEDIHPTVPNPYNLLSGLPPSHQWYTVLDLKDAFFCLRLHPTSQSLFAFEWRDPEMGISGQLTWTRLPQGFKNSPTLFNEALHRDLADFRIQHPDLILLQYVDDLLLAATSELDCQQGTRALLQTLGDLGYRASAKKAQICQKQVKYLGYLLKEGQRWLTEARKETVMGQPTPKTPRQLREFLGKAGFCRLFIPGFAEMAAPLYPLTKPGTLFEWGPDQQKAYQEIKQALLTAPALGLPDLTKPFELFVDEKQGYAKGVLTQKLGPWRRPVAYLSKKLDPVAAGWPPCLRMVAAIAVLTKDAGKLTMGQPLVILAPHAVEALVKQPPDRWLSNARMTHYQALLLDTDRVQFGPIVALNPATLLPLPEEGLQHDCLDILAEAHGTRPDLTDQPLPDADHTWYTDGSSFLQEGQRKAGAAVTTETEVVWAKALPAGTSAQRAELIALTQALKMAEGKKLNVYTDSRYAFATAHIHGEIYRRRGWLTSEGKEIKNKDEILALLKALFLPKRLSIIHCPGHQKGNRAEARGNRMADQAAREVATRETPETSTLLAGKRTADGSEFEKRTADGSEFESPKKKAKVE

SEQ ID NO: 2566 - protein, 2115 aa, synthetic construct
MPAAKRVKLDGGDKKYSIGLDIGTNSVGWAVITDEYKVPSKKFKVLGNTDRHSIKKNLIGALLFDSGETAEATRLKRTARRRYTRRKNRICYLQEIFSNEMAKVDDSFFHRLEESFLVEEDKKHERHPIFGNIVDEVAYHEKYPTIYHLRKKLVDSTDKADLRLIYLALAHMIKFRGHFLIEGDLNPDNSDVDKLFIQLVQTYNQLFEENPINASGVDAKAILSARLSKSRRLENLIAQLPGEKKNGLFGNLIALSLGLTPNFKSNFDLAEDAKLQLSKDTYDDDLDNLLAQIGDQYADLFLAAKNLSDAILLSDILRVNTEITKAPLSASMIKRYDEHHQDLTLLKALVRQQLPEKYKEIFFDQSKNGYAGYIDGGASQEEFYKFIKPILEKMDGTEELLVKLNREDLLRKQRTFDNGSIPHQIHLGELHAILRRQEDFYPFLKDNREKIEKILTFRIPYYVGPLARGNSRFAWMTRKSEETITPWNFEEVVDKGASAQSFIERMTNFDKNLPNEKVLPKHSLLYEYFTVYNELTKVKYVTEGMRKPAFLSGEQKKAIVDLLFKTNRKVTVKQLKEDYFKKIECFDSVEISGVEDRFNASLGTYHDLLKIIKDKDFLDNEENEDILEDIVLTLTLFEDREMIEERLKTYAHLFDDKVMKQLKRRRYTGWGRLSRKLINGIRDKQSGKTILDFLKSDGFANRNFMQLIHDDSLTFKEDIQKAQVSGQGDSLHEHIANLAGSPAIKKGILQTVKVVDELVKVMGRHKPENIVIEMARENQTTQKGQKNSRERMKRIEEGIKELGSQILKEHPVENTQLQNEKLYLYYLQNGRDMYVDQELDINRLSDYDVDHIVPQSFLKDDSIDNKVLTRSDKARGKSDNVPSEEVVKKMKNYWRQLLNAKLITQRKFDNLTKAERGGLSELDKAGFIKRQLVETRQITKHVAQILDSRMNTKYDENDKLIREVKVITLKSKLVSDFRKDFQFYKVREINNYHHAHDAYLNAVVGTALIKKYPKLESEFVYGDYKVYDVRKMIAKSEQEIGKATAKYFFYSNIMNFFKTEITLANGEIRKRPLIETNGETGEIVWDKGRDFATVRKVLSMPQVNIVKKTEVQTGGFSKESILPKRNSDKLIARKKDWDPKKYGGFDSPTVAYSVLVVAKVEKGKSKKLKSVKELLGITIMERSSFEKNPIDFLEAKGYKEVKKDLIIKLPKYSLFELENGRKRMLASAGELQKGNELALPSKYVNFLYLASHYEKLKGSPEDNEQKQLFVEQHKHYLDEIIEQISEFSKRVILADANLDKVLSAYNKHRDKPIREQAENIIHLFTLTNLGAPAAFKYFDTTIDRKRYTSTKEVLDATLIHQSITGLYETRIDLSQLGGDGGGGGGSGGGGSGGGGSGGGGSGGGGSGGGGSGGTLNIEDEYRLHETSKGPDVPLGSTWLSDFPQAWAETGGMGLAVRQAPLIIPLKATSTPVSIKQYPMSQEARLGIKPHIQRLLDQGILVPCQSPWNTPLLPVKKPGTNDYRPVQDLREVNKRVEDIHPTVPNPYNLLSGLPPSHQWYTVLDLKDAFFCLRLHPTSQSLFAFEWRDPEMGISGQLTWTRLPQGFKNSPTLFNEALHRDLADFRIQHPDLILLQYVDDLLLAATSELDCQQGTRALLQTLGDLGYRASAKKAQICQKQVKYLGYLLKEGQRWLTEARKETVMGQPTPKTPRQLREFLGKAGFCRLFIPGFAEMAAPLYPLTKPGTLFEWGPDQQKAYQEIKQALLTAPALGLPDLTKPFELFVDEKQGYAKGVLTQKLGPWRRPVAYLSKKLDPVAAGWPPCLRMVAAIAVLTKDAGKLTMGQPLVILAPHAVEALVKQPPDRWLSNARMTHYQALLLDTDRVQFGPIVALNPATLLPLPEEGLQHDCLDILAEAHGTRPDLTDQPLPDADHTWYTDGSSFLQEGQRKAGAAVTTETEVVWAKALPAGTSAQRAELIALTQALKMAEGKKLNVYTDSRYAFATAHIHGEIYRRRGWLTSEGKEIKNKDEILALLKALFLPKRLSIIHCPGHQKGNRAEARGNRMADQAAREVATRETPETSTLLAGKRTADGSEFEKRTADGSEFESPKKKAKVE

SEQ ID NO: 2567 - protein, 2094 aa, synthetic construct
MPAAKRVKLDGGDKKYSIGLDIGTNSVGWAVITDEYKVPSKKFKVLGNTDRHSIKKNLIGALLFDSGETAEATRLKRTARRRYTRRKNRICYLQEIFSNEMAKVDDSFFHRLEESFLVEEDKKHERHPIFGNIVDEVAYHEKYPTIYHLRKKLVDSTDKADLRLIYLALAHMIKFRGHFLIEGDLNPDNSDVDKLFIQLVQTYNQLFEENPINASGVDAKAILSARLSKSRRLENLIAQLPGEKKNGLFGNLIALSLGLTPNFKSNFDLAEDAKLQLSKDTYDDDLDNLLAQIGDQYADLFLAAKNLSDAILLSDILRVNTEITKAPLSASMIKRYDEHHQDLTLLKALVRQQLPEKYKEIFFDQSKNGYAGYIDGGASQEEFYKFIKPILEKMDGTEELLVKLNREDLLRKQRTFDNGSIPHQIHLGELHAILRRQEDFYPFLKDNREKIEKILTFRIPYYVGPLARGNSRFAWMTRKSEETITPWNFEEVVDKGASAQSFIERMTNFDKNLPNEKVLPKHSLLYEYFTVYNELTKVKYVTEGMRKPAFLSGEQKKAIVDLLFKTNRKVTVKQLKEDYFKKIECFDSVEISGVEDRFNASLGTYHDLLKIIKDKDFLDNEENEDILEDIVLTLTLFEDREMIEERLKTYAHLFDDKVMKQLKRRRYTGWGRLSRKLINGIRDKQSGKTILDFLKSDGFANRNFMQLIHDDSLTFKEDIQKAQVSGQGDSLHEHIANLAGSPAIKKGILQTVKVVDELVKVMGRHKPENIVIEMARENQTTQKGQKNSRERMKRIEEGIKELGSQILKEHPVENTQLQNEKLYLYYLQNGRDMYVDQELDINRLSDYDVDHIVPQSFLKDDSIDNKVLTRSDKARGKSDNVPSEEVVKKMKNYWRQLLNAKLITQRKFDNLTKAERGGLSELDKAGFIKRQLVETRQITKHVAQILDSRMNTKYDENDKLIREVKVITLKSKLVSDFRKDFQFYKVREINNYHHAHDAYLNAVVGTALIKKYPKLESEFVYGDYKVYDVRKMIAKSEQEIGKATAKYFFYSNIMNFFKTEITLANGEIRKRPLIETNGETGEIVWDKGRDFATVRKVLSMPQVNIVKKTEVQTGGFSKESILPKRNSDKLIARKKDWDPKKYGGFDSPTVAYSVLVVAKVEKGKSKKLKSVKELLGITIMERSSFEKNPIDFLEAKGYKEVKKDLIIKLPKYSLFELENGRKRMLASAGELQKGNELALPSKYVNFLYLASHYEKLKGSPEDNEQKQLFVEQHKHYLDEIIEQISEFSKRVILADANLDKVLSAYNKHRDKPIREQAENIIHLFTLTNLGAPAAFKYFDTTIDRKRYTSTKEVLDATLIHQSITGLYETRIDLSQLGGDGGGSSGGSGGGGGTLNIEDEYRLHETSKGPDVPLGSTWLSDFPQAWAETGGMGLAVRQAPLIIPLKATSTPVSIKQYPMSQEARLGIKPHIQRLLDQGILVPCQSPWNTPLLPVKKPGTNDYRPVQDLREVNKRVEDIHPTVPNPYNLLSGLPPSHQWYTVLDLKDAFFCLRLHPTSQSLFAFEWRDPEMGISGQLTWTRLPQGFKNSPTLFNEALHRDLADFRIQHPDLILLQYVDDLLLAATSELDCQQGTRALLQTLGDLGYRASAKKAQICQKQVKYLGYLLKEGQRWLTEARKETVMGQPTPKTPRQLREFLGKAGFCRLFIPGFAEMAAPLYPLTKPGTLFEWGPDQQKAYQEIKQALLTAPALGLPDLTKPFELFVDEKQGYAKGVLTQKLGPWRRPVAYLSKKLDPVAAGWPPCLRMVAAIAVLTKDAGKLTMGQPLVILAPHAVEALVKQPPDRWLSNARMTHYQALLLDTDRVQFGPIVALNPATLLPLPEEGLQHDCLDILAEAHGTRPDLTDQPLPDADHTWYTDGSSFLQEGQRKAGAAVTTETEVVWAKALPAGTSAQRAELIALTQALKMAEGKKLNVYTDSRYAFATAHIHGEIYRRRGWLTSEGKEIKNKDEILALLKALFLPKRLSIIHCPGHQKGNRAEARGNRMADQAAREVATRETPETSTLLAGKRTADGSEFEKRTADGSEFESPKKKAKVE

SEQ ID NO: 2568 - protein, 2090 aa, synthetic construct
MPAAKRVKLDGGDKKYSIGLDIGTNSVGWAVITDEYKVPSKKFKVLGNTDRHSIKKNLIGALLFDSGETAEATRLKRTARRRYTRRKNRICYLQEIFSNEMAKVDDSFFHRLEESFLVEEDKKHERHPIFGNIVDEVAYHEKYPTIYHLRKKLVDSTDKADLRLIYLALAHMIKFRGHFLIEGDLNPDNSDVDKLFIQLVQTYNQLFEENPINASGVDAKAILSARLSKSRRLENLIAQLPGEKKNGLFGNLIALSLGLTPNFKSNFDLAEDAKLQLSKDTYDDDLDNLLAQIGDQYADLFLAAKNLSDAILLSDILRVNTEITKAPLSASMIKRYDEHHQDLTLLKALVRQQLPEKYKEIFFDQSKNGYAGYIDGGASQEEFYKFIKPILEKMDGTEELLVKLNREDLLRKQRTFDNGSIPHQIHLGELHAILRRQEDFYPFLKDNREKIEKILTFRIPYYVGPLARGNSRFAWMTRKSEETITPWNFEEVVDKGASAQSFIERMTNFDKNLPNEKVLPKHSLLYEYFTVYNELTKVKYVTEGMRKPAFLSGEQKKAIVDLLFKTNRKVTVKQLKEDYFKKIECFDSVEISGVEDRFNASLGTYHDLLKIIKDKDFLDNEENEDILEDIVLTLTLFEDREMIEERLKTYAHLFDDKVMKQLKRRRYTGWGRLSRKLINGIRDKQSGKTILDFLKSDGFANRNFMQLIHDDSLTFKEDIQKAQVSGQGDSLHEHIANLAGSPAIKKGILQTVKVVDELVKVMGRHKPENIVIEMARENQTTQKGQKNSRERMKRIEEGIKELGSQILKEHPVENTQLQNEKLYLYYLQNGRDMYVDQELDINRLSDYDVDHIVPQSFLKDDSIDNKVLTRSDKARGKSDNVPSEEVVKKMKNYWRQLLNAKLITQRKFDNLTKAERGGLSELDKAGFIKRQLVETRQITKHVAQILDSRMNTKYDENDKLIREVKVITLKSKLVSDFRKDFQFYKVREINNYHHAHDAYLNAVVGTALIKKYPKLESEFVYGDYKVYDVRKMIAKSEQEIGKATAKYFFYSNIMNFFKTEITLANGEIRKRPLIETNGETGEIVWDKGRDFATVRKVLSMPQVNIVKKTEVQTGGFSKESILPKRNSDKLIARKKDWDPKKYGGFDSPTVAYSVLVVAKVEKGKSKKLKSVKELLGITIMERSSFEKNPIDFLEAKGYKEVKKDLIIKLPKYSLFELENGRKRMLASAGELQKGNELALPSKYVNFLYLASHYEKLKGSPEDNEQKQLFVEQHKHYLDEIIEQISEFSKRVILADANLDKVLSAYNKHRDKPIREQAENIIHLFTLTNLGAPAAFKYFDTTIDRKRYTSTKEVLDATLIHQSITGLYETRIDLSQLGGDGGPAPAPGGTLNIEDEYRLHETSKGPDVPLGSTWLSDFPQAWAETGGMGLAVRQAPLIIPLKATSTPVSIKQYPMSQEARLGIKPHIQRLLDQGILVPCQSPWNTPLLPVKKPGTNDYRPVQDLREVNKRVEDIHPTVPNPYNLLSGLPPSHQWYTVLDLKDAFFCLRLHPTSQSLFAFEWRDPEMGISGQLTWTRLPQGFKNSPTLFNEALHRDLADFRIQHPDLILLQYVDDLLLAATSELDCQQGTRALLQTLGDLGYRASAKKAQICQKQVKYLGYLLKEGQRWLTEARKETVMGQPTPKTPRQLREFLGKAGFCRLFIPGFAEMAAPLYPLTKPGTLFEWGPDQQKAYQEIKQALLTAPALGLPDLTKPFELFVDEKQGYAKGVLTQKLGPWRRPVAYLSKKLDPVAAGWPPCLRMVAAIAVLTKDAGKLTMGQPLVILAPHAVEALVKQPPDRWLSNARMTHYQALLLDTDRVQFGPIVALNPATLLPLPEEGLQHDCLDILAEAHGTRPDLTDQPLPDADHTWYTDGSSFLQEGQRKAGAAVTTETEVVWAKALPAGTSAQRAELIALTQALKMAEGKKLNVYTDSRYAFATAHIHGEIYRRRGWLTSEGKEIKNKDEILALLKALFLPKRLSIIHCPGHQKGNRAEARGNRMADQAAREVATRETPETSTLLAGKRTADGSEFEKRTADGSEFESPKKKAKVE

SEQ ID NO: 2569 - protein, 2095 aa, synthetic construct
MPAAKRVKLDGGDKKYSIGLDIGTNSVGWAVITDEYKVPSKKFKVLGNTDRHSIKKNLIGALLFDSGETAEATRLKRTARRRYTRRKNRICYLQEIFSNEMAKVDDSFFHRLEESFLVEEDKKHERHPIFGNIVDEVAYHEKYPTIYHLRKKLVDSTDKADLRLIYLALAHMIKFRGHFLIEGDLNPDNSDVDKLFIQLVQTYNQLFEENPINASGVDAKAILSARLSKSRRLENLIAQLPGEKKNGLFGNLIALSLGLTPNFKSNFDLAEDAKLQLSKDTYDDDLDNLLAQIGDQYADLFLAAKNLSDAILLSDILRVNTEITKAPLSASMIKRYDEHHQDLTLLKALVRQQLPEKYKEIFFDQSKNGYAGYIDGGASQEEFYKFIKPILEKMDGTEELLVKLNREDLLRKQRTFDNGSIPHQIHLGELHAILRRQEDFYPFLKDNREKIEKILTFRIPYYVGPLARGNSRFAWMTRKSEETITPWNFEEVVDKGASAQSFIERMTNFDKNLPNEKVLPKHSLLYEYFTVYNELTKVKYVTEGMRKPAFLSGEQKKAIVDLLFKTNRKVTVKQLKEDYFKKIECFDSVEISGVEDRFNASLGTYHDLLKIIKDKDFLDNEENEDILEDIVLTLTLFEDREMIEERLKTYAHLFDDKVMKQLKRRRYTGWGRLSRKLINGIRDKQSGKTILDFLKSDGFANRNFMQLIHDDSLTFKEDIQKAQVSGQGDSLHEHIANLAGSPAIKKGILQTVKVVDELVKVMGRHKPENIVIEMARENQTTQKGQKNSRERMKRIEEGIKELGSQILKEHPVENTQLQNEKLYLYYLQNGRDMYVDQELDINRLSDYDVDHIVPQSFLKDDSIDNKVLTRSDKARGKSDNVPSEEVVKKMKNYWRQLLNAKLITQRKFDNLTKAERGGLSELDKAGFIKRQLVETRQITKHVAQILDSRMNTKYDENDKLIREVKVITLKSKLVSDFRKDFQFYKVREINNYHHAHDAYLNAVVGTALIKKYPKLESEFVYGDYKVYDVRKMIAKSEQEIGKATAKYFFYSNIMNFFKTEITLANGEIRKRPLIETNGETGEIVWDKGRDFATVRKVLSMPQVNIVKKTEVQTGGFSKESILPKRNSDKLIARKKDWDPKKYGGFDSPTVAYSVLVVAKVEKGKSKKLKSVKELLGITIMERSSFEKNPIDFLEAKGYKEVKKDLIIKLPKYSLFELENGRKRMLASAGELQKGNELALPSKYVNFLYLASHYEKLKGSPEDNEQKQLFVEQHKHYLDEIIEQISEFSKRVILADANLDKVLSAYNKHRDKPIREQAENIIHLFTLTNLGAPAAFKYFDTTIDRKRYTSTKEVLDATLIHQSITGLYETRIDLSQLGGDGGEAAAKEAAAKGGTLNIEDEYRLHETSKGPDVPLGSTWLSDFPQAWAETGGMGLAVRQAPLIIPLKATSTPVSIKQYPMSQEARLGIKPHIQRLLDQGILVPCQSPWNTPLLPVKKPGTNDYRPVQDLREVNKRVEDIHPTVPNPYNLLSGLPPSHQWYTVLDLKDAFFCLRLHPTSQSLFAFEWRDPEMGISGQLTWTRLPQGFKNSPTLFNEALHRDLADFRIQHPDLILLQYVDDLLLAATSELDCQQGTRALLQTLGDLGYRASAKKAQICQKQVKYLGYLLKEGQRWLTEARKETVMGQPTPKTPRQLREFLGKAGFCRLFIPGFAEMAAPLYPLTKPGTLFEWGPDQQKAYQEIKQALLTAPALGLPDLTKPFELFVDEKQGYAKGVLTQKLGPWRRPVAYLSKKLDPVAAGWPPCLRMVAAIAVLTKDAGKLTMGQPLVILAPHAVEALVKQPPDRWLSNARMTHYQALLLDTDRVQFGPIVALNPATLLPLPEEGLQHDCLDILAEAHGTRPDLTDQPLPDADHTWYTDGSSFLQEGQRKAGAAVTTETEVVWAKALPAGTSAQRAELIALTQALKMAEGKKLNVYTDSRYAFATAHIHGEIYRRRGWLTSEGKEIKNKDEILALLKALFLPKRLSIIHCPGHQKGNRAEARGNRMADQAAREVATRETPETSTLLAGKRTADGSEFEKRTADGSEFESPKKKAKVE

SEQ ID NO: 2570 - protein, 2096 aa, synthetic construct
MPAAKRVKLDGGDKKYSIGLDIGTNSVGWAVITDEYKVPSKKFKVLGNTDRHSIKKNLIGALLFDSGETAEATRLKRTARRRYTRRKNRICYLQEIFSNEMAKVDDSFFHRLEESFLVEEDKKHERHPIFGNIVDEVAYHEKYPTIYHLRKKLVDSTDKADLRLIYLALAHMIKFRGHFLIEGDLNPDNSDVDKLFIQLVQTYNQLFEENPINASGVDAKAILSARLSKSRRLENLIAQLPGEKKNGLFGNLIALSLGLTPNFKSNFDLAEDAKLQLSKDTYDDDLDNLLAQIGDQYADLFLAAKNLSDAILLSDILRVNTEITKAPLSASMIKRYDEHHQDLTLLKALVRQQLPEKYKEIFFDQSKNGYAGYIDGGASQEEFYKFIKPILEKMDGTEELLVKLNREDLLRKQRTFDNGSIPHQIHLGELHAILRRQEDFYPFLKDNREKIEKILTFRIPYYVGPLARGNSRFAWMTRKSEETITPWNFEEVVDKGASAQSFIERMTNFDKNLPNEKVLPKHSLLYEYFTVYNELTKVKYVTEGMRKPAFLSGEQKKAIVDLLFKTNRKVTVKQLKEDYFKKIECFDSVEISGVEDRFNASLGTYHDLLKIIKDKDFLDNEENEDILEDIVLTLTLFEDREMIEERLKTYAHLFDDKVMKQLKRRRYTGWGRLSRKLINGIRDKQSGKTILDFLKSDGFANRNFMQLIHDDSLTFKEDIQKAQVSGQGDSLHEHIANLAGSPAIKKGILQTVKVVDELVKVMGRHKPENIVIEMARENQTTQKGQKNSRERMKRIEEGIKELGSQILKEHPVENTQLQNEKLYLYYLQNGRDMYVDQELDINRLSDYDVDHIVPQSFLKDDSIDNKVLTRSDKARGKSDNVPSEEVVKKMKNYWRQLLNAKLITQRKFDNLTKAERGGLSELDKAGFIKRQLVETRQITKHVAQILDSRMNTKYDENDKLIREVKVITLKSKLVSDFRKDFQFYKVREINNYHHAHDAYLNAVVGTALIKKYPKLESEFVYGDYKVYDVRKMIAKSEQEIGKATAKYFFYSNIMNFFKTEITLANGEIRKRPLIETNGETGEIVWDKGRDFATVRKVLSMPQVNIVKKTEVQTGGFSKESILPKRNSDKLIARKKDWDPKKYGGFDSPTVAYSVLVVAKVEKGKSKKLKSVKELLGITIMERSSFEKNPIDFLEAKGYKEVKKDLIIKLPKYSLFELENGRKRMLASAGELQKGNELALPSKYVNFLYLASHYEKLKGSPEDNEQKQLFVEQHKHYLDEIIEQISEFSKRVILADANLDKVLSAYNKHRDKPIREQAENIIHLFTLTNLGAPAAFKYFDTTIDRKRYTSTKEVLDATLIHQSITGLYETRIDLSQLGGDGGGSSGGSEAAAKGGTLNIEDEYRLHETSKGPDVPLGSTWLSDFPQAWAETGGMGLAVRQAPLIIPLKATSTPVSIKQYPMSQEARLGIKPHIQRLLDQGILVPCQSPWNTPLLPVKKPGTNDYRPVQDLREVNKRVEDIHPTVPNPYNLLSGLPPSHQWYTVLDLKDAFFCLRLHPTSQSLFAFEWRDPEMGISGQLTWTRLPQGFKNSPTLFNEALHRDLADFRIQHPDLILLQYVDDLLLAATSELDCQQGTRALLQTLGDLGYRASAKKAQICQKQVKYLGYLLKEGQRWLTEARKETVMGQPTPKTPRQLREFLGKAGFCRLFIPGFAEMAAPLYPLTKPGTLFEWGPDQQKAYQEIKQALLTAPALGLPDLTKPFELFVDEKQGYAKGVLTQKLGPWRRPVAYLSKKLDPVAAGWPPCLRMVAAIAVLTKDAGKLTMGQPLVILAPHAVEALVKQPPDRWLSNARMTHYQALLLDTDRVQFGPIVALNPATLLPLPEEGLQHDCLDILAEAHGTRPDLTDQPLPDADHTWYTDGSSFLQEGQRKAGAAVTTETEVVWAKALPAGTSAQRAELIALTQALKMAEGKKLNVYTDSRYAFATAHIHGEIYRRRGWLTSEGKEIKNKDEILALLKALFLPKRLSIIHCPGHQKGNRAEARGNRMADQAAREVATRETPETSTLLAGKRTADGSEFEKRTADGSEFESPKKKAKVE

SEQ ID NO: 2571 - protein, 2094 aa, synthetic construct
MPAAKRVKLDGGDKKYSIGLDIGTNSVGWAVITDEYKVPSKKFKVLGNTDRHSIKKNLIGALLFDSGETAEATRLKRTARRRYTRRKNRICYLQEIFSNEMAKVDDSFFHRLEESFLVEEDKKHERHPIFGNIVDEVAYHEKYPTIYHLRKKLVDSTDKADLRLIYLALAHMIKFRGHFLIEGDLNPDNSDVDKLFIQLVQTYNQLFEENPINASGVDAKAILSARLSKSRRLENLIAQLPGEKKNGLFGNLIALSLGLTPNFKSNFDLAEDAKLQLSKDTYDDDLDNLLAQIGDQYADLFLAAKNLSDAILLSDILRVNTEITKAPLSASMIKRYDEHHQDLTLLKALVRQQLPEKYKEIFFDQSKNGYAGYIDGGASQEEFYKFIKPILEKMDGTEELLVKLNREDLLRKQRTFDNGSIPHQIHLGELHAILRRQEDFYPFLKDNREKIEKILTFRIPYYVGPLARGNSRFAWMTRKSEETITPWNFEEVVDKGASAQSFIERMTNFDKNLPNEKVLPKHSLLYEYFTVYNELTKVKYVTEGMRKPAFLSGEQKKAIVDLLFKTNRKVTVKQLKEDYFKKIECFDSVEISGVEDRFNASLGTYHDLLKIIKDKDFLDNEENEDILEDIVLTLTLFEDREMIEERLKTYAHLFDDKVMKQLKRRRYTGWGRLSRKLINGIRDKQSGKTILDFLKSDGFANRNFMQLIHDDSLTFKEDIQKAQVSGQGDSLHEHIANLAGSPAIKKGILQTVKVVDELVKVMGRHKPENIVIEMARENQTTQKGQKNSRERMKRIEEGIKELGSQILKEHPVENTQLQNEKLYLYYLQNGRDMYVDQELDINRLSDYDVDHIVPQSFLKDDSIDNKVLTRSDKARGKSDNVPSEEVVKKMKNYWRQLLNAKLITQRKFDNLTKAERGGLSELDKAGFIKRQLVETRQITKHVAQILDSRMNTKYDENDKLIREVKVITLKSKLVSDFRKDFQFYKVREINNYHHAHDAYLNAVVGTALIKKYPKLESEFVYGDYKVYDVRKMIAKSEQEIGKATAKYFFYSNIMNFFKTEITLANGEIRKRPLIETNGETGEIVWDKGRDFATVRKVLSMPQVNIVKKTEVQTGGFSKESILPKRNSDKLIARKKDWDPKKYGGFDSPTVAYSVLVVAKVEKGKSKKLKSVKELLGITIMERSSFEKNPIDFLEAKGYKEVKKDLIIKLPKYSLFELENGRKRMLASAGELQKGNELALPSKYVNFLYLASHYEKLKGSPEDNEQKQLFVEQHKHYLDEIIEQISEFSKRVILADANLDKVLSAYNKHRDKPIREQAENIIHLFTLTNLGAPAAFKYFDTTIDRKRYTSTKEVLDATLIHQSITGLYETRIDLSQLGGDGGGGGGSSGGSGGTLNIEDEYRLHETSKGPDVPLGSTWLSDFPQAWAETGGMGLAVRQAPLIIPLKATSTPVSIKQYPMSQEARLGIKPHIQRLLDQGILVPCQSPWNTPLLPVKKPGTNDYRPVQDLREVNKRVEDIHPTVPNPYNLLSGLPPSHQWYTVLDLKDAFFCLRLHPTSQSLFAFEWRDPEMGISGQLTWTRLPQGFKNSPTLFNEALHRDLADFRIQHPDLILLQYVDDLLLAATSELDCQQGTRALLQTLGDLGYRASAKKAQICQKQVKYLGYLLKEGQRWLTEARKETVMGQPTPKTPRQLREFLGKAGFCRLFIPGFAEMAAPLYPLTKPGTLFEWGPDQQKAYQEIKQALLTAPALGLPDLTKPFELFVDEKQGYAKGVLTQKLGPWRRPVAYLSKKLDPVAAGWPPCLRMVAAIAVLTKDAGKLTMGQPLVILAPHAVEALVKQPPDRWLSNARMTHYQALLLDTDRVQFGPIVALNPATLLPLPEEGLQHDCLDILAEAHGTRPDLTDQPLPDADHTWYTDGSSFLQEGQRKAGAAVTTETEVVWAKALPAGTSAQRAELIALTQALKMAEGKKLNVYTDSRYAFATAHIHGEIYRRRGWLTSEGKEIKNKDEILALLKALFLPKRLSIIHCPGHQKGNRAEARGNRMADQAAREVATRETPETSTLLAGKRTADGSEFEKRTADGSEFESPKKKAKVE

SEQ ID NO: 2572 - protein, 2091 aa, synthetic construct
MPAAKRVKLDGGDKKYSIGLDIGTNSVGWAVITDEYKVPSKKFKVLGNTDRHSIKKNLIGALLFDSGETAEATRLKRTARRRYTRRKNRICYLQEIFSNEMAKVDDSFFHRLEESFLVEEDKKHERHPIFGNIVDEVAYHEKYPTIYHLRKKLVDSTDKADLRLIYLALAHMIKFRGHFLIEGDLNPDNSDVDKLFIQLVQTYNQLFEENPINASGVDAKAILSARLSKSRRLENLIAQLPGEKKNGLFGNLIALSLGLTPNFKSNFDLAEDAKLQLSKDTYDDDLDNLLAQIGDQYADLFLAAKNLSDAILLSDILRVNTEITKAPLSASMIKRYDEHHQDLTLLKALVRQQLPEKYKEIFFDQSKNGYAGYIDGGASQEEFYKFIKPILEKMDGTEELLVKLNREDLLRKQRTFDNGSIPHQIHLGELHAILRRQEDFYPFLKDNREKIEKILTFRIPYYVGPLARGNSRFAWMTRKSEETITPWNFEEVVDKGASAQSFIERMTNFDKNLPNEKVLPKHSLLYEYFTVYNELTKVKYVTEGMRKPAFLSGEQKKAIVDLLFKTNRKVTVKQLKEDYFKKIECFDSVEISGVEDRFNASLGTYHDLLKIIKDKDFLDNEENEDILEDIVLTLTLFEDREMIEERLKTYAHLFDDKVMKQLKRRRYTGWGRLSRKLINGIRDKQSGKTILDFLKSDGFANRNFMQLIHDDSLTFKEDIQKAQVSGQGDSLHEHIANLAGSPAIKKGILQTVKVVDELVKVMGRHKPENIVIEMARENQTTQKGQKNSRERMKRIEEGIKELGSQILKEHPVENTQLQNEKLYLYYLQNGRDMYVDQELDINRLSDYDVDHIVPQSFLKDDSIDNKVLTRSDKARGKSDNVPSEEVVKKMKNYWRQLLNAKLITQRKFDNLTKAERGGLSELDKAGFIKRQLVETRQITKHVAQILDSRMNTKYDENDKLIREVKVITLKSKLVSDFRKDFQFYKVREINNYHHAHDAYLNAVVGTALIKKYPKLESEFVYGDYKVYDVRKMIAKSEQEIGKATAKYFFYSNIMNFFKTEITLANGEIRKRPLIETNGETGEIVWDKGRDFATVRKVLSMPQVNIVKKTEVQTGGFSKESILPKRNSDKLIARKKDWDPKKYGGFDSPTVAYSVLVVAKVEKGKSKKLKSVKELLGITIMERSSFEKNPIDFLEAKGYKEVKKDLIIKLPKYSLFELENGRKRMLASAGELQKGNELALPSKYVNFLYLASHYEKLKGSPEDNEQKQLFVEQHKHYLDEIIEQISEFSKRVILADANLDKVLSAYNKHRDKPIREQAENIIHLFTLTNLGAPAAFKYFDTTIDRKRYTSTKEVLDATLIHQSITGLYETRIDLSQLGGDGGGSSPAPGGTLNIEDEYRLHETSKGPDVPLGSTWLSDFPQAWAETGGMGLAVRQAPLIIPLKATSTPVSIKQYPMSQEARLGIKPHIQRLLDQGILVPCQSPWNTPLLPVKKPGTNDYRPVQDLREVNKRVEDIHPTVPNPYNLLSGLPPSHQWYTVLDLKDAFFCLRLHPTSQSLFAFEWRDPEMGISGQLTWTRLPQGFKNSPTLFNEALHRDLADFRIQHPDLILLQYVDDLLLAATSELDCQQGTRALLQTLGDLGYRASAKKAQICQKQVKYLGYLLKEGQRWLTEARKETVMGQPTPKTPRQLREFLGKAGFCRLFIPGFAEMAAPLYPLTKPGTLFEWGPDQQKAYQEIKQALLTAPALGLPDLTKPFELFVDEKQGYAKGVLTQKLGPWRRPVAYLSKKLDPVAAGWPPCLRMVAAIAVLTKDAGKLTMGQPLVILAPHAVEALVKQPPDRWLSNARMTHYQALLLDTDRVQFGPIVALNPATLLPLPEEGLQHDCLDILAEAHGTRPDLTDQPLPDADHTWYTDGSSFLQEGQRKAGAAVTTETEVVWAKALPAGTSAQRAELIALTQALKMAEGKKLNVYTDSRYAFATAHIHGEIYRRRGWLTSEGKEIKNKDEILALLKALFLPKRLSIIHCPGHQKGNRAEARGNRMADQAAREVATRETPETSTLLAGKRTADGSEFEKRTADGSEFESPKKKAKVE

SEQ ID NO: 2573 - protein, 2094 aa, synthetic construct
MPAAKRVKLDGGDKKYSIGLDIGTNSVGWAVITDEYKVPSKKFKVLGNTDRHSIKKNLIGALLFDSGETAEATRLKRTARRRYTRRKNRICYLQEIFSNEMAKVDDSFFHRLEESFLVEEDKKHERHPIFGNIVDEVAYHEKYPTIYHLRKKLVDSTDKADLRLIYLALAHMIKFRGHFLIEGDLNPDNSDVDKLFIQLVQTYNQLFEENPINASGVDAKAILSARLSKSRRLENLIAQLPGEKKNGLFGNLIALSLGLTPNFKSNFDLAEDAKLQLSKDTYDDDLDNLLAQIGDQYADLFLAAKNLSDAILLSDILRVNTEITKAPLSASMIKRYDEHHQDLTLLKALVRQQLPEKYKEIFFDQSKNGYAGYIDGGASQEEFYKFIKPILEKMDGTEELLVKLNREDLLRKQRTFDNGSIPHQIHLGELHAILRRQEDFYPFLKDNREKIEKILTFRIPYYVGPLARGNSRFAWMTRKSEETITPWNFEEVVDKGASAQSFIERMTNFDKNLPNEKVLPKHSLLYEYFTVYNELTKVKYVTEGMRKPAFLSGEQKKAIVDLLFKTNRKVTVKQLKEDYFKKIECFDSVEISGVEDRFNASLGTYHDLLKIIKDKDFLDNEENEDILEDIVLTLTLFEDREMIEERLKTYAHLFDDKVMKQLKRRRYTGWGRLSRKLINGIRDKQSGKTILDFLKSDGFANRNFMQLIHDDSLTFKEDIQKAQVSGQGDSLHEHIANLAGSPAIKKGILQTVKVVDELVKVMGRHKPENIVIEMARENQTTQKGQKNSRERMKRIEEGIKELGSQILKEHPVENTQLQNEKLYLYYLQNGRDMYVDQELDINRLSDYDVDHIVPQSFLKDDSIDNKVLTRSDKARGKSDNVPSEEVVKKMKNYWRQLLNAKLITQRKFDNLTKAERGGLSELDKAGFIKRQLVETRQITKHVAQILDSRMNTKYDENDKLIREVKVITLKSKLVSDFRKDFQFYKVREINNYHHAHDAYLNAVVGTALIKKYPKLESEFVYGDYKVYDVRKMIAKSEQEIGKATAKYFFYSNIMNFFKTEITLANGEIRKRPLIETNGETGEIVWDKGRDFATVRKVLSMPQVNIVKKTEVQTGGFSKESILPKRNSDKLIARKKDWDPKKYGGFDSPTVAYSVLVVAKVEKGKSKKLKSVKELLGITIMERSSFEKNPIDFLEAKGYKEVKKDLIIKLPKYSLFELENGRKRMLASAGELQKGNELALPSKYVNFLYLASHYEKLKGSPEDNEQKQLFVEQHKHYLDEIIEQISEFSKRVILADANLDKVLSAYNKHRDKPIREQAENIIHLFTLTNLGAPAAFKYFDTTIDRKRYTSTKEVLDATLIHQSITGLYETRIDLSQLGGDGGGGSPAPGGGGGTLNIEDEYRLHETSKGPDVPLGSTWLSDFPQAWAETGGMGLAVRQAPLIIPLKATSTPVSIKQYPMSQEARLGIKPHIQRLLDQGILVPCQSPWNTPLLPVKKPGTNDYRPVQDLREVNKRVEDIHPTVPNPYNLLSGLPPSHQWYTVLDLKDAFFCLRLHPTSQSLFAFEWRDPEMGISGQLTWTRLPQGFKNSPTLFNEALHRDLADFRIQHPDLILLQYVDDLLLAATSELDCQQGTRALLQTLGDLGYRASAKKAQICQKQVKYLGYLLKEGQRWLTEARKETVMGQPTPKTPRQLREFLGKAGFCRLFIPGFAEMAAPLYPLTKPGTLFEWGPDQQKAYQEIKQALLTAPALGLPDLTKPFELFVDEKQGYAKGVLTQKLGPWRRPVAYLSKKLDPVAAGWPPCLRMVAAIAVLTKDAGKLTMGQPLVILAPHAVEALVKQPPDRWLSNARMTHYQALLLDTDRVQFGPIVALNPATLLPLPEEGLQHDCLDILAEAHGTRPDLTDQPLPDADHTWYTDGSSFLQEGQRKAGAAVTTETEVVWAKALPAGTSAQRAELIALTQALKMAEGKKLNVYTDSRYAFATAHIHGEIYRRRGWLTSEGKEIKNKDEILALLKALFLPKRLSIIHCPGHQKGNRAEARGNRMADQAAREVATRETPETSTLLAGKRTADGSEFEKRTADGSEFESPKKKAKVE

SEQ ID NO: 2574 - protein, 2094 aa, synthetic construct
MPAAKRVKLDGGDKKYSIGLDIGTNSVGWAVITDEYKVPSKKFKVLGNTDRHSIKKNLIGALLFDSGETAEATRLKRTARRRYTRRKNRICYLQEIFSNEMAKVDDSFFHRLEESFLVEEDKKHERHPIFGNIVDEVAYHEKYPTIYHLRKKLVDSTDKADLRLIYLALAHMIKFRGHFLIEGDLNPDNSDVDKLFIQLVQTYNQLFEENPINASGVDAKAILSARLSKSRRLENLIAQLPGEKKNGLFGNLIALSLGLTPNFKSNFDLAEDAKLQLSKDTYDDDLDNLLAQIGDQYADLFLAAKNLSDAILLSDILRVNTEITKAPLSASMIKRYDEHHQDLTLLKALVRQQLPEKYKEIFFDQSKNGYAGYIDGGASQEEFYKFIKPILEKMDGTEELLVKLNREDLLRKQRTFDNGSIPHQIHLGELHAILRRQEDFYPFLKDNREKIEKILTFRIPYYVGPLARGNSRFAWMTRKSEETITPWNFEEVVDKGASAQSFIERMTNFDKNLPNEKVLPKHSLLYEYFTVYNELTKVKYVTEGMRKPAFLSGEQKKAIVDLLFKTNRKVTVKQLKEDYFKKIECFDSVEISGVEDRFNASLGTYHDLLKIIKDKDFLDNEENEDILEDIVLTLTLFEDREMIEERLKTYAHLFDDKVMKQLKRRRYTGWGRLSRKLINGIRDKQSGKTILDFLKSDGFANRNFMQLIHDDSLTFKEDIQKAQVSGQGDSLHEHIANLAGSPAIKKGILQTVKVVDELVKVMGRHKPENIVIEMARENQTTQKGQKNSRERMKRIEEGIKELGSQILKEHPVENTQLQNEKLYLYYLQNGRDMYVDQELDINRLSDYDVDHIVPQSFLKDDSIDNKVLTRSDKARGKSDNVPSEEVVKKMKNYWRQLLNAKLITQRKFDNLTKAERGGLSELDKAGFIKRQLVETRQITKHVAQILDSRMNTKYDENDKLIREVKVITLKSKLVSDFRKDFQFYKVREINNYHHAHDAYLNAVVGTALIKKYPKLESEFVYGDYKVYDVRKMIAKSEQEIGKATAKYFFYSNIMNFFKTEITLANGEIRKRPLIETNGETGEIVWDKGRDFATVRKVLSMPQVNIVKKTEVQTGGFSKESILPKRNSDKLIARKKDWDPKKYGGFDSPTVAYSVLVVAKVEKGKSKKLKSVKELLGITIMERSSFEKNPIDFLEAKGYKEVKKDLIIKLPKYSLFELENGRKRMLASAGELQKGNELALPSKYVNFLYLASHYEKLKGSPEDNEQKQLFVEQHKHYLDEIIEQISEFSKRVILADANLDKVLSAYNKHRDKPIREQAENIIHLFTLTNLGAPAAFKYFDTTIDRKRYTSTKEVLDATLIHQSITGLYETRIDLSQLGGDGGPAPGGSGGGGGTLNIEDEYRLHETSKGPDVPLGSTWLSDFPQAWAETGGMGLAVRQAPLIIPLKATSTPVSIKQYPMSQEARLGIKPHIQRLLDQGILVPCQSPWNTPLLPVKKPGTNDYRPVQDLREVNKRVEDIHPTVPNPYNLLSGLPPSHQWYTVLDLKDAFFCLRLHPTSQSLFAFEWRDPEMGISGQLTWTRLPQGFKNSPTLFNEALHRDLADFRIQHPDLILLQYVDDLLLAATSELDCQQGTRALLQTLGDLGYRASAKKAQICQKQVKYLGYLLKEGQRWLTEARKETVMGQPTPKTPRQLREFLGKAGFCRLFIPGFAEMAAPLYPLTKPGTLFEWGPDQQKAYQEIKQALLTAPALGLPDLTKPFELFVDEKQGYAKGVLTQKLGPWRRPVAYLSKKLDPVAAGWPPCLRMVAAIAVLTKDAGKLTMGQPLVILAPHAVEALVKQPPDRWLSNARMTHYQALLLDTDRVQFGPIVALNPATLLPLPEEGLQHDCLDILAEAHGTRPDLTDQPLPDADHTWYTDGSSFLQEGQRKAGAAVTTETEVVWAKALPAGTSAQRAELIALTQALKMAEGKKLNVYTDSRYAFATAHIHGEIYRRRGWLTSEGKEIKNKDEILALLKALFLPKRLSIIHCPGHQKGNRAEARGNRMADQAAREVATRETPETSTLLAGKRTADGSEFEKRTADGSEFESPKKKAKVE

SEQ ID NO: 2575 - protein, 2096 aa, synthetic construct
MPAAKRVKLDGGDKKYSIGLDIGTNSVGWAVITDEYKVPSKKFKVLGNTDRHSIKKNLIGALLFDSGETAEATRLKRTARRRYTRRKNRICYLQEIFSNEMAKVDDSFFHRLEESFLVEEDKKHERHPIFGNIVDEVAYHEKYPTIYHLRKKLVDSTDKADLRLIYLALAHMIKFRGHFLIEGDLNPDNSDVDKLFIQLVQTYNQLFEENPINASGVDAKAILSARLSKSRRLENLIAQLPGEKKNGLFGNLIALSLGLTPNFKSNFDLAEDAKLQLSKDTYDDDLDNLLAQIGDQYADLFLAAKNLSDAILLSDILRVNTEITKAPLSASMIKRYDEHHQDLTLLKALVRQQLPEKYKEIFFDQSKNGYAGYIDGGASQEEFYKFIKPILEKMDGTEELLVKLNREDLLRKQRTFDNGSIPHQIHLGELHAILRRQEDFYPFLKDNREKIEKILTFRIPYYVGPLARGNSRFAWMTRKSEETITPWNFEEVVDKGASAQSFIERMTNFDKNLPNEKVLPKHSLLYEYFTVYNELTKVKYVTEGMRKPAFLSGEQKKAIVDLLFKTNRKVTVKQLKEDYFKKIECFDSVEISGVEDRFNASLGTYHDLLKIIKDKDFLDNEENEDILEDIVLTLTLFEDREMIEERLKTYAHLFDDKVMKQLKRRRYTGWGRLSRKLINGIRDKQSGKTILDFLKSDGFANRNFMQLIHDDSLTFKEDIQKAQVSGQGDSLHEHIANLAGSPAIKKGILQTVKVVDELVKVMGRHKPENIVIEMARENQTTQKGQKNSRERMKRIEEGIKELGSQILKEHPVENTQLQNEKLYLYYLQNGRDMYVDQELDINRLSDYDVDHIVPQSFLKDDSIDNKVLTRSDKARGKSDNVPSEEVVKKMKNYWRQLLNAKLITQRKFDNLTKAERGGLSELDKAGFIKRQLVETRQITKHVAQILDSRMNTKYDENDKLIREVKVITLKSKLVSDFRKDFQFYKVREINNYHHAHDAYLNAVVGTALIKKYPKLESEFVYGDYKVYDVRKMIAKSEQEIGKATAKYFFYSNIMNFFKTEITLANGEIRKRPLIETNGETGEIVWDKGRDFATVRKVLSMPQVNIVKKTEVQTGGFSKESILPKRNSDKLIARKKDWDPKKYGGFDSPTVAYSVLVVAKVEKGKSKKLKSVKELLGITIMERSSFEKNPIDFLEAKGYKEVKKDLIIKLPKYSLFELENGRKRMLASAGELQKGNELALPSKYVNFLYLASHYEKLKGSPEDNEQKQLFVEQHKHYLDEIIEQISEFSKRVILADANLDKVLSAYNKHRDKPIREQAENIIHLFTLTNLGAPAAFKYFDTTIDRKRYTSTKEVLDATLIHQSITGLYETRIDLSQLGGDGGGGGGSSEAAAKGGTLNIEDEYRLHETSKGPDVPLGSTWLSDFPQAWAETGGMGLAVRQAPLIIPLKATSTPVSIKQYPMSQEARLGIKPHIQRLLDQGILVPCQSPWNTPLLPVKKPGTNDYRPVQDLREVNKRVEDIHPTVPNPYNLLSGLPPSHQWYTVLDLKDAFFCLRLHPTSQSLFAFEWRDPEMGISGQLTWTRLPQGFKNSPTLFNEALHRDLADFRIQHPDLILLQYVDDLLLAATSELDCQQGTRALLQTLGDLGYRASAKKAQICQKQVKYLGYLLKEGQRWLTEARKETVMGQPTPKTPRQLREFLGKAGFCRLFIPGFAEMAAPLYPLTKPGTLFEWGPDQQKAYQEIKQALLTAPALGLPDLTKPFELFVDEKQGYAKGVLTQKLGPWRRPVAYLSKKLDPVAAGWPPCLRMVAAIAVLTKDAGKLTMGQPLVILAPHAVEALVKQPPDRWLSNARMTHYQALLLDTDRVQFGPIVALNPATLLPLPEEGLQHDCLDILAEAHGTRPDLTDQPLPDADHTWYTDGSSFLQEGQRKAGAAVTTETEVVWAKALPAGTSAQRAELIALTQALKMAEGKKLNVYTDSRYAFATAHIHGEIYRRRGWLTSEGKEIKNKDEILALLKALFLPKRLSIIHCPGHQKGNRAEARGNRMADQAAREVATRETPETSTLLAGKRTADGSEFEKRTADGSEFESPKKKAKVE

SEQ ID NO: 2576 - protein, 2096 aa, synthetic construct
MPAAKRVKLDGGDKKYSIGLDIGTNSVGWAVITDEYKVPSKKFKVLGNTDRHSIKKNLIGALLFDSGETAEATRLKRTARRRYTRRKNRICYLQEIFSNEMAKVDDSFFHRLEESFLVEEDKKHERHPIFGNIVDEVAYHEKYPTIYHLRKKLVDSTDKADLRLIYLALAHMIKFRGHFLIEGDLNPDNSDVDKLFIQLVQTYNQLFEENPINASGVDAKAILSARLSKSRRLENLIAQLPGEKKNGLFGNLIALSLGLTPNFKSNFDLAEDAKLQLSKDTYDDDLDNLLAQIGDQYADLFLAAKNLSDAILLSDILRVNTEITKAPLSASMIKRYDEHHQDLTLLKALVRQQLPEKYKEIFFDQSKNGYAGYIDGGASQEEFYKFIKPILEKMDGTEELLVKLNREDLLRKQRTFDNGSIPHQIHLGELHAILRRQEDFYPFLKDNREKIEKILTFRIPYYVGPLARGNSRFAWMTRKSEETITPWNFEEVVDKGASAQSFIERMTNFDKNLPNEKVLPKHSLLYEYFTVYNELTKVKYVTEGMRKPAFLSGEQKKAIVDLLFKTNRKVTVKQLKEDYFKKIECFDSVEISGVEDRFNASLGTYHDLLKIIKDKDFLDNEENEDILEDIVLTLTLFEDREMIEERLKTYAHLFDDKVMKQLKRRRYTGWGRLSRKLINGIRDKQSGKTILDFLKSDGFANRNFMQLIHDDSLTFKEDIQKAQVSGQGDSLHEHIANLAGSPAIKKGILQTVKVVDELVKVMGRHKPENIVIEMARENQTTQKGQKNSRERMKRIEEGIKELGSQILKEHPVENTQLQNEKLYLYYLQNGRDMYVDQELDINRLSDYDVDHIVPQSFLKDDSIDNKVLTRSDKARGKSDNVPSEEVVKKMKNYWRQLLNAKLITQRKFDNLTKAERGGLSELDKAGFIKRQLVETRQITKHVAQILDSRMNTKYDENDKLIREVKVITLKSKLVSDFRKDFQFYKVREINNYHHAHDAYLNAVVGTALIKKYPKLESEFVYGDYKVYDVRKMIAKSEQEIGKATAKYFFYSNIMNFFKTEITLANGEIRKRPLIETNGETGEIVWDKGRDFATVRKVLSMPQVNIVKKTEVQTGGFSKESILPKRNSDKLIARKKDWDPKKYGGFDSPTVAYSVLVVAKVEKGKSKKLKSVKELLGITIMERSSFEKNPIDFLEAKGYKEVKKDLIIKLPKYSLFELENGRKRMLASAGELQKGNELALPSKYVNFLYLASHYEKLKGSPEDNEQKQLFVEQHKHYLDEIIEQISEFSKRVILADANLDKVLSAYNKHRDKPIREQAENIIHLFTLTNLGAPAAFKYFDTTIDRKRYTSTKEVLDATLIHQSITGLYETRIDLSQLGGDGGGGGEAAAKGSSGGTLNIEDEYRLHETSKGPDVPLGSTWLSDFPQAWAETGGMGLAVRQAPLIIPLKATSTPVSIKQYPMSQEARLGIKPHIQRLLDQGILVPCQSPWNTPLLPVKKPGTNDYRPVQDLREVNKRVEDIHPTVPNPYNLLSGLPPSHQWYTVLDLKDAFFCLRLHPTSQSLFAFEWRDPEMGISGQLTWTRLPQGFKNSPTLFNEALHRDLADFRIQHPDLILLQYVDDLLLAATSELDCQQGTRALLQTLGDLGYRASAKKAQICQKQVKYLGYLLKEGQRWLTEARKETVMGQPTPKTPRQLREFLGKAGFCRLFIPGFAEMAAPLYPLTKPGTLFEWGPDQQKAYQEIKQALLTAPALGLPDLTKPFELFVDEKQGYAKGVLTQKLGPWRRPVAYLSKKLDPVAAGWPPCLRMVAAIAVLTKDAGKLTMGQPLVILAPHAVEALVKQPPDRWLSNARMTHYQALLLDTDRVQFGPIVALNPATLLPLPEEGLQHDCLDILAEAHGTRPDLTDQPLPDADHTWYTDGSSFLQEGQRKAGAAVTTETEVVWAKALPAGTSAQRAELIALTQALKMAEGKKLNVYTDSRYAFATAHIHGEIYRRRGWLTSEGKEIKNKDEILALLKALFLPKRLSIIHCPGHQKGNRAEARGNRMADQAAREVATRETPETSTLLAGKRTADGSEFEKRTADGSEFESPKKKAKVE

SEQ ID NO: 2577 - protein, 2096 aa, synthetic construct
MPAAKRVKLDGGDKKYSIGLDIGTNSVGWAVITDEYKVPSKKFKVLGNTDRHSIKKNLIGALLFDSGETAEATRLKRTARRRYTRRKNRICYLQEIFSNEMAKVDDSFFHRLEESFLVEEDKKHERHPIFGNIVDEVAYHEKYPTIYHLRKKLVDSTDKADLRLIYLALAHMIKFRGHFLIEGDLNPDNSDVDKLFIQLVQTYNQLFEENPINASGVDAKAILSARLSKSRRLENLIAQLPGEKKNGLFGNLIALSLGLTPNFKSNFDLAEDAKLQLSKDTYDDDLDNLLAQIGDQYADLFLAAKNLSDAILLSDILRVNTEITKAPLSASMIKRYDEHHQDLTLLKALVRQQLPEKYKEIFFDQSKNGYAGYIDGGASQEEFYKFIKPILEKMDGTEELLVKLNREDLLRKQRTFDNGSIPHQIHLGELHAILRRQEDFYPFLKDNREKIEKILTFRIPYYVGPLARGNSRFAWMTRKSEETITPWNFEEVVDKGASAQSFIERMTNFDKNLPNEKVLPKHSLLYEYFTVYNELTKVKYVTEGMRKPAFLSGEQKKAIVDLLFKTNRKVTVKQLKEDYFKKIECFDSVEISGVEDRFNASLGTYHDLLKIIKDKDFLDNEENEDILEDIVLTLTLFEDREMIEERLKTYAHLFDDKVMKQLKRRRYTGWGRLSRKLINGIRDKQSGKTILDFLKSDGFANRNFMQLIHDDSLTFKEDIQKAQVSGQGDSLHEHIANLAGSPAIKKGILQTVKVVDELVKVMGRHKPENIVIEMARENQTTQKGQKNSRERMKRIEEGIKELGSQILKEHPVENTQLQNEKLYLYYLQNGRDMYVDQELDINRLSDYDVDHIVPQSFLKDDSIDNKVLTRSDKARGKSDNVPSEEVVKKMKNYWRQLLNAKLITQRKFDNLTKAERGGLSELDKAGFIKRQLVETRQITKHVAQILDSRMNTKYDENDKLIREVKVITLKSKLVSDFRKDFQFYKVREINNYHHAHDAYLNAVVGTALIKKYPKLESEFVYGDYKVYDVRKMIAKSEQEIGKATAKYFFYSNIMNFFKTEITLANGEIRKRPLIETNGETGEIVWDKGRDFATVRKVLSMPQVNIVKKTEVQTGGFSKESILPKRNSDKLIARKKDWDPKKYGGFDSPTVAYSVLVVAKVEKGKSKKLKSVKELLGITIMERSSFEKNPIDFLEAKGYKEVKKDLIIKLPKYSLFELENGRKRMLASAGELQKGNELALPSKYVNFLYLASHYEKLKGSPEDNEQKQLFVEQHKHYLDEIIEQISEFSKRVILADANLDKVLSAYNKHRDKPIREQAENIIHLFTLTNLGAPAAFKYFDTTIDRKRYTSTKEVLDATLIHQSITGLYETRIDLSQLGGDGGPAPEAAAKGGSGGTLNIEDEYRLHETSKGPDVPLGSTWLSDFPQAWAETGGMGLAVRQAPLIIPLKATSTPVSIKQYPMSQEARLGIKPHIQRLLDQGILVPCQSPWNTPLLPVKKPGTNDYRPVQDLREVNKRVEDIHPTVPNPYNLLSGLPPSHQWYTVLDLKDAFFCLRLHPTSQSLFAFEWRDPEMGISGQLTWTRLPQGFKNSPTLFNEALHRDLADFRIQHPDLILLQYVDDLLLAATSELDCQQGTRALLQTLGDLGYRASAKKAQICQKQVKYLGYLLKEGQRWLTEARKETVMGQPTPKTPRQLREFLGKAGFCRLFIPGFAEMAAPLYPLTKPGTLFEWGPDQQKAYQEIKQALLTAPALGLPDLTKPFELFVDEKQGYAKGVLTQKLGPWRRPVAYLSKKLDPVAAGWPPCLRMVAAIAVLTKDAGKLTMGQPLVILAPHAVEALVKQPPDRWLSNARMTHYQALLLDTDRVQFGPIVALNPATLLPLPEEGLQHDCLDILAEAHGTRPDLTDQPLPDADHTWYTDGSSFLQEGQRKAGAAVTTETEVVWAKALPAGTSAQRAELIALTQALKMAEGKKLNVYTDSRYAFATAHIHGEIYRRRGWLTSEGKEIKNKDEILALLKALFLPKRLSIIHCPGHQKGNRAEARGNRMADQAAREVATRETPETSTLLAGKRTADGSEFEKRTADGSEFESPKKKAKVE

SEQ ID NO: 2578 - protein, 2096 aa, synthetic construct
MPAAKRVKLDGGDKKYSIGLDIGTNSVGWAVITDEYKVPSKKFKVLGNTDRHSIKKNLIGALLFDSGETAEATRLKRTARRRYTRRKNRICYLQEIFSNEMAKVDDSFFHRLEESFLVEEDKKHERHPIFGNIVDEVAYHEKYPTIYHLRKKLVDSTDKADLRLIYLALAHMIKFRGHFLIEGDLNPDNSDVDKLFIQLVQTYNQLFEENPINASGVDAKAILSARLSKSRRLENLIAQLPGEKKNGLFGNLIALSLGLTPNFKSNFDLAEDAKLQLSKDTYDDDLDNLLAQIGDQYADLFLAAKNLSDAILLSDILRVNTEITKAPLSASMIKRYDEHHQDLTLLKALVRQQLPEKYKEIFFDQSKNGYAGYIDGGASQEEFYKFIKPILEKMDGTEELLVKLNREDLLRKQRTFDNGSIPHQIHLGELHAILRRQEDFYPFLKDNREKIEKILTFRIPYYVGPLARGNSRFAWMTRKSEETITPWNFEEVVDKGASAQSFIERMTNFDKNLPNEKVLPKHSLLYEYFTVYNELTKVKYVTEGMRKPAFLSGEQKKAIVDLLFKTNRKVTVKQLKEDYFKKIECFDSVEISGVEDRFNASLGTYHDLLKIIKDKDFLDNEENEDILEDIVLTLTLFEDREMIEERLKTYAHLFDDKVMKQLKRRRYTGWGRLSRKLINGIRDKQSGKTILDFLKSDGFANRNFMQLIHDDSLTFKEDIQKAQVSGQGDSLHEHIANLAGSPAIKKGILQTVKVVDELVKVMGRHKPENIVIEMARENQTTQKGQKNSRERMKRIEEGIKELGSQILKEHPVENTQLQNEKLYLYYLQNGRDMYVDQELDINRLSDYDVDHIVPQSFLKDDSIDNKVLTRSDKARGKSDNVPSEEVVKKMKNYWRQLLNAKLITQRKFDNLTKAERGGLSELDKAGFIKRQLVETRQITKHVAQILDSRMNTKYDENDKLIREVKVITLKSKLVSDFRKDFQFYKVREINNYHHAHDAYLNAVVGTALIKKYPKLESEFVYGDYKVYDVRKMIAKSEQEIGKATAKYFFYSNIMNFFKTEITLANGEIRKRPLIETNGETGEIVWDKGRDFATVRKVLSMPQVNIVKKTEVQTGGFSKESILPKRNSDKLIARKKDWDPKKYGGFDSPTVAYSVLVVAKVEKGKSKKLKSVKELLGITIMERSSFEKNPIDFLEAKGYKEVKKDLIIKLPKYSLFELENGRKRMLASAGELQKGNELALPSKYVNFLYLASHYEKLKGSPEDNEQKQLFVEQHKHYLDEIIEQISEFSKRVILADANLDKVLSAYNKHRDKPIREQAENIIHLFTLTNLGAPAAFKYFDTTIDRKRYTSTKEVLDATLIHQSITGLYETRIDLSQLGGDGGGGSEAAAKGGGGGTLNIEDEYRLHETSKGPDVPLGSTWLSDFPQAWAETGGMGLAVRQAPLIIPLKATSTPVSIKQYPMSQEARLGIKPHIQRLLDQGILVPCQSPWNTPLLPVKKPGTNDYRPVQDLREVNKRVEDIHPTVPNPYNLLSGLPPSHQWYTVLDLKDAFFCLRLHPTSQSLFAFEWRDPEMGISGQLTWTRLPQGFKNSPTLFNEALHRDLADFRIQHPDLILLQYVDDLLLAATSELDCQQGTRALLQTLGDLGYRASAKKAQICQKQVKYLGYLLKEGQRWLTEARKETVMGQPTPKTPRQLREFLGKAGFCRLFIPGFAEMAAPLYPLTKPGTLFEWGPDQQKAYQEIKQALLTAPALGLPDLTKPFELFVDEKQGYAKGVLTQKLGPWRRPVAYLSKKLDPVAAGWPPCLRMVAAIAVLTKDAGKLTMGQPLVILAPHAVEALVKQPPDRWLSNARMTHYQALLLDTDRVQFGPIVALNPATLLPLPEEGLQHDCLDILAEAHGTRPDLTDQPLPDADHTWYTDGSSFLQEGQRKAGAAVTTETEVVWAKALPAGTSAQRAELIALTQALKMAEGKKLNVYTDSRYAFATAHIHGEIYRRRGWLTSEGKEIKNKDEILALLKALFLPKRLSIIHCPGHQKGNRAEARGNRMADQAAREVATRETPETSTLLAGKRTADGSEFEKRTADGSEFESPKKKAKVE

SEQ ID NO: 2579 - protein, 2090 aa, synthetic construct
MPAAKRVKLDGGDKKYSIGLDIGTNSVGWAVITDEYKVPSKKFKVLGNTDRHSIKKNLIGALLFDSGETAEATRLKRTARRRYTRRKNRICYLQEIFSNEMAKVDDSFFHRLEESFLVEEDKKHERHPIFGNIVDEVAYHEKYPTIYHLRKKLVDSTDKADLRLIYLALAHMIKFRGHFLIEGDLNPDNSDVDKLFIQLVQTYNQLFEENPINASGVDAKAILSARLSKSRRLENLIAQLPGEKKNGLFGNLIALSLGLTPNFKSNFDLAEDAKLQLSKDTYDDDLDNLLAQIGDQYADLFLAAKNLSDAILLSDILRVNTEITKAPLSASMIKRYDEHHQDLTLLKALVRQQLPEKYKEIFFDQSKNGYAGYIDGGASQEEFYKFIKPILEKMDGTEELLVKLNREDLLRKQRTFDNGSIPHQIHLGELHAILRRQEDFYPFLKDNREKIEKILTFRIPYYVGPLARGNSRFAWMTRKSEETITPWNFEEVVDKGASAQSFIERMTNFDKNLPNEKVLPKHSLLYEYFTVYNELTKVKYVTEGMRKPAFLSGEQKKAIVDLLFKTNRKVTVKQLKEDYFKKIECFDSVEISGVEDRFNASLGTYHDLLKIIKDKDFLDNEENEDILEDIVLTLTLFEDREMIEERLKTYAHLFDDKVMKQLKRRRYTGWGRLSRKLINGIRDKQSGKTILDFLKSDGFANRNFMQLIHDDSLTFKEDIQKAQVSGQGDSLHEHIANLAGSPAIKKGILQTVKVVDELVKVMGRHKPENIVIEMARENQTTQKGQKNSRERMKRIEEGIKELGSQILKEHPVENTQLQNEKLYLYYLQNGRDMYVDQELDINRLSDYDVDHIVPQSFLKDDSIDNKVLTRSDKARGKSDNVPSEEVVKKMKNYWRQLLNAKLITQRKFDNLTKAERGGLSELDKAGFIKRQLVETRQITKHVAQILDSRMNTKYDENDKLIREVKVITLKSKLVSDFRKDFQFYKVREINNYHHAHDAYLNAVVGTALIKKYPKLESEFVYGDYKVYDVRKMIAKSEQEIGKATAKYFFYSNIMNFFKTEITLANGEIRKRPLIETNGETGEIVWDKGRDFATVRKVLSMPQVNIVKKTEVQTGGFSKESILPKRNSDKLIARKKDWDPKKYGGFDSPTVAYSVLVVAKVEKGKSKKLKSVKELLGITIMERSSFEKNPIDFLEAKGYKEVKKDLIIKLPKYSLFELENGRKRMLASAGELQKGNELALPSKYVNFLYLASHYEKLKGSPEDNEQKQLFVEQHKHYLDEIIEQISEFSKRVILADANLDKVLSAYNKHRDKPIREQAENIIHLFTLTNLGAPAAFKYFDTTIDRKRYTSTKEVLDATLIHQSITGLYETRIDLSQLGGDGGGGGGGGGTLNIEDEYRLHETSKGPDVPLGSTWLSDFPQAWAETGGMGLAVRQAPLIIPLKATSTPVSIKQYPMSQEARLGIKPHIQRLLDQGILVPCQSPWNTPLLPVKKPGTNDYRPVQDLREVNKRVEDIHPTVPNPYNLLSGLPPSHQWYTVLDLKDAFFCLRLHPTSQSLFAFEWRDPEMGISGQLTWTRLPQGFKNSPTLFNEALHRDLADFRIQHPDLILLQYVDDLLLAATSELDCQQGTRALLQTLGDLGYRASAKKAQICQKQVKYLGYLLKEGQRWLTEARKETVMGQPTPKTPRQLREFLGKAGFCRLFIPGFAEMAAPLYPLTKPGTLFEWGPDQQKAYQEIKQALLTAPALGLPDLTKPFELFVDEKQGYAKGVLTQKLGPWRRPVAYLSKKLDPVAAGWPPCLRMVAAIAVLTKDAGKLTMGQPLVILAPHAVEALVKQPPDRWLSNARMTHYQALLLDTDRVQFGPIVALNPATLLPLPEEGLQHDCLDILAEAHGTRPDLTDQPLPDADHTWYTDGSSFLQEGQRKAGAAVTTETEVVWAKALPAGTSAQRAELIALTQALKMAEGKKLNVYTDSRYAFATAHIHGEIYRRRGWLTSEGKEIKNKDEILALLKALFLPKRLSIIHCPGHQKGNRAEARGNRMADQAAREVATRETPETSTLLAGKRTADGSEFEKRTADGSEFESPKKKAKVE

SEQ ID NO: 2580 - protein, 2094 aa, synthetic construct
MPAAKRVKLDGGDKKYSIGLDIGTNSVGWAVITDEYKVPSKKFKVLGNTDRHSIKKNLIGALLFDSGETAEATRLKRTARRRYTRRKNRICYLQEIFSNEMAKVDDSFFHRLEESFLVEEDKKHERHPIFGNIVDEVAYHEKYPTIYHLRKKLVDSTDKADLRLIYLALAHMIKFRGHFLIEGDLNPDNSDVDKLFIQLVQTYNQLFEENPINASGVDAKAILSARLSKSRRLENLIAQLPGEKKNGLFGNLIALSLGLTPNFKSNFDLAEDAKLQLSKDTYDDDLDNLLAQIGDQYADLFLAAKNLSDAILLSDILRVNTEITKAPLSASMIKRYDEHHQDLTLLKALVRQQLPEKYKEIFFDQSKNGYAGYIDGGASQEEFYKFIKPILEKMDGTEELLVKLNREDLLRKQRTFDNGSIPHQIHLGELHAILRRQEDFYPFLKDNREKIEKILTFRIPYYVGPLARGNSRFAWMTRKSEETITPWNFEEVVDKGASAQSFIERMTNFDKNLPNEKVLPKHSLLYEYFTVYNELTKVKYVTEGMRKPAFLSGEQKKAIVDLLFKTNRKVTVKQLKEDYFKKIECFDSVEISGVEDRFNASLGTYHDLLKIIKDKDFLDNEENEDILEDIVLTLTLFEDREMIEERLKTYAHLFDDKVMKQLKRRRYTGWGRLSRKLINGIRDKQSGKTILDFLKSDGFANRNFMQLIHDDSLTFKEDIQKAQVSGQGDSLHEHIANLAGSPAIKKGILQTVKVVDELVKVMGRHKPENIVIEMARENQTTQKGQKNSRERMKRIEEGIKELGSQILKEHPVENTQLQNEKLYLYYLQNGRDMYVDQELDINRLSDYDVDHIVPQSFLKDDSIDNKVLTRSDKARGKSDNVPSEEVVKKMKNYWRQLLNAKLITQRKFDNLTKAERGGLSELDKAGFIKRQLVETRQITKHVAQILDSRMNTKYDENDKLIREVKVITLKSKLVSDFRKDFQFYKVREINNYHHAHDAYLNAVVGTALIKKYPKLESEFVYGDYKVYDVRKMIAKSEQEIGKATAKYFFYSNIMNFFKTEITLANGEIRKRPLIETNGETGEIVWDKGRDFATVRKVLSMPQVNIVKKTEVQTGGFSKESILPKRNSDKLIARKKDWDPKKYGGFDSPTVAYSVLVVAKVEKGKSKKLKSVKELLGITIMERSSFEKNPIDFLEAKGYKEVKKDLIIKLPKYSLFELENGRKRMLASAGELQKGNELALPSKYVNFLYLASHYEKLKGSPEDNEQKQLFVEQHKHYLDEIIEQISEFSKRVILADANLDKVLSAYNKHRDKPIREQAENIIHLFTLTNLGAPAAFKYFDTTIDRKRYTSTKEVLDATLIHQSITGLYETRIDLSQLGGDGGGSSPAPGGGGGTLNIEDEYRLHETSKGPDVPLGSTWLSDFPQAWAETGGMGLAVRQAPLIIPLKATSTPVSIKQYPMSQEARLGIKPHIQRLLDQGILVPCQSPWNTPLLPVKKPGTNDYRPVQDLREVNKRVEDIHPTVPNPYNLLSGLPPSHQWYTVLDLKDAFFCLRLHPTSQSLFAFEWRDPEMGISGQLTWTRLPQGFKNSPTLFNEALHRDLADFRIQHPDLILLQYVDDLLLAATSELDCQQGTRALLQTLGDLGYRASAKKAQICQKQVKYLGYLLKEGQRWLTEARKETVMGQPTPKTPRQLREFLGKAGFCRLFIPGFAEMAAPLYPLTKPGTLFEWGPDQQKAYQEIKQALLTAPALGLPDLTKPFELFVDEKQGYAKGVLTQKLGPWRRPVAYLSKKLDPVAAGWPPCLRMVAAIAVLTKDAGKLTMGQPLVILAPHAVEALVKQPPDRWLSNARMTHYQALLLDTDRVQFGPIVALNPATLLPLPEEGLQHDCLDILAEAHGTRPDLTDQPLPDADHTWYTDGSSFLQEGQRKAGAAVTTETEVVWAKALPAGTSAQRAELIALTQALKMAEGKKLNVYTDSRYAFATAHIHGEIYRRRGWLTSEGKEIKNKDEILALLKALFLPKRLSIIHCPGHQKGNRAEARGNRMADQAAREVATRETPETSTLLAGKRTADGSEFEKRTADGSEFESPKKKAKVE

SEQ ID NO: 2581 - protein, 2094 aa, synthetic construct
MPAAKRVKLDGGDKKYSIGLDIGTNSVGWAVITDEYKVPSKKFKVLGNTDRHSIKKNLIGALLFDSGETAEATRLKRTARRRYTRRKNRICYLQEIFSNEMAKVDDSFFHRLEESFLVEEDKKHERHPIFGNIVDEVAYHEKYPTIYHLRKKLVDSTDKADLRLIYLALAHMIKFRGHFLIEGDLNPDNSDVDKLFIQLVQTYNQLFEENPINASGVDAKAILSARLSKSRRLENLIAQLPGEKKNGLFGNLIALSLGLTPNFKSNFDLAEDAKLQLSKDTYDDDLDNLLAQIGDQYADLFLAAKNLSDAILLSDILRVNTEITKAPLSASMIKRYDEHHQDLTLLKALVRQQLPEKYKEIFFDQSKNGYAGYIDGGASQEEFYKFIKPILEKMDGTEELLVKLNREDLLRKQRTFDNGSIPHQIHLGELHAILRRQEDFYPFLKDNREKIEKILTFRIPYYVGPLARGNSRFAWMTRKSEETITPWNFEEVVDKGASAQSFIERMTNFDKNLPNEKVLPKHSLLYEYFTVYNELTKVKYVTEGMRKPAFLSGEQKKAIVDLLFKTNRKVTVKQLKEDYFKKIECFDSVEISGVEDRFNASLGTYHDLLKIIKDKDFLDNEENEDILEDIVLTLTLFEDREMIEERLKTYAHLFDDKVMKQLKRRRYTGWGRLSRKLINGIRDKQSGKTILDFLKSDGFANRNFMQLIHDDSLTFKEDIQKAQVSGQGDSLHEHIANLAGSPAIKKGILQTVKVVDELVKVMGRHKPENIVIEMARENQTTQKGQKNSRERMKRIEEGIKELGSQILKEHPVENTQLQNEKLYLYYLQNGRDMYVDQELDINRLSDYDVDHIVPQSFLKDDSIDNKVLTRSDKARGKSDNVPSEEVVKKMKNYWRQLLNAKLITQRKFDNLTKAERGGLSELDKAGFIKRQLVETRQITKHVAQILDSRMNTKYDENDKLIREVKVITLKSKLVSDFRKDFQFYKVREINNYHHAHDAYLNAVVGTALIKKYPKLESEFVYGDYKVYDVRKMIAKSEQEIGKATAKYFFYSNIMNFFKTEITLANGEIRKRPLIETNGETGEIVWDKGRDFATVRKVLSMPQVNIVKKTEVQTGGFSKESILPKRNSDKLIARKKDWDPKKYGGFDSPTVAYSVLVVAKVEKGKSKKLKSVKELLGITIMERSSFEKNPIDFLEAKGYKEVKKDLIIKLPKYSLFELENGRKRMLASAGELQKGNELALPSKYVNFLYLASHYEKLKGSPEDNEQKQLFVEQHKHYLDEIIEQISEFSKRVILADANLDKVLSAYNKHRDKPIREQAENIIHLFTLTNLGAPAAFKYFDTTIDRKRYTSTKEVLDATLIHQSITGLYETRIDLSQLGGDGGPAPGSSGGSGGTLNIEDEYRLHETSKGPDVPLGSTWLSDFPQAWAETGGMGLAVRQAPLIIPLKATSTPVSIKQYPMSQEARLGIKPHIQRLLDQGILVPCQSPWNTPLLPVKKPGTNDYRPVQDLREVNKRVEDIHPTVPNPYNLLSGLPPSHQWYTVLDLKDAFFCLRLHPTSQSLFAFEWRDPEMGISGQLTWTRLPQGFKNSPTLFNEALHRDLADFRIQHPDLILLQYVDDLLLAATSELDCQQGTRALLQTLGDLGYRASAKKAQICQKQVKYLGYLLKEGQRWLTEARKETVMGQPTPKTPRQLREFLGKAGFCRLFIPGFAEMAAPLYPLTKPGTLFEWGPDQQKAYQEIKQALLTAPALGLPDLTKPFELFVDEKQGYAKGVLTQKLGPWRRPVAYLSKKLDPVAAGWPPCLRMVAAIAVLTKDAGKLTMGQPLVILAPHAVEALVKQPPDRWLSNARMTHYQALLLDTDRVQFGPIVALNPATLLPLPEEGLQHDCLDILAEAHGTRPDLTDQPLPDADHTWYTDGSSFLQEGQRKAGAAVTTETEVVWAKALPAGTSAQRAELIALTQALKMAEGKKLNVYTDSRYAFATAHIHGEIYRRRGWLTSEGKEIKNKDEILALLKALFLPKRLSIIHCPGHQKGNRAEARGNRMADQAAREVATRETPETSTLLAGKRTADGSEFEKRTADGSEFESPKKKAKVE

SEQ ID NO: 2582 - protein, 2096 aa, synthetic construct
MPAAKRVKLDGGDKKYSIGLDIGTNSVGWAVITDEYKVPSKKFKVLGNTDRHSIKKNLIGALLFDSGETAEATRLKRTARRRYTRRKNRICYLQEIFSNEMAKVDDSFFHRLEESFLVEEDKKHERHPIFGNIVDEVAYHEKYPTIYHLRKKLVDSTDKADLRLIYLALAHMIKFRGHFLIEGDLNPDNSDVDKLFIQLVQTYNQLFEENPINASGVDAKAILSARLSKSRRLENLIAQLPGEKKNGLFGNLIALSLGLTPNFKSNFDLAEDAKLQLSKDTYDDDLDNLLAQIGDQYADLFLAAKNLSDAILLSDILRVNTEITKAPLSASMIKRYDEHHQDLTLLKALVRQQLPEKYKEIFFDQSKNGYAGYIDGGASQEEFYKFIKPILEKMDGTEELLVKLNREDLLRKQRTFDNGSIPHQIHLGELHAILRRQEDFYPFLKDNREKIEKILTFRIPYYVGPLARGNSRFAWMTRKSEETITPWNFEEVVDKGASAQSFIERMTNFDKNLPNEKVLPKHSLLYEYFTVYNELTKVKYVTEGMRKPAFLSGEQKKAIVDLLFKTNRKVTVKQLKEDYFKKIECFDSVEISGVEDRFNASLGTYHDLLKIIKDKDFLDNEENEDILEDIVLTLTLFEDREMIEERLKTYAHLFDDKVMKQLKRRRYTGWGRLSRKLINGIRDKQSGKTILDFLKSDGFANRNFMQLIHDDSLTFKEDIQKAQVSGQGDSLHEHIANLAGSPAIKKGILQTVKVVDELVKVMGRHKPENIVIEMARENQTTQKGQKNSRERMKRIEEGIKELGSQILKEHPVENTQLQNEKLYLYYLQNGRDMYVDQELDINRLSDYDVDHIVPQSFLKDDSIDNKVLTRSDKARGKSDNVPSEEVVKKMKNYWRQLLNAKLITQRKFDNLTKAERGGLSELDKAGFIKRQLVETRQITKHVAQILDSRMNTKYDENDKLIREVKVITLKSKLVSDFRKDFQFYKVREINNYHHAHDAYLNAVVGTALIKKYPKLESEFVYGDYKVYDVRKMIAKSEQEIGKATAKYFFYSNIMNFFKTEITLANGEIRKRPLIETNGETGEIVWDKGRDFATVRKVLSMPQVNIVKKTEVQTGGFSKESILPKRNSDKLIARKKDWDPKKYGGFDSPTVAYSVLVVAKVEKGKSKKLKSVKELLGITIMERSSFEKNPIDFLEAKGYKEVKKDLIIKLPKYSLFELENGRKRMLASAGELQKGNELALPSKYVNFLYLASHYEKLKGSPEDNEQKQLFVEQHKHYLDEIIEQISEFSKRVILADANLDKVLSAYNKHRDKPIREQAENIIHLFTLTNLGAPAAFKYFDTTIDRKRYTSTKEVLDATLIHQSITGLYETRIDLSQLGGDGGEAAAKGGGGGSGGTLNIEDEYRLHETSKGPDVPLGSTWLSDFPQAWAETGGMGLAVRQAPLIIPLKATSTPVSIKQYPMSQEARLGIKPHIQRLLDQGILVPCQSPWNTPLLPVKKPGTNDYRPVQDLREVNKRVEDIHPTVPNPYNLLSGLPPSHQWYTVLDLKDAFFCLRLHPTSQSLFAFEWRDPEMGISGQLTWTRLPQGFKNSPTLFNEALHRDLADFRIQHPDLILLQYVDDLLLAATSELDCQQGTRALLQTLGDLGYRASAKKAQICQKQVKYLGYLLKEGQRWLTEARKETVMGQPTPKTPRQLREFLGKAGFCRLFIPGFAEMAAPLYPLTKPGTLFEWGPDQQKAYQEIKQALLTAPALGLPDLTKPFELFVDEKQGYAKGVLTQKLGPWRRPVAYLSKKLDPVAAGWPPCLRMVAAIAVLTKDAGKLTMGQPLVILAPHAVEALVKQPPDRWLSNARMTHYQALLLDTDRVQFGPIVALNPATLLPLPEEGLQHDCLDILAEAHGTRPDLTDQPLPDADHTWYTDGSSFLQEGQRKAGAAVTTETEVVWAKALPAGTSAQRAELIALTQALKMAEGKKLNVYTDSRYAFATAHIHGEIYRRRGWLTSEGKEIKNKDEILALLKALFLPKRLSIIHCPGHQKGNRAEARGNRMADQAAREVATRETPETSTLLAGKRTADGSEFEKRTADGSEFESPKKKAKVE

SEQ ID NO: 2583 - protein, 2097 aa, synthetic construct
MPAAKRVKLDGGDKKYSIGLDIGTNSVGWAVITDEYKVPSKKFKVLGNTDRHSIKKNLIGALLFDSGETAEATRLKRTARRRYTRRKNRICYLQEIFSNEMAKVDDSFFHRLEESFLVEEDKKHERHPIFGNIVDEVAYHEKYPTIYHLRKKLVDSTDKADLRLIYLALAHMIKFRGHFLIEGDLNPDNSDVDKLFIQLVQTYNQLFEENPINASGVDAKAILSARLSKSRRLENLIAQLPGEKKNGLFGNLIALSLGLTPNFKSNFDLAEDAKLQLSKDTYDDDLDNLLAQIGDQYADLFLAAKNLSDAILLSDILRVNTEITKAPLSASMIKRYDEHHQDLTLLKALVRQQLPEKYKEIFFDQSKNGYAGYIDGGASQEEFYKFIKPILEKMDGTEELLVKLNREDLLRKQRTFDNGSIPHQIHLGELHAILRRQEDFYPFLKDNREKIEKILTFRIPYYVGPLARGNSRFAWMTRKSEETITPWNFEEVVDKGASAQSFIERMTNFDKNLPNEKVLPKHSLLYEYFTVYNELTKVKYVTEGMRKPAFLSGEQKKAIVDLLFKTNRKVTVKQLKEDYFKKIECFDSVEISGVEDRFNASLGTYHDLLKIIKDKDFLDNEENEDILEDIVLTLTLFEDREMIEERLKTYAHLFDDKVMKQLKRRRYTGWGRLSRKLINGIRDKQSGKTILDFLKSDGFANRNFMQLIHDDSLTFKEDIQKAQVSGQGDSLHEHIANLAGSPAIKKGILQTVKVVDELVKVMGRHKPENIVIEMARENQTTQKGQKNSRERMKRIEEGIKELGSQILKEHPVENTQLQNEKLYLYYLQNGRDMYVDQELDINRLSDYDVDHIVPQSFLKDDSIDNKVLTRSDKARGKSDNVPSEEVVKKMKNYWRQLLNAKLITQRKFDNLTKAERGGLSELDKAGFIKRQLVETRQITKHVAQILDSRMNTKYDENDKLIREVKVITLKSKLVSDFRKDFQFYKVREINNYHHAHDAYLNAVVGTALIKKYPKLESEFVYGDYKVYDVRKMIAKSEQEIGKATAKYFFYSNIMNFFKTEITLANGEIRKRPLIETNGETGEIVWDKGRDFATVRKVLSMPQVNIVKKTEVQTGGFSKESILPKRNSDKLIARKKDWDPKKYGGFDSPTVAYSVLVVAKVEKGKSKKLKSVKELLGITIMERSSFEKNPIDFLEAKGYKEVKKDLIIKLPKYSLFELENGRKRMLASAGELQKGNELALPSKYVNFLYLASHYEKLKGSPEDNEQKQLFVEQHKHYLDEIIEQISEFSKRVILADANLDKVLSAYNKHRDKPIREQAENIIHLFTLTNLGAPAAFKYFDTTIDRKRYTSTKEVLDATLIHQSITGLYETRIDLSQLGGDGGGSAGSAAGSGEFGGTLNIEDEYRLHETSKGPDVPLGSTWLSDFPQAWAETGGMGLAVRQAPLIIPLKATSTPVSIKQYPMSQEARLGIKPHIQRLLDQGILVPCQSPWNTPLLPVKKPGTNDYRPVQDLREVNKRVEDIHPTVPNPYNLLSGLPPSHQWYTVLDLKDAFFCLRLHPTSQSLFAFEWRDPEMGISGQLTWTRLPQGFKNSPTLFNEALHRDLADFRIQHPDLILLQYVDDLLLAATSELDCQQGTRALLQTLGDLGYRASAKKAQICQKQVKYLGYLLKEGQRWLTEARKETVMGQPTPKTPRQLREFLGKAGFCRLFIPGFAEMAAPLYPLTKPGTLFEWGPDQQKAYQEIKQALLTAPALGLPDLTKPFELFVDEKQGYAKGVLTQKLGPWRRPVAYLSKKLDPVAAGWPPCLRMVAAIAVLTKDAGKLTMGQPLVILAPHAVEALVKQPPDRWLSNARMTHYQALLLDTDRVQFGPIVALNPATLLPLPEEGLQHDCLDILAEAHGTRPDLTDQPLPDADHTWYTDGSSFLQEGQRKAGAAVTTETEVVWAKALPAGTSAQRAELIALTQALKMAEGKKLNVYTDSRYAFATAHIHGEIYRRRGWLTSEGKEIKNKDEILALLKALFLPKRLSIIHCPGHQKGNRAEARGNRMADQAAREVATRETPETSTLLAGKRTADGSEFEKRTADGSEFESPKKKAKVE

SEQ ID NO: 2584 - protein, 2093 aa, synthetic construct
MPAAKRVKLDGGDKKYSIGLDIGTNSVGWAVITDEYKVPSKKFKVLGNTDRHSIKKNLIGALLFDSGETAEATRLKRTARRRYTRRKNRICYLQEIFSNEMAKVDDSFFHRLEESFLVEEDKKHERHPIFGNIVDEVAYHEKYPTIYHLRKKLVDSTDKADLRLIYLALAHMIKFRGHFLIEGDLNPDNSDVDKLFIQLVQTYNQLFEENPINASGVDAKAILSARLSKSRRLENLIAQLPGEKKNGLFGNLIALSLGLTPNFKSNFDLAEDAKLQLSKDTYDDDLDNLLAQIGDQYADLFLAAKNLSDAILLSDILRVNTEITKAPLSASMIKRYDEHHQDLTLLKALVRQQLPEKYKEIFFDQSKNGYAGYIDGGASQEEFYKFIKPILEKMDGTEELLVKLNREDLLRKQRTFDNGSIPHQIHLGELHAILRRQEDFYPFLKDNREKIEKILTFRIPYYVGPLARGNSRFAWMTRKSEETITPWNFEEVVDKGASAQSFIERMTNFDKNLPNEKVLPKHSLLYEYFTVYNELTKVKYVTEGMRKPAFLSGEQKKAIVDLLFKTNRKVTVKQLKEDYFKKIECFDSVEISGVEDRFNASLGTYHDLLKIIKDKDFLDNEENEDILEDIVLTLTLFEDREMIEERLKTYAHLFDDKVMKQLKRRRYTGWGRLSRKLINGIRDKQSGKTILDFLKSDGFANRNFMQLIHDDSLTFKEDIQKAQVSGQGDSLHEHIANLAGSPAIKKGILQTVKVVDELVKVMGRHKPENIVIEMARENQTTQKGQKNSRERMKRIEEGIKELGSQILKEHPVENTQLQNEKLYLYYLQNGRDMYVDQELDINRLSDYDVDHIVPQSFLKDDSIDNKVLTRSDKARGKSDNVPSEEVVKKMKNYWRQLLNAKLITQRKFDNLTKAERGGLSELDKAGFIKRQLVETRQITKHVAQILDSRMNTKYDENDKLIREVKVITLKSKLVSDFRKDFQFYKVREINNYHHAHDAYLNAVVGTALIKKYPKLESEFVYGDYKVYDVRKMIAKSEQEIGKATAKYFFYSNIMNFFKTEITLANGEIRKRPLIETNGETGEIVWDKGRDFATVRKVLSMPQVNIVKKTEVQTGGFSKESILPKRNSDKLIARKKDWDPKKYGGFDSPTVAYSVLVVAKVEKGKSKKLKSVKELLGITIMERSSFEKNPIDFLEAKGYKEVKKDLIIKLPKYSLFELENGRKRMLASAGELQKGNELALPSKYVNFLYLASHYEKLKGSPEDNEQKQLFVEQHKHYLDEIIEQISEFSKRVILADANLDKVLSAYNKHRDKPIREQAENIIHLFTLTNLGAPAAFKYFDTTIDRKRYTSTKEVLDATLIHQSITGLYETRIDLSQLGGDGGEAAAKGGSGGTLNIEDEYRLHETSKGPDVPLGSTWLSDFPQAWAETGGMGLAVRQAPLIIPLKATSTPVSIKQYPMSQEARLGIKPHIQRLLDQGILVPCQSPWNTPLLPVKKPGTNDYRPVQDLREVNKRVEDIHPTVPNPYNLLSGLPPSHQWYTVLDLKDAFFCLRLHPTSQSLFAFEWRDPEMGISGQLTWTRLPQGFKNSPTLFNEALHRDLADFRIQHPDLILLQYVDDLLLAATSELDCQQGTRALLQTLGDLGYRASAKKAQICQKQVKYLGYLLKEGQRWLTEARKETVMGQPTPKTPRQLREFLGKAGFCRLFIPGFAEMAAPLYPLTKPGTLFEWGPDQQKAYQEIKQALLTAPALGLPDLTKPFELFVDEKQGYAKGVLTQKLGPWRRPVAYLSKKLDPVAAGWPPCLRMVAAIAVLTKDAGKLTMGQPLVILAPHAVEALVKQPPDRWLSNARMTHYQALLLDTDRVQFGPIVALNPATLLPLPEEGLQHDCLDILAEAHGTRPDLTDQPLPDADHTWYTDGSSFLQEGQRKAGAAVTTETEVVWAKALPAGTSAQRAELIALTQALKMAEGKKLNVYTDSRYAFATAHIHGEIYRRRGWLTSEGKEIKNKDEILALLKALFLPKRLSIIHCPGHQKGNRAEARGNRMADQAAREVATRETPETSTLLAGKRTADGSEFEKRTADGSEFESPKKKAKVE

SEQ ID NO: 2585 - protein, 2093 aa, synthetic construct
MPAAKRVKLDGGDKKYSIGLDIGTNSVGWAVITDEYKVPSKKFKVLGNTDRHSIKKNLIGALLFDSGETAEATRLKRTARRRYTRRKNRICYLQEIFSNEMAKVDDSFFHRLEESFLVEEDKKHERHPIFGNIVDEVAYHEKYPTIYHLRKKLVDSTDKADLRLIYLALAHMIKFRGHFLIEGDLNPDNSDVDKLFIQLVQTYNQLFEENPINASGVDAKAILSARLSKSRRLENLIAQLPGEKKNGLFGNLIALSLGLTPNFKSNFDLAEDAKLQLSKDTYDDDLDNLLAQIGDQYADLFLAAKNLSDAILLSDILRVNTEITKAPLSASMIKRYDEHHQDLTLLKALVRQQLPEKYKEIFFDQSKNGYAGYIDGGASQEEFYKFIKPILEKMDGTEELLVKLNREDLLRKQRTFDNGSIPHQIHLGELHAILRRQEDFYPFLKDNREKIEKILTFRIPYYVGPLARGNSRFAWMTRKSEETITPWNFEEVVDKGASAQSFIERMTNFDKNLPNEKVLPKHSLLYEYFTVYNELTKVKYVTEGMRKPAFLSGEQKKAIVDLLFKTNRKVTVKQLKEDYFKKIECFDSVEISGVEDRFNASLGTYHDLLKIIKDKDFLDNEENEDILEDIVLTLTLFEDREMIEERLKTYAHLFDDKVMKQLKRRRYTGWGRLSRKLINGIRDKQSGKTILDFLKSDGFANRNFMQLIHDDSLTFKEDIQKAQVSGQGDSLHEHIANLAGSPAIKKGILQTVKVVDELVKVMGRHKPENIVIEMARENQTTQKGQKNSRERMKRIEEGIKELGSQILKEHPVENTQLQNEKLYLYYLQNGRDMYVDQELDINRLSDYDVDHIVPQSFLKDDSIDNKVLTRSDKARGKSDNVPSEEVVKKMKNYWRQLLNAKLITQRKFDNLTKAERGGLSELDKAGFIKRQLVETRQITKHVAQILDSRMNTKYDENDKLIREVKVITLKSKLVSDFRKDFQFYKVREINNYHHAHDAYLNAVVGTALIKKYPKLESEFVYGDYKVYDVRKMIAKSEQEIGKATAKYFFYSNIMNFFKTEITLANGEIRKRPLIETNGETGEIVWDKGRDFATVRKVLSMPQVNIVKKTEVQTGGFSKESILPKRNSDKLIARKKDWDPKKYGGFDSPTVAYSVLVVAKVEKGKSKKLKSVKELLGITIMERSSFEKNPIDFLEAKGYKEVKKDLIIKLPKYSLFELENGRKRMLASAGELQKGNELALPSKYVNFLYLASHYEKLKGSPEDNEQKQLFVEQHKHYLDEIIEQISEFSKRVILADANLDKVLSAYNKHRDKPIREQAENIIHLFTLTNLGAPAAFKYFDTTIDRKRYTSTKEVLDATLIHQSITGLYETRIDLSQLGGDGGEAAAKGSSGGTLNIEDEYRLHETSKGPDVPLGSTWLSDFPQAWAETGGMGLAVRQAPLIIPLKATSTPVSIKQYPMSQEARLGIKPHIQRLLDQGILVPCQSPWNTPLLPVKKPGTNDYRPVQDLREVNKRVEDIHPTVPNPYNLLSGLPPSHQWYTVLDLKDAFFCLRLHPTSQSLFAFEWRDPEMGISGQLTWTRLPQGFKNSPTLFNEALHRDLADFRIQHPDLILLQYVDDLLLAATSELDCQQGTRALLQTLGDLGYRASAKKAQICQKQVKYLGYLLKEGQRWLTEARKETVMGQPTPKTPRQLREFLGKAGFCRLFIPGFAEMAAPLYPLTKPGTLFEWGPDQQKAYQEIKQALLTAPALGLPDLTKPFELFVDEKQGYAKGVLTQKLGPWRRPVAYLSKKLDPVAAGWPPCLRMVAAIAVLTKDAGKLTMGQPLVILAPHAVEALVKQPPDRWLSNARMTHYQALLLDTDRVQFGPIVALNPATLLPLPEEGLQHDCLDILAEAHGTRPDLTDQPLPDADHTWYTDGSSFLQEGQRKAGAAVTTETEVVWAKALPAGTSAQRAELIALTQALKMAEGKKLNVYTDSRYAFATAHIHGEIYRRRGWLTSEGKEIKNKDEILALLKALFLPKRLSIIHCPGHQKGNRAEARGNRMADQAAREVATRETPETSTLLAGKRTADGSEFEKRTADGSEFESPKKKAKVE

SEQ ID NO: 2586 - protein, 2091 aa, synthetic construct
MPAAKRVKLDGGDKKYSIGLDIGTNSVGWAVITDEYKVPSKKFKVLGNTDRHSIKKNLIGALLFDSGETAEATRLKRTARRRYTRRKNRICYLQEIFSNEMAKVDDSFFHRLEESFLVEEDKKHERHPIFGNIVDEVAYHEKYPTIYHLRKKLVDSTDKADLRLIYLALAHMIKFRGHFLIEGDLNPDNSDVDKLFIQLVQTYNQLFEENPINASGVDAKAILSARLSKSRRLENLIAQLPGEKKNGLFGNLIALSLGLTPNFKSNFDLAEDAKLQLSKDTYDDDLDNLLAQIGDQYADLFLAAKNLSDAILLSDILRVNTEITKAPLSASMIKRYDEHHQDLTLLKALVRQQLPEKYKEIFFDQSKNGYAGYIDGGASQEEFYKFIKPILEKMDGTEELLVKLNREDLLRKQRTFDNGSIPHQIHLGELHAILRRQEDFYPFLKDNREKIEKILTFRIPYYVGPLARGNSRFAWMTRKSEETITPWNFEEVVDKGASAQSFIERMTNFDKNLPNEKVLPKHSLLYEYFTVYNELTKVKYVTEGMRKPAFLSGEQKKAIVDLLFKTNRKVTVKQLKEDYFKKIECFDSVEISGVEDRFNASLGTYHDLLKIIKDKDFLDNEENEDILEDIVLTLTLFEDREMIEERLKTYAHLFDDKVMKQLKRRRYTGWGRLSRKLINGIRDKQSGKTILDFLKSDGFANRNFMQLIHDDSLTFKEDIQKAQVSGQGDSLHEHIANLAGSPAIKKGILQTVKVVDELVKVMGRHKPENIVIEMARENQTTQKGQKNSRERMKRIEEGIKELGSQILKEHPVENTQLQNEKLYLYYLQNGRDMYVDQELDINRLSDYDVDHIVPQSFLKDDSIDNKVLTRSDKARGKSDNVPSEEVVKKMKNYWRQLLNAKLITQRKFDNLTKAERGGLSELDKAGFIKRQLVETRQITKHVAQILDSRMNTKYDENDKLIREVKVITLKSKLVSDFRKDFQFYKVREINNYHHAHDAYLNAVVGTALIKKYPKLESEFVYGDYKVYDVRKMIAKSEQEIGKATAKYFFYSNIMNFFKTEITLANGEIRKRPLIETNGETGEIVWDKGRDFATVRKVLSMPQVNIVKKTEVQTGGFSKESILPKRNSDKLIARKKDWDPKKYGGFDSPTVAYSVLVVAKVEKGKSKKLKSVKELLGITIMERSSFEKNPIDFLEAKGYKEVKKDLIIKLPKYSLFELENGRKRMLASAGELQKGNELALPSKYVNFLYLASHYEKLKGSPEDNEQKQLFVEQHKHYLDEIIEQISEFSKRVILADANLDKVLSAYNKHRDKPIREQAENIIHLFTLTNLGAPAAFKYFDTTIDRKRYTSTKEVLDATLIHQSITGLYETRIDLSQLGGDGGGGGGSSGGTLNIEDEYRLHETSKGPDVPLGSTWLSDFPQAWAETGGMGLAVRQAPLIIPLKATSTPVSIKQYPMSQEARLGIKPHIQRLLDQGILVPCQSPWNTPLLPVKKPGTNDYRPVQDLREVNKRVEDIHPTVPNPYNLLSGLPPSHQWYTVLDLKDAFFCLRLHPTSQSLFAFEWRDPEMGISGQLTWTRLPQGFKNSPTLFNEALHRDLADFRIQHPDLILLQYVDDLLLAATSELDCQQGTRALLQTLGDLGYRASAKKAQICQKQVKYLGYLLKEGQRWLTEARKETVMGQPTPKTPRQLREFLGKAGFCRLFIPGFAEMAAPLYPLTKPGTLFEWGPDQQKAYQEIKQALLTAPALGLPDLTKPFELFVDEKQGYAKGVLTQKLGPWRRPVAYLSKKLDPVAAGWPPCLRMVAAIAVLTKDAGKLTMGQPLVILAPHAVEALVKQPPDRWLSNARMTHYQALLLDTDRVQFGPIVALNPATLLPLPEEGLQHDCLDILAEAHGTRPDLTDQPLPDADHTWYTDGSSFLQEGQRKAGAAVTTETEVVWAKALPAGTSAQRAELIALTQALKMAEGKKLNVYTDSRYAFATAHIHGEIYRRRGWLTSEGKEIKNKDEILALLKALFLPKRLSIIHCPGHQKGNRAEARGNRMADQAAREVATRETPETSTLLAGKRTADGSEFEKRTADGSEFESPKKKAKVE

SEQ ID NO: 2587 - protein, 2093 aa, synthetic construct
MPAAKRVKLDGGDKKYSIGLDIGTNSVGWAVITDEYKVPSKKFKVLGNTDRHSIKKNLIGALLFDSGETAEATRLKRTARRRYTRRKNRICYLQEIFSNEMAKVDDSFFHRLEESFLVEEDKKHERHPIFGNIVDEVAYHEKYPTIYHLRKKLVDSTDKADLRLIYLALAHMIKFRGHFLIEGDLNPDNSDVDKLFIQLVQTYNQLFEENPINASGVDAKAILSARLSKSRRLENLIAQLPGEKKNGLFGNLIALSLGLTPNFKSNFDLAEDAKLQLSKDTYDDDLDNLLAQIGDQYADLFLAAKNLSDAILLSDILRVNTEITKAPLSASMIKRYDEHHQDLTLLKALVRQQLPEKYKEIFFDQSKNGYAGYIDGGASQEEFYKFIKPILEKMDGTEELLVKLNREDLLRKQRTFDNGSIPHQIHLGELHAILRRQEDFYPFLKDNREKIEKILTFRIPYYVGPLARGNSRFAWMTRKSEETITPWNFEEVVDKGASAQSFIERMTNFDKNLPNEKVLPKHSLLYEYFTVYNELTKVKYVTEGMRKPAFLSGEQKKAIVDLLFKTNRKVTVKQLKEDYFKKIECFDSVEISGVEDRFNASLGTYHDLLKIIKDKDFLDNEENEDILEDIVLTLTLFEDREMIEERLKTYAHLFDDKVMKQLKRRRYTGWGRLSRKLINGIRDKQSGKTILDFLKSDGFANRNFMQLIHDDSLTFKEDIQKAQVSGQGDSLHEHIANLAGSPAIKKGILQTVKVVDELVKVMGRHKPENIVIEMARENQTTQKGQKNSRERMKRIEEGIKELGSQILKEHPVENTQLQNEKLYLYYLQNGRDMYVDQELDINRLSDYDVDHIVPQSFLKDDSIDNKVLTRSDKARGKSDNVPSEEVVKKMKNYWRQLLNAKLITQRKFDNLTKAERGGLSELDKAGFIKRQLVETRQITKHVAQILDSRMNTKYDENDKLIREVKVITLKSKLVSDFRKDFQFYKVREINNYHHAHDAYLNAVVGTALIKKYPKLESEFVYGDYKVYDVRKMIAKSEQEIGKATAKYFFYSNIMNFFKTEITLANGEIRKRPLIETNGETGEIVWDKGRDFATVRKVLSMPQVNIVKKTEVQTGGFSKESILPKRNSDKLIARKKDWDPKKYGGFDSPTVAYSVLVVAKVEKGKSKKLKSVKELLGITIMERSSFEKNPIDFLEAKGYKEVKKDLIIKLPKYSLFELENGRKRMLASAGELQKGNELALPSKYVNFLYLASHYEKLKGSPEDNEQKQLFVEQHKHYLDEIIEQISEFSKRVILADANLDKVLSAYNKHRDKPIREQAENIIHLFTLTNLGAPAAFKYFDTTIDRKRYTSTKEVLDATLIHQSITGLYETRIDLSQLGGDGGEAAAKPAPGGTLNIEDEYRLHETSKGPDVPLGSTWLSDFPQAWAETGGMGLAVRQAPLIIPLKATSTPVSIKQYPMSQEARLGIKPHIQRLLDQGILVPCQSPWNTPLLPVKKPGTNDYRPVQDLREVNKRVEDIHPTVPNPYNLLSGLPPSHQWYTVLDLKDAFFCLRLHPTSQSLFAFEWRDPEMGISGQLTWTRLPQGFKNSPTLFNEALHRDLADFRIQHPDLILLQYVDDLLLAATSELDCQQGTRALLQTLGDLGYRASAKKAQICQKQVKYLGYLLKEGQRWLTEARKETVMGQPTPKTPRQLREFLGKAGFCRLFIPGFAEMAAPLYPLTKPGTLFEWGPDQQKAYQEIKQALLTAPALGLPDLTKPFELFVDEKQGYAKGVLTQKLGPWRRPVAYLSKKLDPVAAGWPPCLRMVAAIAVLTKDAGKLTMGQPLVILAPHAVEALVKQPPDRWLSNARMTHYQALLLDTDRVQFGPIVALNPATLLPLPEEGLQHDCLDILAEAHGTRPDLTDQPLPDADHTWYTDGSSFLQEGQRKAGAAVTTETEVVWAKALPAGTSAQRAELIALTQALKMAEGKKLNVYTDSRYAFATAHIHGEIYRRRGWLTSEGKEIKNKDEILALLKALFLPKRLSIIHCPGHQKGNRAEARGNRMADQAAREVATRETPETSTLLAGKRTADGSEFEKRTADGSEFESPKKKAKVE

SEQ ID NO: 2588 - protein, 2094 aa, synthetic construct
MPAAKRVKLDGGDKKYSIGLDIGTNSVGWAVITDEYKVPSKKFKVLGNTDRHSIKKNLIGALLFDSGETAEATRLKRTARRRYTRRKNRICYLQEIFSNEMAKVDDSFFHRLEESFLVEEDKKHERHPIFGNIVDEVAYHEKYPTIYHLRKKLVDSTDKADLRLIYLALAHMIKFRGHFLIEGDLNPDNSDVDKLFIQLVQTYNQLFEENPINASGVDAKAILSARLSKSRRLENLIAQLPGEKKNGLFGNLIALSLGLTPNFKSNFDLAEDAKLQLSKDTYDDDLDNLLAQIGDQYADLFLAAKNLSDAILLSDILRVNTEITKAPLSASMIKRYDEHHQDLTLLKALVRQQLPEKYKEIFFDQSKNGYAGYIDGGASQEEFYKFIKPILEKMDGTEELLVKLNREDLLRKQRTFDNGSIPHQIHLGELHAILRRQEDFYPFLKDNREKIEKILTFRIPYYVGPLARGNSRFAWMTRKSEETITPWNFEEVVDKGASAQSFIERMTNFDKNLPNEKVLPKHSLLYEYFTVYNELTKVKYVTEGMRKPAFLSGEQKKAIVDLLFKTNRKVTVKQLKEDYFKKIECFDSVEISGVEDRFNASLGTYHDLLKIIKDKDFLDNEENEDILEDIVLTLTLFEDREMIEERLKTYAHLFDDKVMKQLKRRRYTGWGRLSRKLINGIRDKQSGKTILDFLKSDGFANRNFMQLIHDDSLTFKEDIQKAQVSGQGDSLHEHIANLAGSPAIKKGILQTVKVVDELVKVMGRHKPENIVIEMARENQTTQKGQKNSRERMKRIEEGIKELGSQILKEHPVENTQLQNEKLYLYYLQNGRDMYVDQELDINRLSDYDVDHIVPQSFLKDDSIDNKVLTRSDKARGKSDNVPSEEVVKKMKNYWRQLLNAKLITQRKFDNLTKAERGGLSELDKAGFIKRQLVETRQITKHVAQILDSRMNTKYDENDKLIREVKVITLKSKLVSDFRKDFQFYKVREINNYHHAHDAYLNAVVGTALIKKYPKLESEFVYGDYKVYDVRKMIAKSEQEIGKATAKYFFYSNIMNFFKTEITLANGEIRKRPLIETNGETGEIVWDKGRDFATVRKVLSMPQVNIVKKTEVQTGGFSKESILPKRNSDKLIARKKDWDPKKYGGFDSPTVAYSVLVVAKVEKGKSKKLKSVKELLGITIMERSSFEKNPIDFLEAKGYKEVKKDLIIKLPKYSLFELENGRKRMLASAGELQKGNELALPSKYVNFLYLASHYEKLKGSPEDNEQKQLFVEQHKHYLDEIIEQISEFSKRVILADANLDKVLSAYNKHRDKPIREQAENIIHLFTLTNLGAPAAFKYFDTTIDRKRYTSTKEVLDATLIHQSITGLYETRIDLSQLGGDGGGGGGGSPAPGGTLNIEDEYRLHETSKGPDVPLGSTWLSDFPQAWAETGGMGLAVRQAPLIIPLKATSTPVSIKQYPMSQEARLGIKPHIQRLLDQGILVPCQSPWNTPLLPVKKPGTNDYRPVQDLREVNKRVEDIHPTVPNPYNLLSGLPPSHQWYTVLDLKDAFFCLRLHPTSQSLFAFEWRDPEMGISGQLTWTRLPQGFKNSPTLFNEALHRDLADFRIQHPDLILLQYVDDLLLAATSELDCQQGTRALLQTLGDLGYRASAKKAQICQKQVKYLGYLLKEGQRWLTEARKETVMGQPTPKTPRQLREFLGKAGFCRLFIPGFAEMAAPLYPLTKPGTLFEWGPDQQKAYQEIKQALLTAPALGLPDLTKPFELFVDEKQGYAKGVLTQKLGPWRRPVAYLSKKLDPVAAGWPPCLRMVAAIAVLTKDAGKLTMGQPLVILAPHAVEALVKQPPDRWLSNARMTHYQALLLDTDRVQFGPIVALNPATLLPLPEEGLQHDCLDILAEAHGTRPDLTDQPLPDADHTWYTDGSSFLQEGQRKAGAAVTTETEVVWAKALPAGTSAQRAELIALTQALKMAEGKKLNVYTDSRYAFATAHIHGEIYRRRGWLTSEGKEIKNKDEILALLKALFLPKRLSIIHCPGHQKGNRAEARGNRMADQAAREVATRETPETSTLLAGKRTADGSEFEKRTADGSEFESPKKKAKVE

SEQ ID NO: 2589 - protein, 2094 aa, synthetic construct
MPAAKRVKLDGGDKKYSIGLDIGTNSVGWAVITDEYKVPSKKFKVLGNTDRHSIKKNLIGALLFDSGETAEATRLKRTARRRYTRRKNRICYLQEIFSNEMAKVDDSFFHRLEESFLVEEDKKHERHPIFGNIVDEVAYHEKYPTIYHLRKKLVDSTDKADLRLIYLALAHMIKFRGHFLIEGDLNPDNSDVDKLFIQLVQTYNQLFEENPINASGVDAKAILSARLSKSRRLENLIAQLPGEKKNGLFGNLIALSLGLTPNFKSNFDLAEDAKLQLSKDTYDDDLDNLLAQIGDQYADLFLAAKNLSDAILLSDILRVNTEITKAPLSASMIKRYDEHHQDLTLLKALVRQQLPEKYKEIFFDQSKNGYAGYIDGGASQEEFYKFIKPILEKMDGTEELLVKLNREDLLRKQRTFDNGSIPHQIHLGELHAILRRQEDFYPFLKDNREKIEKILTFRIPYYVGPLARGNSRFAWMTRKSEETITPWNFEEVVDKGASAQSFIERMTNFDKNLPNEKVLPKHSLLYEYFTVYNELTKVKYVTEGMRKPAFLSGEQKKAIVDLLFKTNRKVTVKQLKEDYFKKIECFDSVEISGVEDRFNASLGTYHDLLKIIKDKDFLDNEENEDILEDIVLTLTLFEDREMIEERLKTYAHLFDDKVMKQLKRRRYTGWGRLSRKLINGIRDKQSGKTILDFLKSDGFANRNFMQLIHDDSLTFKEDIQKAQVSGQGDSLHEHIANLAGSPAIKKGILQTVKVVDELVKVMGRHKPENIVIEMARENQTTQKGQKNSRERMKRIEEGIKELGSQILKEHPVENTQLQNEKLYLYYLQNGRDMYVDQELDINRLSDYDVDHIVPQSFLKDDSIDNKVLTRSDKARGKSDNVPSEEVVKKMKNYWRQLLNAKLITQRKFDNLTKAERGGLSELDKAGFIKRQLVETRQITKHVAQILDSRMNTKYDENDKLIREVKVITLKSKLVSDFRKDFQFYKVREINNYHHAHDAYLNAVVGTALIKKYPKLESEFVYGDYKVYDVRKMIAKSEQEIGKATAKYFFYSNIMNFFKTEITLANGEIRKRPLIETNGETGEIVWDKGRDFATVRKVLSMPQVNIVKKTEVQTGGFSKESILPKRNSDKLIARKKDWDPKKYGGFDSPTVAYSVLVVAKVEKGKSKKLKSVKELLGITIMERSSFEKNPIDFLEAKGYKEVKKDLIIKLPKYSLFELENGRKRMLASAGELQKGNELALPSKYVNFLYLASHYEKLKGSPEDNEQKQLFVEQHKHYLDEIIEQISEFSKRVILADANLDKVLSAYNKHRDKPIREQAENIIHLFTLTNLGAPAAFKYFDTTIDRKRYTSTKEVLDATLIHQSITGLYETRIDLSQLGGDGGGGGGSSPAPGGTLNIEDEYRLHETSKGPDVPLGSTWLSDFPQAWAETGGMGLAVRQAPLIIPLKATSTPVSIKQYPMSQEARLGIKPHIQRLLDQGILVPCQSPWNTPLLPVKKPGTNDYRPVQDLREVNKRVEDIHPTVPNPYNLLSGLPPSHQWYTVLDLKDAFFCLRLHPTSQSLFAFEWRDPEMGISGQLTWTRLPQGFKNSPTLFNEALHRDLADFRIQHPDLILLQYVDDLLLAATSELDCQQGTRALLQTLGDLGYRASAKKAQICQKQVKYLGYLLKEGQRWLTEARKETVMGQPTPKTPRQLREFLGKAGFCRLFIPGFAEMAAPLYPLTKPGTLFEWGPDQQKAYQEIKQALLTAPALGLPDLTKPFELFVDEKQGYAKGVLTQKLGPWRRPVAYLSKKLDPVAAGWPPCLRMVAAIAVLTKDAGKLTMGQPLVILAPHAVEALVKQPPDRWLSNARMTHYQALLLDTDRVQFGPIVALNPATLLPLPEEGLQHDCLDILAEAHGTRPDLTDQPLPDADHTWYTDGSSFLQEGQRKAGAAVTTETEVVWAKALPAGTSAQRAELIALTQALKMAEGKKLNVYTDSRYAFATAHIHGEIYRRRGWLTSEGKEIKNKDEILALLKALFLPKRLSIIHCPGHQKGNRAEARGNRMADQAAREVATRETPETSTLLAGKRTADGSEFEKRTADGSEFESPKKKAKVE

SEQ ID NO: 2590 - protein, 2091 aa, synthetic construct
MPAAKRVKLDGGDKKYSIGLDIGTNSVGWAVITDEYKVPSKKFKVLGNTDRHSIKKNLIGALLFDSGETAEATRLKRTARRRYTRRKNRICYLQEIFSNEMAKVDDSFFHRLEESFLVEEDKKHERHPIFGNIVDEVAYHEKYPTIYHLRKKLVDSTDKADLRLIYLALAHMIKFRGHFLIEGDLNPDNSDVDKLFIQLVQTYNQLFEENPINASGVDAKAILSARLSKSRRLENLIAQLPGEKKNGLFGNLIALSLGLTPNFKSNFDLAEDAKLQLSKDTYDDDLDNLLAQIGDQYADLFLAAKNLSDAILLSDILRVNTEITKAPLSASMIKRYDEHHQDLTLLKALVRQQLPEKYKEIFFDQSKNGYAGYIDGGASQEEFYKFIKPILEKMDGTEELLVKLNREDLLRKQRTFDNGSIPHQIHLGELHAILRRQEDFYPFLKDNREKIEKILTFRIPYYVGPLARGNSRFAWMTRKSEETITPWNFEEVVDKGASAQSFIERMTNFDKNLPNEKVLPKHSLLYEYFTVYNELTKVKYVTEGMRKPAFLSGEQKKAIVDLLFKTNRKVTVKQLKEDYFKKIECFDSVEISGVEDRFNASLGTYHDLLKIIKDKDFLDNEENEDILEDIVLTLTLFEDREMIEERLKTYAHLFDDKVMKQLKRRRYTGWGRLSRKLINGIRDKQSGKTILDFLKSDGFANRNFMQLIHDDSLTFKEDIQKAQVSGQGDSLHEHIANLAGSPAIKKGILQTVKVVDELVKVMGRHKPENIVIEMARENQTTQKGQKNSRERMKRIEEGIKELGSQILKEHPVENTQLQNEKLYLYYLQNGRDMYVDQELDINRLSDYDVDHIVPQSFLKDDSIDNKVLTRSDKARGKSDNVPSEEVVKKMKNYWRQLLNAKLITQRKFDNLTKAERGGLSELDKAGFIKRQLVETRQITKHVAQILDSRMNTKYDENDKLIREVKVITLKSKLVSDFRKDFQFYKVREINNYHHAHDAYLNAVVGTALIKKYPKLESEFVYGDYKVYDVRKMIAKSEQEIGKATAKYFFYSNIMNFFKTEITLANGEIRKRPLIETNGETGEIVWDKGRDFATVRKVLSMPQVNIVKKTEVQTGGFSKESILPKRNSDKLIARKKDWDPKKYGGFDSPTVAYSVLVVAKVEKGKSKKLKSVKELLGITIMERSSFEKNPIDFLEAKGYKEVKKDLIIKLPKYSLFELENGRKRMLASAGELQKGNELALPSKYVNFLYLASHYEKLKGSPEDNEQKQLFVEQHKHYLDEIIEQISEFSKRVILADANLDKVLSAYNKHRDKPIREQAENIIHLFTLTNLGAPAAFKYFDTTIDRKRYTSTKEVLDATLIHQSITGLYETRIDLSQLGGDGGGSSGGSGGTLNIEDEYRLHETSKGPDVPLGSTWLSDFPQAWAETGGMGLAVRQAPLIIPLKATSTPVSIKQYPMSQEARLGIKPHIQRLLDQGILVPCQSPWNTPLLPVKKPGTNDYRPVQDLREVNKRVEDIHPTVPNPYNLLSGLPPSHQWYTVLDLKDAFFCLRLHPTSQSLFAFEWRDPEMGISGQLTWTRLPQGFKNSPTLFNEALHRDLADFRIQHPDLILLQYVDDLLLAATSELDCQQGTRALLQTLGDLGYRASAKKAQICQKQVKYLGYLLKEGQRWLTEARKETVMGQPTPKTPRQLREFLGKAGFCRLFIPGFAEMAAPLYPLTKPGTLFEWGPDQQKAYQEIKQALLTAPALGLPDLTKPFELFVDEKQGYAKGVLTQKLGPWRRPVAYLSKKLDPVAAGWPPCLRMVAAIAVLTKDAGKLTMGQPLVILAPHAVEALVKQPPDRWLSNARMTHYQALLLDTDRVQFGPIVALNPATLLPLPEEGLQHDCLDILAEAHGTRPDLTDQPLPDADHTWYTDGSSFLQEGQRKAGAAVTTETEVVWAKALPAGTSAQRAELIALTQALKMAEGKKLNVYTDSRYAFATAHIHGEIYRRRGWLTSEGKEIKNKDEILALLKALFLPKRLSIIHCPGHQKGNRAEARGNRMADQAAREVATRETPETSTLLAGKRTADGSEFEKRTADGSEFESPKKKAKVE

SEQ ID NO: 2591 - protein, 2094 aa, synthetic construct
MPAAKRVKLDGGDKKYSIGLDIGTNSVGWAVITDEYKVPSKKFKVLGNTDRHSIKKNLIGALLFDSGETAEATRLKRTARRRYTRRKNRICYLQEIFSNEMAKVDDSFFHRLEESFLVEEDKKHERHPIFGNIVDEVAYHEKYPTIYHLRKKLVDSTDKADLRLIYLALAHMIKFRGHFLIEGDLNPDNSDVDKLFIQLVQTYNQLFEENPINASGVDAKAILSARLSKSRRLENLIAQLPGEKKNGLFGNLIALSLGLTPNFKSNFDLAEDAKLQLSKDTYDDDLDNLLAQIGDQYADLFLAAKNLSDAILLSDILRVNTEITKAPLSASMIKRYDEHHQDLTLLKALVRQQLPEKYKEIFFDQSKNGYAGYIDGGASQEEFYKFIKPILEKMDGTEELLVKLNREDLLRKQRTFDNGSIPHQIHLGELHAILRRQEDFYPFLKDNREKIEKILTFRIPYYVGPLARGNSRFAWMTRKSEETITPWNFEEVVDKGASAQSFIERMTNFDKNLPNEKVLPKHSLLYEYFTVYNELTKVKYVTEGMRKPAFLSGEQKKAIVDLLFKTNRKVTVKQLKEDYFKKIECFDSVEISGVEDRFNASLGTYHDLLKIIKDKDFLDNEENEDILEDIVLTLTLFEDREMIEERLKTYAHLFDDKVMKQLKRRRYTGWGRLSRKLINGIRDKQSGKTILDFLKSDGFANRNFMQLIHDDSLTFKEDIQKAQVSGQGDSLHEHIANLAGSPAIKKGILQTVKVVDELVKVMGRHKPENIVIEMARENQTTQKGQKNSRERMKRIEEGIKELGSQILKEHPVENTQLQNEKLYLYYLQNGRDMYVDQELDINRLSDYDVDHIVPQSFLKDDSIDNKVLTRSDKARGKSDNVPSEEVVKKMKNYWRQLLNAKLITQRKFDNLTKAERGGLSELDKAGFIKRQLVETRQITKHVAQILDSRMNTKYDENDKLIREVKVITLKSKLVSDFRKDFQFYKVREINNYHHAHDAYLNAVVGTALIKKYPKLESEFVYGDYKVYDVRKMIAKSEQEIGKATAKYFFYSNIMNFFKTEITLANGEIRKRPLIETNGETGEIVWDKGRDFATVRKVLSMPQVNIVKKTEVQTGGFSKESILPKRNSDKLIARKKDWDPKKYGGFDSPTVAYSVLVVAKVEKGKSKKLKSVKELLGITIMERSSFEKNPIDFLEAKGYKEVKKDLIIKLPKYSLFELENGRKRMLASAGELQKGNELALPSKYVNFLYLASHYEKLKGSPEDNEQKQLFVEQHKHYLDEIIEQISEFSKRVILADANLDKVLSAYNKHRDKPIREQAENIIHLFTLTNLGAPAAFKYFDTTIDRKRYTSTKEVLDATLIHQSITGLYETRIDLSQLGGDGGGSSGGSPAPGGTLNIEDEYRLHETSKGPDVPLGSTWLSDFPQAWAETGGMGLAVRQAPLIIPLKATSTPVSIKQYPMSQEARLGIKPHIQRLLDQGILVPCQSPWNTPLLPVKKPGTNDYRPVQDLREVNKRVEDIHPTVPNPYNLLSGLPPSHQWYTVLDLKDAFFCLRLHPTSQSLFAFEWRDPEMGISGQLTWTRLPQGFKNSPTLFNEALHRDLADFRIQHPDLILLQYVDDLLLAATSELDCQQGTRALLQTLGDLGYRASAKKAQICQKQVKYLGYLLKEGQRWLTEARKETVMGQPTPKTPRQLREFLGKAGFCRLFIPGFAEMAAPLYPLTKPGTLFEWGPDQQKAYQEIKQALLTAPALGLPDLTKPFELFVDEKQGYAKGVLTQKLGPWRRPVAYLSKKLDPVAAGWPPCLRMVAAIAVLTKDAGKLTMGQPLVILAPHAVEALVKQPPDRWLSNARMTHYQALLLDTDRVQFGPIVALNPATLLPLPEEGLQHDCLDILAEAHGTRPDLTDQPLPDADHTWYTDGSSFLQEGQRKAGAAVTTETEVVWAKALPAGTSAQRAELIALTQALKMAEGKKLNVYTDSRYAFATAHIHGEIYRRRGWLTSEGKEIKNKDEILALLKALFLPKRLSIIHCPGHQKGNRAEARGNRMADQAAREVATRETPETSTLLAGKRTADGSEFEKRTADGSEFESPKKKAKVE

SEQ ID NO: 2592 - protein, 2096 aa, synthetic construct
MPAAKRVKLDGGDKKYSIGLDIGTNSVGWAVITDEYKVPSKKFKVLGNTDRHSIKKNLIGALLFDSGETAEATRLKRTARRRYTRRKNRICYLQEIFSNEMAKVDDSFFHRLEESFLVEEDKKHERHPIFGNIVDEVAYHEKYPTIYHLRKKLVDSTDKADLRLIYLALAHMIKFRGHFLIEGDLNPDNSDVDKLFIQLVQTYNQLFEENPINASGVDAKAILSARLSKSRRLENLIAQLPGEKKNGLFGNLIALSLGLTPNFKSNFDLAEDAKLQLSKDTYDDDLDNLLAQIGDQYADLFLAAKNLSDAILLSDILRVNTEITKAPLSASMIKRYDEHHQDLTLLKALVRQQLPEKYKEIFFDQSKNGYAGYIDGGASQEEFYKFIKPILEKMDGTEELLVKLNREDLLRKQRTFDNGSIPHQIHLGELHAILRRQEDFYPFLKDNREKIEKILTFRIPYYVGPLARGNSRFAWMTRKSEETITPWNFEEVVDKGASAQSFIERMTNFDKNLPNEKVLPKHSLLYEYFTVYNELTKVKYVTEGMRKPAFLSGEQKKAIVDLLFKTNRKVTVKQLKEDYFKKIECFDSVEISGVEDRFNASLGTYHDLLKIIKDKDFLDNEENEDILEDIVLTLTLFEDREMIEERLKTYAHLFDDKVMKQLKRRRYTGWGRLSRKLINGIRDKQSGKTILDFLKSDGFANRNFMQLIHDDSLTFKEDIQKAQVSGQGDSLHEHIANLAGSPAIKKGILQTVKVVDELVKVMGRHKPENIVIEMARENQTTQKGQKNSRERMKRIEEGIKELGSQILKEHPVENTQLQNEKLYLYYLQNGRDMYVDQELDINRLSDYDVDHIVPQSFLKDDSIDNKVLTRSDKARGKSDNVPSEEVVKKMKNYWRQLLNAKLITQRKFDNLTKAERGGLSELDKAGFIKRQLVETRQITKHVAQILDSRMNTKYDENDKLIREVKVITLKSKLVSDFRKDFQFYKVREINNYHHAHDAYLNAVVGTALIKKYPKLESEFVYGDYKVYDVRKMIAKSEQEIGKATAKYFFYSNIMNFFKTEITLANGEIRKRPLIETNGETGEIVWDKGRDFATVRKVLSMPQVNIVKKTEVQTGGFSKESILPKRNSDKLIARKKDWDPKKYGGFDSPTVAYSVLVVAKVEKGKSKKLKSVKELLGITIMERSSFEKNPIDFLEAKGYKEVKKDLIIKLPKYSLFELENGRKRMLASAGELQKGNELALPSKYVNFLYLASHYEKLKGSPEDNEQKQLFVEQHKHYLDEIIEQISEFSKRVILADANLDKVLSAYNKHRDKPIREQAENIIHLFTLTNLGAPAAFKYFDTTIDRKRYTSTKEVLDATLIHQSITGLYETRIDLSQLGGDGGGGGPAPEAAAKGGTLNIEDEYRLHETSKGPDVPLGSTWLSDFPQAWAETGGMGLAVRQAPLIIPLKATSTPVSIKQYPMSQEARLGIKPHIQRLLDQGILVPCQSPWNTPLLPVKKPGTNDYRPVQDLREVNKRVEDIHPTVPNPYNLLSGLPPSHQWYTVLDLKDAFFCLRLHPTSQSLFAFEWRDPEMGISGQLTWTRLPQGFKNSPTLFNEALHRDLADFRIQHPDLILLQYVDDLLLAATSELDCQQGTRALLQTLGDLGYRASAKKAQICQKQVKYLGYLLKEGQRWLTEARKETVMGQPTPKTPRQLREFLGKAGFCRLFIPGFAEMAAPLYPLTKPGTLFEWGPDQQKAYQEIKQALLTAPALGLPDLTKPFELFVDEKQGYAKGVLTQKLGPWRRPVAYLSKKLDPVAAGWPPCLRMVAAIAVLTKDAGKLTMGQPLVILAPHAVEALVKQPPDRWLSNARMTHYQALLLDTDRVQFGPIVALNPATLLPLPEEGLQHDCLDILAEAHGTRPDLTDQPLPDADHTWYTDGSSFLQEGQRKAGAAVTTETEVVWAKALPAGTSAQRAELIALTQALKMAEGKKLNVYTDSRYAFATAHIHGEIYRRRGWLTSEGKEIKNKDEILALLKALFLPKRLSIIHCPGHQKGNRAEARGNRMADQAAREVATRETPETSTLLAGKRTADGSEFEKRTADGSEFESPKKKAKVE

SEQ ID NO: 2593 - protein, 2094 aa, synthetic construct
MPAAKRVKLDGGDKKYSIGLDIGTNSVGWAVITDEYKVPSKKFKVLGNTDRHSIKKNLIGALLFDSGETAEATRLKRTARRRYTRRKNRICYLQEIFSNEMAKVDDSFFHRLEESFLVEEDKKHERHPIFGNIVDEVAYHEKYPTIYHLRKKLVDSTDKADLRLIYLALAHMIKFRGHFLIEGDLNPDNSDVDKLFIQLVQTYNQLFEENPINASGVDAKAILSARLSKSRRLENLIAQLPGEKKNGLFGNLIALSLGLTPNFKSNFDLAEDAKLQLSKDTYDDDLDNLLAQIGDQYADLFLAAKNLSDAILLSDILRVNTEITKAPLSASMIKRYDEHHQDLTLLKALVRQQLPEKYKEIFFDQSKNGYAGYIDGGASQEEFYKFIKPILEKMDGTEELLVKLNREDLLRKQRTFDNGSIPHQIHLGELHAILRRQEDFYPFLKDNREKIEKILTFRIPYYVGPLARGNSRFAWMTRKSEETITPWNFEEVVDKGASAQSFIERMTNFDKNLPNEKVLPKHSLLYEYFTVYNELTKVKYVTEGMRKPAFLSGEQKKAIVDLLFKTNRKVTVKQLKEDYFKKIECFDSVEISGVEDRFNASLGTYHDLLKIIKDKDFLDNEENEDILEDIVLTLTLFEDREMIEERLKTYAHLFDDKVMKQLKRRRYTGWGRLSRKLINGIRDKQSGKTILDFLKSDGFANRNFMQLIHDDSLTFKEDIQKAQVSGQGDSLHEHIANLAGSPAIKKGILQTVKVVDELVKVMGRHKPENIVIEMARENQTTQKGQKNSRERMKRIEEGIKELGSQILKEHPVENTQLQNEKLYLYYLQNGRDMYVDQELDINRLSDYDVDHIVPQSFLKDDSIDNKVLTRSDKARGKSDNVPSEEVVKKMKNYWRQLLNAKLITQRKFDNLTKAERGGLSELDKAGFIKRQLVETRQITKHVAQILDSRMNTKYDENDKLIREVKVITLKSKLVSDFRKDFQFYKVREINNYHHAHDAYLNAVVGTALIKKYPKLESEFVYGDYKVYDVRKMIAKSEQEIGKATAKYFFYSNIMNFFKTEITLANGEIRKRPLIETNGETGEIVWDKGRDFATVRKVLSMPQVNIVKKTEVQTGGFSKESILPKRNSDKLIARKKDWDPKKYGGFDSPTVAYSVLVVAKVEKGKSKKLKSVKELLGITIMERSSFEKNPIDFLEAKGYKEVKKDLIIKLPKYSLFELENGRKRMLASAGELQKGNELALPSKYVNFLYLASHYEKLKGSPEDNEQKQLFVEQHKHYLDEIIEQISEFSKRVILADANLDKVLSAYNKHRDKPIREQAENIIHLFTLTNLGAPAAFKYFDTTIDRKRYTSTKEVLDATLIHQSITGLYETRIDLSQLGGDGGGGGPAPGSSGGTLNIEDEYRLHETSKGPDVPLGSTWLSDFPQAWAETGGMGLAVRQAPLIIPLKATSTPVSIKQYPMSQEARLGIKPHIQRLLDQGILVPCQSPWNTPLLPVKKPGTNDYRPVQDLREVNKRVEDIHPTVPNPYNLLSGLPPSHQWYTVLDLKDAFFCLRLHPTSQSLFAFEWRDPEMGISGQLTWTRLPQGFKNSPTLFNEALHRDLADFRIQHPDLILLQYVDDLLLAATSELDCQQGTRALLQTLGDLGYRASAKKAQICQKQVKYLGYLLKEGQRWLTEARKETVMGQPTPKTPRQLREFLGKAGFCRLFIPGFAEMAAPLYPLTKPGTLFEWGPDQQKAYQEIKQALLTAPALGLPDLTKPFELFVDEKQGYAKGVLTQKLGPWRRPVAYLSKKLDPVAAGWPPCLRMVAAIAVLTKDAGKLTMGQPLVILAPHAVEALVKQPPDRWLSNARMTHYQALLLDTDRVQFGPIVALNPATLLPLPEEGLQHDCLDILAEAHGTRPDLTDQPLPDADHTWYTDGSSFLQEGQRKAGAAVTTETEVVWAKALPAGTSAQRAELIALTQALKMAEGKKLNVYTDSRYAFATAHIHGEIYRRRGWLTSEGKEIKNKDEILALLKALFLPKRLSIIHCPGHQKGNRAEARGNRMADQAAREVATRETPETSTLLAGKRTADGSEFEKRTADGSEFESPKKKAKVE

SEQ ID NO: 2594 - protein, 2091 aa, synthetic construct
MPAAKRVKLDGGDKKYSIGLDIGTNSVGWAVITDEYKVPSKKFKVLGNTDRHSIKKNLIGALLFDSGETAEATRLKRTARRRYTRRKNRICYLQEIFSNEMAKVDDSFFHRLEESFLVEEDKKHERHPIFGNIVDEVAYHEKYPTIYHLRKKLVDSTDKADLRLIYLALAHMIKFRGHFLIEGDLNPDNSDVDKLFIQLVQTYNQLFEENPINASGVDAKAILSARLSKSRRLENLIAQLPGEKKNGLFGNLIALSLGLTPNFKSNFDLAEDAKLQLSKDTYDDDLDNLLAQIGDQYADLFLAAKNLSDAILLSDILRVNTEITKAPLSASMIKRYDEHHQDLTLLKALVRQQLPEKYKEIFFDQSKNGYAGYIDGGASQEEFYKFIKPILEKMDGTEELLVKLNREDLLRKQRTFDNGSIPHQIHLGELHAILRRQEDFYPFLKDNREKIEKILTFRIPYYVGPLARGNSRFAWMTRKSEETITPWNFEEVVDKGASAQSFIERMTNFDKNLPNEKVLPKHSLLYEYFTVYNELTKVKYVTEGMRKPAFLSGEQKKAIVDLLFKTNRKVTVKQLKEDYFKKIECFDSVEISGVEDRFNASLGTYHDLLKIIKDKDFLDNEENEDILEDIVLTLTLFEDREMIEERLKTYAHLFDDKVMKQLKRRRYTGWGRLSRKLINGIRDKQSGKTILDFLKSDGFANRNFMQLIHDDSLTFKEDIQKAQVSGQGDSLHEHIANLAGSPAIKKGILQTVKVVDELVKVMGRHKPENIVIEMARENQTTQKGQKNSRERMKRIEEGIKELGSQILKEHPVENTQLQNEKLYLYYLQNGRDMYVDQELDINRLSDYDVDHIVPQSFLKDDSIDNKVLTRSDKARGKSDNVPSEEVVKKMKNYWRQLLNAKLITQRKFDNLTKAERGGLSELDKAGFIKRQLVETRQITKHVAQILDSRMNTKYDENDKLIREVKVITLKSKLVSDFRKDFQFYKVREINNYHHAHDAYLNAVVGTALIKKYPKLESEFVYGDYKVYDVRKMIAKSEQEIGKATAKYFFYSNIMNFFKTEITLANGEIRKRPLIETNGETGEIVWDKGRDFATVRKVLSMPQVNIVKKTEVQTGGFSKESILPKRNSDKLIARKKDWDPKKYGGFDSPTVAYSVLVVAKVEKGKSKKLKSVKELLGITIMERSSFEKNPIDFLEAKGYKEVKKDLIIKLPKYSLFELENGRKRMLASAGELQKGNELALPSKYVNFLYLASHYEKLKGSPEDNEQKQLFVEQHKHYLDEIIEQISEFSKRVILADANLDKVLSAYNKHRDKPIREQAENIIHLFTLTNLGAPAAFKYFDTTIDRKRYTSTKEVLDATLIHQSITGLYETRIDLSQLGGDGGGSSGGGGGTLNIEDEYRLHETSKGPDVPLGSTWLSDFPQAWAETGGMGLAVRQAPLIIPLKATSTPVSIKQYPMSQEARLGIKPHIQRLLDQGILVPCQSPWNTPLLPVKKPGTNDYRPVQDLREVNKRVEDIHPTVPNPYNLLSGLPPSHQWYTVLDLKDAFFCLRLHPTSQSLFAFEWRDPEMGISGQLTWTRLPQGFKNSPTLFNEALHRDLADFRIQHPDLILLQYVDDLLLAATSELDCQQGTRALLQTLGDLGYRASAKKAQICQKQVKYLGYLLKEGQRWLTEARKETVMGQPTPKTPRQLREFLGKAGFCRLFIPGFAEMAAPLYPLTKPGTLFEWGPDQQKAYQEIKQALLTAPALGLPDLTKPFELFVDEKQGYAKGVLTQKLGPWRRPVAYLSKKLDPVAAGWPPCLRMVAAIAVLTKDAGKLTMGQPLVILAPHAVEALVKQPPDRWLSNARMTHYQALLLDTDRVQFGPIVALNPATLLPLPEEGLQHDCLDILAEAHGTRPDLTDQPLPDADHTWYTDGSSFLQEGQRKAGAAVTTETEVVWAKALPAGTSAQRAELIALTQALKMAEGKKLNVYTDSRYAFATAHIHGEIYRRRGWLTSEGKEIKNKDEILALLKALFLPKRLSIIHCPGHQKGNRAEARGNRMADQAAREVATRETPETSTLLAGKRTADGSEFEKRTADGSEFESPKKKAKVE

SEQ ID NO: 2595 - protein, 2103 aa, synthetic construct
MPAAKRVKLDGGDKKYSIGLDIGTNSVGWAVITDEYKVPSKKFKVLGNTDRHSIKKNLIGALLFDSGETAEATRLKRTARRRYTRRKNRICYLQEIFSNEMAKVDDSFFHRLEESFLVEEDKKHERHPIFGNIVDEVAYHEKYPTIYHLRKKLVDSTDKADLRLIYLALAHMIKFRGHFLIEGDLNPDNSDVDKLFIQLVQTYNQLFEENPINASGVDAKAILSARLSKSRRLENLIAQLPGEKKNGLFGNLIALSLGLTPNFKSNFDLAEDAKLQLSKDTYDDDLDNLLAQIGDQYADLFLAAKNLSDAILLSDILRVNTEITKAPLSASMIKRYDEHHQDLTLLKALVRQQLPEKYKEIFFDQSKNGYAGYIDGGASQEEFYKFIKPILEKMDGTEELLVKLNREDLLRKQRTFDNGSIPHQIHLGELHAILRRQEDFYPFLKDNREKIEKILTFRIPYYVGPLARGNSRFAWMTRKSEETITPWNFEEVVDKGASAQSFIERMTNFDKNLPNEKVLPKHSLLYEYFTVYNELTKVKYVTEGMRKPAFLSGEQKKAIVDLLFKTNRKVTVKQLKEDYFKKIECFDSVEISGVEDRFNASLGTYHDLLKIIKDKDFLDNEENEDILEDIVLTLTLFEDREMIEERLKTYAHLFDDKVMKQLKRRRYTGWGRLSRKLINGIRDKQSGKTILDFLKSDGFANRNFMQLIHDDSLTFKEDIQKAQVSGQGDSLHEHIANLAGSPAIKKGILQTVKVVDELVKVMGRHKPENIVIEMARENQTTQKGQKNSRERMKRIEEGIKELGSQILKEHPVENTQLQNEKLYLYYLQNGRDMYVDQELDINRLSDYDVDHIVPQSFLKDDSIDNKVLTRSDKARGKSDNVPSEEVVKKMKNYWRQLLNAKLITQRKFDNLTKAERGGLSELDKAGFIKRQLVETRQITKHVAQILDSRMNTKYDENDKLIREVKVITLKSKLVSDFRKDFQFYKVREINNYHHAHDAYLNAVVGTALIKKYPKLESEFVYGDYKVYDVRKMIAKSEQEIGKATAKYFFYSNIMNFFKTEITLANGEIRKRPLIETNGETGEIVWDKGRDFATVRKVLSMPQVNIVKKTEVQTGGFSKESILPKRNSDKLIARKKDWDPKKYGGFDSPTVAYSVLVVAKVEKGKSKKLKSVKELLGITIMERSSFEKNPIDFLEAKGYKEVKKDLIIKLPKYSLFELENGRKRMLASAGELQKGNELALPSKYVNFLYLASHYEKLKGSPEDNEQKQLFVEQHKHYLDEIIEQISEFSKRVILADANLDKVLSAYNKHRDKPIREQAENIIHLFTLTNLGAPAAFKYFDTTIDRKRYTSTKEVLDATLIHQSITGLYETRIDLSQLGGDGGGSSGSSGSSGSSGSSGSSGGTLNIEDEYRLHETSKGPDVPLGSTWLSDFPQAWAETGGMGLAVRQAPLIIPLKATSTPVSIKQYPMSQEARLGIKPHIQRLLDQGILVPCQSPWNTPLLPVKKPGTNDYRPVQDLREVNKRVEDIHPTVPNPYNLLSGLPPSHQWYTVLDLKDAFFCLRLHPTSQSLFAFEWRDPEMGISGQLTWTRLPQGFKNSPTLFNEALHRDLADFRIQHPDLILLQYVDDLLLAATSELDCQQGTRALLQTLGDLGYRASAKKAQICQKQVKYLGYLLKEGQRWLTEARKETVMGQPTPKTPRQLREFLGKAGFCRLFIPGFAEMAAPLYPLTKPGTLFEWGPDQQKAYQEIKQALLTAPALGLPDLTKPFELFVDEKQGYAKGVLTQKLGPWRRPVAYLSKKLDPVAAGWPPCLRMVAAIAVLTKDAGKLTMGQPLVILAPHAVEALVKQPPDRWLSNARMTHYQALLLDTDRVQFGPIVALNPATLLPLPEEGLQHDCLDILAEAHGTRPDLTDQPLPDADHTWYTDGSSFLQEGQRKAGAAVTTETEVVWAKALPAGTSAQRAELIALTQALKMAEGKKLNVYTDSRYAFATAHIHGEIYRRRGWLTSEGKEIKNKDEILALLKALFLPKRLSIIHCPGHQKGNRAEARGNRMADQAAREVATRETPETSTLLAGKRTADGSEFEKRTADGSEFESPKKKAKVE

SEQ ID NO: 2596 - protein, 2088 aa, synthetic construct
MPAAKRVKLDGGDKKYSIGLDIGTNSVGWAVITDEYKVPSKKFKVLGNTDRHSIKKNLIGALLFDSGETAEATRLKRTARRRYTRRKNRICYLQEIFSNEMAKVDDSFFHRLEESFLVEEDKKHERHPIFGNIVDEVAYHEKYPTIYHLRKKLVDSTDKADLRLIYLALAHMIKFRGHFLIEGDLNPDNSDVDKLFIQLVQTYNQLFEENPINASGVDAKAILSARLSKSRRLENLIAQLPGEKKNGLFGNLIALSLGLTPNFKSNFDLAEDAKLQLSKDTYDDDLDNLLAQIGDQYADLFLAAKNLSDAILLSDILRVNTEITKAPLSASMIKRYDEHHQDLTLLKALVRQQLPEKYKEIFFDQSKNGYAGYIDGGASQEEFYKFIKPILEKMDGTEELLVKLNREDLLRKQRTFDNGSIPHQIHLGELHAILRRQEDFYPFLKDNREKIEKILTFRIPYYVGPLARGNSRFAWMTRKSEETITPWNFEEVVDKGASAQSFIERMTNFDKNLPNEKVLPKHSLLYEYFTVYNELTKVKYVTEGMRKPAFLSGEQKKAIVDLLFKTNRKVTVKQLKEDYFKKIECFDSVEISGVEDRFNASLGTYHDLLKIIKDKDFLDNEENEDILEDIVLTLTLFEDREMIEERLKTYAHLFDDKVMKQLKRRRYTGWGRLSRKLINGIRDKQSGKTILDFLKSDGFANRNFMQLIHDDSLTFKEDIQKAQVSGQGDSLHEHIANLAGSPAIKKGILQTVKVVDELVKVMGRHKPENIVIEMARENQTTQKGQKNSRERMKRIEEGIKELGSQILKEHPVENTQLQNEKLYLYYLQNGRDMYVDQELDINRLSDYDVDHIVPQSFLKDDSIDNKVLTRSDKARGKSDNVPSEEVVKKMKNYWRQLLNAKLITQRKFDNLTKAERGGLSELDKAGFIKRQLVETRQITKHVAQILDSRMNTKYDENDKLIREVKVITLKSKLVSDFRKDFQFYKVREINNYHHAHDAYLNAVVGTALIKKYPKLESEFVYGDYKVYDVRKMIAKSEQEIGKATAKYFFYSNIMNFFKTEITLANGEIRKRPLIETNGETGEIVWDKGRDFATVRKVLSMPQVNIVKKTEVQTGGFSKESILPKRNSDKLIARKKDWDPKKYGGFDSPTVAYSVLVVAKVEKGKSKKLKSVKELLGITIMERSSFEKNPIDFLEAKGYKEVKKDLIIKLPKYSLFELENGRKRMLASAGELQKGNELALPSKYVNFLYLASHYEKLKGSPEDNEQKQLFVEQHKHYLDEIIEQISEFSKRVILADANLDKVLSAYNKHRDKPIREQAENIIHLFTLTNLGAPAAFKYFDTTIDRKRYTSTKEVLDATLIHQSITGLYETRIDLSQLGGDGGGGGGGTLNIEDEYRLHETSKGPDVPLGSTWLSDFPQAWAETGGMGLAVRQAPLIIPLKATSTPVSIKQYPMSQEARLGIKPHIQRLLDQGILVPCQSPWNTPLLPVKKPGTNDYRPVQDLREVNKRVEDIHPTVPNPYNLLSGLPPSHQWYTVLDLKDAFFCLRLHPTSQSLFAFEWRDPEMGISGQLTWTRLPQGFKNSPTLFNEALHRDLADFRIQHPDLILLQYVDDLLLAATSELDCQQGTRALLQTLGDLGYRASAKKAQICQKQVKYLGYLLKEGQRWLTEARKETVMGQPTPKTPRQLREFLGKAGFCRLFIPGFAEMAAPLYPLTKPGTLFEWGPDQQKAYQEIKQALLTAPALGLPDLTKPFELFVDEKQGYAKGVLTQKLGPWRRPVAYLSKKLDPVAAGWPPCLRMVAAIAVLTKDAGKLTMGQPLVILAPHAVEALVKQPPDRWLSNARMTHYQALLLDTDRVQFGPIVALNPATLLPLPEEGLQHDCLDILAEAHGTRPDLTDQPLPDADHTWYTDGSSFLQEGQRKAGAAVTTETEVVWAKALPAGTSAQRAELIALTQALKMAEGKKLNVYTDSRYAFATAHIHGEIYRRRGWLTSEGKEIKNKDEILALLKALFLPKRLSIIHCPGHQKGNRAEARGNRMADQAAREVATRETPETSTLLAGKRTADGSEFEKRTADGSEFESPKKKAKVE

SEQ ID NO: 2597 - protein, 2096 aa, synthetic construct
MPAAKRVKLDGGDKKYSIGLDIGTNSVGWAVITDEYKVPSKKFKVLGNTDRHSIKKNLIGALLFDSGETAEATRLKRTARRRYTRRKNRICYLQEIFSNEMAKVDDSFFHRLEESFLVEEDKKHERHPIFGNIVDEVAYHEKYPTIYHLRKKLVDSTDKADLRLIYLALAHMIKFRGHFLIEGDLNPDNSDVDKLFIQLVQTYNQLFEENPINASGVDAKAILSARLSKSRRLENLIAQLPGEKKNGLFGNLIALSLGLTPNFKSNFDLAEDAKLQLSKDTYDDDLDNLLAQIGDQYADLFLAAKNLSDAILLSDILRVNTEITKAPLSASMIKRYDEHHQDLTLLKALVRQQLPEKYKEIFFDQSKNGYAGYIDGGASQEEFYKFIKPILEKMDGTEELLVKLNREDLLRKQRTFDNGSIPHQIHLGELHAILRRQEDFYPFLKDNREKIEKILTFRIPYYVGPLARGNSRFAWMTRKSEETITPWNFEEVVDKGASAQSFIERMTNFDKNLPNEKVLPKHSLLYEYFTVYNELTKVKYVTEGMRKPAFLSGEQKKAIVDLLFKTNRKVTVKQLKEDYFKKIECFDSVEISGVEDRFNASLGTYHDLLKIIKDKDFLDNEENEDILEDIVLTLTLFEDREMIEERLKTYAHLFDDKVMKQLKRRRYTGWGRLSRKLINGIRDKQSGKTILDFLKSDGFANRNFMQLIHDDSLTFKEDIQKAQVSGQGDSLHEHIANLAGSPAIKKGILQTVKVVDELVKVMGRHKPENIVIEMARENQTTQKGQKNSRERMKRIEEGIKELGSQILKEHPVENTQLQNEKLYLYYLQNGRDMYVDQELDINRLSDYDVDHIVPQSFLKDDSIDNKVLTRSDKARGKSDNVPSEEVVKKMKNYWRQLLNAKLITQRKFDNLTKAERGGLSELDKAGFIKRQLVETRQITKHVAQILDSRMNTKYDENDKLIREVKVITLKSKLVSDFRKDFQFYKVREINNYHHAHDAYLNAVVGTALIKKYPKLESEFVYGDYKVYDVRKMIAKSEQEIGKATAKYFFYSNIMNFFKTEITLANGEIRKRPLIETNGETGEIVWDKGRDFATVRKVLSMPQVNIVKKTEVQTGGFSKESILPKRNSDKLIARKKDWDPKKYGGFDSPTVAYSVLVVAKVEKGKSKKLKSVKELLGITIMERSSFEKNPIDFLEAKGYKEVKKDLIIKLPKYSLFELENGRKRMLASAGELQKGNELALPSKYVNFLYLASHYEKLKGSPEDNEQKQLFVEQHKHYLDEIIEQISEFSKRVILADANLDKVLSAYNKHRDKPIREQAENIIHLFTLTNLGAPAAFKYFDTTIDRKRYTSTKEVLDATLIHQSITGLYETRIDLSQLGGDGGGGGGGSEAAAKGGTLNIEDEYRLHETSKGPDVPLGSTWLSDFPQAWAETGGMGLAVRQAPLIIPLKATSTPVSIKQYPMSQEARLGIKPHIQRLLDQGILVPCQSPWNTPLLPVKKPGTNDYRPVQDLREVNKRVEDIHPTVPNPYNLLSGLPPSHQWYTVLDLKDAFFCLRLHPTSQSLFAFEWRDPEMGISGQLTWTRLPQGFKNSPTLFNEALHRDLADFRIQHPDLILLQYVDDLLLAATSELDCQQGTRALLQTLGDLGYRASAKKAQICQKQVKYLGYLLKEGQRWLTEARKETVMGQPTPKTPRQLREFLGKAGFCRLFIPGFAEMAAPLYPLTKPGTLFEWGPDQQKAYQEIKQALLTAPALGLPDLTKPFELFVDEKQGYAKGVLTQKLGPWRRPVAYLSKKLDPVAAGWPPCLRMVAAIAVLTKDAGKLTMGQPLVILAPHAVEALVKQPPDRWLSNARMTHYQALLLDTDRVQFGPIVALNPATLLPLPEEGLQHDCLDILAEAHGTRPDLTDQPLPDADHTWYTDGSSFLQEGQRKAGAAVTTETEVVWAKALPAGTSAQRAELIALTQALKMAEGKKLNVYTDSRYAFATAHIHGEIYRRRGWLTSEGKEIKNKDEILALLKALFLPKRLSIIHCPGHQKGNRAEARGNRMADQAAREVATRETPETSTLLAGKRTADGSEFEKRTADGSEFESPKKKAKVE

SEQ ID NO: 2598 - protein, 2110 aa, synthetic construct
MPAAKRVKLDGGDKKYSIGLDIGTNSVGWAVITDEYKVPSKKFKVLGNTDRHSIKKNLIGALLFDSGETAEATRLKRTARRRYTRRKNRICYLQEIFSNEMAKVDDSFFHRLEESFLVEEDKKHERHPIFGNIVDEVAYHEKYPTIYHLRKKLVDSTDKADLRLIYLALAHMIKFRGHFLIEGDLNPDNSDVDKLFIQLVQTYNQLFEENPINASGVDAKAILSARLSKSRRLENLIAQLPGEKKNGLFGNLIALSLGLTPNFKSNFDLAEDAKLQLSKDTYDDDLDNLLAQIGDQYADLFLAAKNLSDAILLSDILRVNTEITKAPLSASMIKRYDEHHQDLTLLKALVRQQLPEKYKEIFFDQSKNGYAGYIDGGASQEEFYKFIKPILEKMDGTEELLVKLNREDLLRKQRTFDNGSIPHQIHLGELHAILRRQEDFYPFLKDNREKIEKILTFRIPYYVGPLARGNSRFAWMTRKSEETITPWNFEEVVDKGASAQSFIERMTNFDKNLPNEKVLPKHSLLYEYFTVYNELTKVKYVTEGMRKPAFLSGEQKKAIVDLLFKTNRKVTVKQLKEDYFKKIECFDSVEISGVEDRFNASLGTYHDLLKIIKDKDFLDNEENEDILEDIVLTLTLFEDREMIEERLKTYAHLFDDKVMKQLKRRRYTGWGRLSRKLINGIRDKQSGKTILDFLKSDGFANRNFMQLIHDDSLTFKEDIQKAQVSGQGDSLHEHIANLAGSPAIKKGILQTVKVVDELVKVMGRHKPENIVIEMARENQTTQKGQKNSRERMKRIEEGIKELGSQILKEHPVENTQLQNEKLYLYYLQNGRDMYVDQELDINRLSDYDVDHIVPQSFLKDDSIDNKVLTRSDKARGKSDNVPSEEVVKKMKNYWRQLLNAKLITQRKFDNLTKAERGGLSELDKAGFIKRQLVETRQITKHVAQILDSRMNTKYDENDKLIREVKVITLKSKLVSDFRKDFQFYKVREINNYHHAHDAYLNAVVGTALIKKYPKLESEFVYGDYKVYDVRKMIAKSEQEIGKATAKYFFYSNIMNFFKTEITLANGEIRKRPLIETNGETGEIVWDKGRDFATVRKVLSMPQVNIVKKTEVQTGGFSKESILPKRNSDKLIARKKDWDPKKYGGFDSPTVAYSVLVVAKVEKGKSKKLKSVKELLGITIMERSSFEKNPIDFLEAKGYKEVKKDLIIKLPKYSLFELENGRKRMLASAGELQKGNELALPSKYVNFLYLASHYEKLKGSPEDNEQKQLFVEQHKHYLDEIIEQISEFSKRVILADANLDKVLSAYNKHRDKPIREQAENIIHLFTLTNLGAPAAFKYFDTTIDRKRYTSTKEVLDATLIHQSITGLYETRIDLSQLGGDGGGGGGSGGGGSGGGGSGGGGSGGGGSGGTLNIEDEYRLHETSKGPDVPLGSTWLSDFPQAWAETGGMGLAVRQAPLIIPLKATSTPVSIKQYPMSQEARLGIKPHIQRLLDQGILVPCQSPWNTPLLPVKKPGTNDYRPVQDLREVNKRVEDIHPTVPNPYNLLSGLPPSHQWYTVLDLKDAFFCLRLHPTSQSLFAFEWRDPEMGISGQLTWTRLPQGFKNSPTLFNEALHRDLADFRIQHPDLILLQYVDDLLLAATSELDCQQGTRALLQTLGDLGYRASAKKAQICQKQVKYLGYLLKEGQRWLTEARKETVMGQPTPKTPRQLREFLGKAGFCRLFIPGFAEMAAPLYPLTKPGTLFEWGPDQQKAYQEIKQALLTAPALGLPDLTKPFELFVDEKQGYAKGVLTQKLGPWRRPVAYLSKKLDPVAAGWPPCLRMVAAIAVLTKDAGKLTMGQPLVILAPHAVEALVKQPPDRWLSNARMTHYQALLLDTDRVQFGPIVALNPATLLPLPEEGLQHDCLDILAEAHGTRPDLTDQPLPDADHTWYTDGSSFLQEGQRKAGAAVTTETEVVWAKALPAGTSAQRAELIALTQALKMAEGKKLNVYTDSRYAFATAHIHGEIYRRRGWLTSEGKEIKNKDEILALLKALFLPKRLSIIHCPGHQKGNRAEARGNRMADQAAREVATRETPETSTLLAGKRTADGSEFEKRTADGSEFESPKKKAKVE

SEQ ID NO: 2599 - protein, 2096 aa, synthetic construct
MPAAKRVKLDGGDKKYSIGLDIGTNSVGWAVITDEYKVPSKKFKVLGNTDRHSIKKNLIGALLFDSGETAEATRLKRTARRRYTRRKNRICYLQEIFSNEMAKVDDSFFHRLEESFLVEEDKKHERHPIFGNIVDEVAYHEKYPTIYHLRKKLVDSTDKADLRLIYLALAHMIKFRGHFLIEGDLNPDNSDVDKLFIQLVQTYNQLFEENPINASGVDAKAILSARLSKSRRLENLIAQLPGEKKNGLFGNLIALSLGLTPNFKSNFDLAEDAKLQLSKDTYDDDLDNLLAQIGDQYADLFLAAKNLSDAILLSDILRVNTEITKAPLSASMIKRYDEHHQDLTLLKALVRQQLPEKYKEIFFDQSKNGYAGYIDGGASQEEFYKFIKPILEKMDGTEELLVKLNREDLLRKQRTFDNGSIPHQIHLGELHAILRRQEDFYPFLKDNREKIEKILTFRIPYYVGPLARGNSRFAWMTRKSEETITPWNFEEVVDKGASAQSFIERMTNFDKNLPNEKVLPKHSLLYEYFTVYNELTKVKYVTEGMRKPAFLSGEQKKAIVDLLFKTNRKVTVKQLKEDYFKKIECFDSVEISGVEDRFNASLGTYHDLLKIIKDKDFLDNEENEDILEDIVLTLTLFEDREMIEERLKTYAHLFDDKVMKQLKRRRYTGWGRLSRKLINGIRDKQSGKTILDFLKSDGFANRNFMQLIHDDSLTFKEDIQKAQVSGQGDSLHEHIANLAGSPAIKKGILQTVKVVDELVKVMGRHKPENIVIEMARENQTTQKGQKNSRERMKRIEEGIKELGSQILKEHPVENTQLQNEKLYLYYLQNGRDMYVDQELDINRLSDYDVDHIVPQSFLKDDSIDNKVLTRSDKARGKSDNVPSEEVVKKMKNYWRQLLNAKLITQRKFDNLTKAERGGLSELDKAGFIKRQLVETRQITKHVAQILDSRMNTKYDENDKLIREVKVITLKSKLVSDFRKDFQFYKVREINNYHHAHDAYLNAVVGTALIKKYPKLESEFVYGDYKVYDVRKMIAKSEQEIGKATAKYFFYSNIMNFFKTEITLANGEIRKRPLIETNGETGEIVWDKGRDFATVRKVLSMPQVNIVKKTEVQTGGFSKESILPKRNSDKLIARKKDWDPKKYGGFDSPTVAYSVLVVAKVEKGKSKKLKSVKELLGITIMERSSFEKNPIDFLEAKGYKEVKKDLIIKLPKYSLFELENGRKRMLASAGELQKGNELALPSKYVNFLYLASHYEKLKGSPEDNEQKQLFVEQHKHYLDEIIEQISEFSKRVILADANLDKVLSAYNKHRDKPIREQAENIIHLFTLTNLGAPAAFKYFDTTIDRKRYTSTKEVLDATLIHQSITGLYETRIDLSQLGGDGGGSSPAPEAAAKGGTLNIEDEYRLHETSKGPDVPLGSTWLSDFPQAWAETGGMGLAVRQAPLIIPLKATSTPVSIKQYPMSQEARLGIKPHIQRLLDQGILVPCQSPWNTPLLPVKKPGTNDYRPVQDLREVNKRVEDIHPTVPNPYNLLSGLPPSHQWYTVLDLKDAFFCLRLHPTSQSLFAFEWRDPEMGISGQLTWTRLPQGFKNSPTLFNEALHRDLADFRIQHPDLILLQYVDDLLLAATSELDCQQGTRALLQTLGDLGYRASAKKAQICQKQVKYLGYLLKEGQRWLTEARKETVMGQPTPKTPRQLREFLGKAGFCRLFIPGFAEMAAPLYPLTKPGTLFEWGPDQQKAYQEIKQALLTAPALGLPDLTKPFELFVDEKQGYAKGVLTQKLGPWRRPVAYLSKKLDPVAAGWPPCLRMVAAIAVLTKDAGKLTMGQPLVILAPHAVEALVKQPPDRWLSNARMTHYQALLLDTDRVQFGPIVALNPATLLPLPEEGLQHDCLDILAEAHGTRPDLTDQPLPDADHTWYTDGSSFLQEGQRKAGAAVTTETEVVWAKALPAGTSAQRAELIALTQALKMAEGKKLNVYTDSRYAFATAHIHGEIYRRRGWLTSEGKEIKNKDEILALLKALFLPKRLSIIHCPGHQKGNRAEARGNRMADQAAREVATRETPETSTLLAGKRTADGSEFEKRTADGSEFESPKKKAKVE

SEQ ID NO: 2600 - protein, 2093 aa, synthetic construct
MPAAKRVKLDGGDKKYSIGLDIGTNSVGWAVITDEYKVPSKKFKVLGNTDRHSIKKNLIGALLFDSGETAEATRLKRTARRRYTRRKNRICYLQEIFSNEMAKVDDSFFHRLEESFLVEEDKKHERHPIFGNIVDEVAYHEKYPTIYHLRKKLVDSTDKADLRLIYLALAHMIKFRGHFLIEGDLNPDNSDVDKLFIQLVQTYNQLFEENPINASGVDAKAILSARLSKSRRLENLIAQLPGEKKNGLFGNLIALSLGLTPNFKSNFDLAEDAKLQLSKDTYDDDLDNLLAQIGDQYADLFLAAKNLSDAILLSDILRVNTEITKAPLSASMIKRYDEHHQDLTLLKALVRQQLPEKYKEIFFDQSKNGYAGYIDGGASQEEFYKFIKPILEKMDGTEELLVKLNREDLLRKQRTFDNGSIPHQIHLGELHAILRRQEDFYPFLKDNREKIEKILTFRIPYYVGPLARGNSRFAWMTRKSEETITPWNFEEVVDKGASAQSFIERMTNFDKNLPNEKVLPKHSLLYEYFTVYNELTKVKYVTEGMRKPAFLSGEQKKAIVDLLFKTNRKVTVKQLKEDYFKKIECFDSVEISGVEDRFNASLGTYHDLLKIIKDKDFLDNEENEDILEDIVLTLTLFEDREMIEERLKTYAHLFDDKVMKQLKRRRYTGWGRLSRKLINGIRDKQSGKTILDFLKSDGFANRNFMQLIHDDSLTFKEDIQKAQVSGQGDSLHEHIANLAGSPAIKKGILQTVKVVDELVKVMGRHKPENIVIEMARENQTTQKGQKNSRERMKRIEEGIKELGSQILKEHPVENTQLQNEKLYLYYLQNGRDMYVDQELDINRLSDYDVDHIVPQSFLKDDSIDNKVLTRSDKARGKSDNVPSEEVVKKMKNYWRQLLNAKLITQRKFDNLTKAERGGLSELDKAGFIKRQLVETRQITKHVAQILDSRMNTKYDENDKLIREVKVITLKSKLVSDFRKDFQFYKVREINNYHHAHDAYLNAVVGTALIKKYPKLESEFVYGDYKVYDVRKMIAKSEQEIGKATAKYFFYSNIMNFFKTEITLANGEIRKRPLIETNGETGEIVWDKGRDFATVRKVLSMPQVNIVKKTEVQTGGFSKESILPKRNSDKLIARKKDWDPKKYGGFDSPTVAYSVLVVAKVEKGKSKKLKSVKELLGITIMERSSFEKNPIDFLEAKGYKEVKKDLIIKLPKYSLFELENGRKRMLASAGELQKGNELALPSKYVNFLYLASHYEKLKGSPEDNEQKQLFVEQHKHYLDEIIEQISEFSKRVILADANLDKVLSAYNKHRDKPIREQAENIIHLFTLTNLGAPAAFKYFDTTIDRKRYTSTKEVLDATLIHQSITGLYETRIDLSQLGGDGGGGSEAAAKGGTLNIEDEYRLHETSKGPDVPLGSTWLSDFPQAWAETGGMGLAVRQAPLIIPLKATSTPVSIKQYPMSQEARLGIKPHIQRLLDQGILVPCQSPWNTPLLPVKKPGTNDYRPVQDLREVNKRVEDIHPTVPNPYNLLSGLPPSHQWYTVLDLKDAFFCLRLHPTSQSLFAFEWRDPEMGISGQLTWTRLPQGFKNSPTLFNEALHRDLADFRIQHPDLILLQYVDDLLLAATSELDCQQGTRALLQTLGDLGYRASAKKAQICQKQVKYLGYLLKEGQRWLTEARKETVMGQPTPKTPRQLREFLGKAGFCRLFIPGFAEMAAPLYPLTKPGTLFEWGPDQQKAYQEIKQALLTAPALGLPDLTKPFELFVDEKQGYAKGVLTQKLGPWRRPVAYLSKKLDPVAAGWPPCLRMVAAIAVLTKDAGKLTMGQPLVILAPHAVEALVKQPPDRWLSNARMTHYQALLLDTDRVQFGPIVALNPATLLPLPEEGLQHDCLDILAEAHGTRPDLTDQPLPDADHTWYTDGSSFLQEGQRKAGAAVTTETEVVWAKALPAGTSAQRAELIALTQALKMAEGKKLNVYTDSRYAFATAHIHGEIYRRRGWLTSEGKEIKNKDEILALLKALFLPKRLSIIHCPGHQKGNRAEARGNRMADQAAREVATRETPETSTLLAGKRTADGSEFEKRTADGSEFESPKKKAKVE

SEQ ID NO: 2601 - protein, 2094 aa, synthetic construct
MPAAKRVKLDGGDKKYSIGLDIGTNSVGWAVITDEYKVPSKKFKVLGNTDRHSIKKNLIGALLFDSGETAEATRLKRTARRRYTRRKNRICYLQEIFSNEMAKVDDSFFHRLEESFLVEEDKKHERHPIFGNIVDEVAYHEKYPTIYHLRKKLVDSTDKADLRLIYLALAHMIKFRGHFLIEGDLNPDNSDVDKLFIQLVQTYNQLFEENPINASGVDAKAILSARLSKSRRLENLIAQLPGEKKNGLFGNLIALSLGLTPNFKSNFDLAEDAKLQLSKDTYDDDLDNLLAQIGDQYADLFLAAKNLSDAILLSDILRVNTEITKAPLSASMIKRYDEHHQDLTLLKALVRQQLPEKYKEIFFDQSKNGYAGYIDGGASQEEFYKFIKPILEKMDGTEELLVKLNREDLLRKQRTFDNGSIPHQIHLGELHAILRRQEDFYPFLKDNREKIEKILTFRIPYYVGPLARGNSRFAWMTRKSEETITPWNFEEVVDKGASAQSFIERMTNFDKNLPNEKVLPKHSLLYEYFTVYNELTKVKYVTEGMRKPAFLSGEQKKAIVDLLFKTNRKVTVKQLKEDYFKKIECFDSVEISGVEDRFNASLGTYHDLLKIIKDKDFLDNEENEDILEDIVLTLTLFEDREMIEERLKTYAHLFDDKVMKQLKRRRYTGWGRLSRKLINGIRDKQSGKTILDFLKSDGFANRNFMQLIHDDSLTFKEDIQKAQVSGQGDSLHEHIANLAGSPAIKKGILQTVKVVDELVKVMGRHKPENIVIEMARENQTTQKGQKNSRERMKRIEEGIKELGSQILKEHPVENTQLQNEKLYLYYLQNGRDMYVDQELDINRLSDYDVDHIVPQSFLKDDSIDNKVLTRSDKARGKSDNVPSEEVVKKMKNYWRQLLNAKLITQRKFDNLTKAERGGLSELDKAGFIKRQLVETRQITKHVAQILDSRMNTKYDENDKLIREVKVITLKSKLVSDFRKDFQFYKVREINNYHHAHDAYLNAVVGTALIKKYPKLESEFVYGDYKVYDVRKMIAKSEQEIGKATAKYFFYSNIMNFFKTEITLANGEIRKRPLIETNGETGEIVWDKGRDFATVRKVLSMPQVNIVKKTEVQTGGFSKESILPKRNSDKLIARKKDWDPKKYGGFDSPTVAYSVLVVAKVEKGKSKKLKSVKELLGITIMERSSFEKNPIDFLEAKGYKEVKKDLIIKLPKYSLFELENGRKRMLASAGELQKGNELALPSKYVNFLYLASHYEKLKGSPEDNEQKQLFVEQHKHYLDEIIEQISEFSKRVILADANLDKVLSAYNKHRDKPIREQAENIIHLFTLTNLGAPAAFKYFDTTIDRKRYTSTKEVLDATLIHQSITGLYETRIDLSQLGGDGGGGSGGGGSSGGTLNIEDEYRLHETSKGPDVPLGSTWLSDFPQAWAETGGMGLAVRQAPLIIPLKATSTPVSIKQYPMSQEARLGIKPHIQRLLDQGILVPCQSPWNTPLLPVKKPGTNDYRPVQDLREVNKRVEDIHPTVPNPYNLLSGLPPSHQWYTVLDLKDAFFCLRLHPTSQSLFAFEWRDPEMGISGQLTWTRLPQGFKNSPTLFNEALHRDLADFRIQHPDLILLQYVDDLLLAATSELDCQQGTRALLQTLGDLGYRASAKKAQICQKQVKYLGYLLKEGQRWLTEARKETVMGQPTPKTPRQLREFLGKAGFCRLFIPGFAEMAAPLYPLTKPGTLFEWGPDQQKAYQEIKQALLTAPALGLPDLTKPFELFVDEKQGYAKGVLTQKLGPWRRPVAYLSKKLDPVAAGWPPCLRMVAAIAVLTKDAGKLTMGQPLVILAPHAVEALVKQPPDRWLSNARMTHYQALLLDTDRVQFGPIVALNPATLLPLPEEGLQHDCLDILAEAHGTRPDLTDQPLPDADHTWYTDGSSFLQEGQRKAGAAVTTETEVVWAKALPAGTSAQRAELIALTQALKMAEGKKLNVYTDSRYAFATAHIHGEIYRRRGWLTSEGKEIKNKDEILALLKALFLPKRLSIIHCPGHQKGNRAEARGNRMADQAAREVATRETPETSTLLAGKRTADGSEFEKRTADGSEFESPKKKAKVE

SEQ ID NO: 2602 - protein, 2089 aa, synthetic construct
MPAAKRVKLDGGDKKYSIGLDIGTNSVGWAVITDEYKVPSKKFKVLGNTDRHSIKKNLIGALLFDSGETAEATRLKRTARRRYTRRKNRICYLQEIFSNEMAKVDDSFFHRLEESFLVEEDKKHERHPIFGNIVDEVAYHEKYPTIYHLRKKLVDSTDKADLRLIYLALAHMIKFRGHFLIEGDLNPDNSDVDKLFIQLVQTYNQLFEENPINASGVDAKAILSARLSKSRRLENLIAQLPGEKKNGLFGNLIALSLGLTPNFKSNFDLAEDAKLQLSKDTYDDDLDNLLAQIGDQYADLFLAAKNLSDAILLSDILRVNTEITKAPLSASMIKRYDEHHQDLTLLKALVRQQLPEKYKEIFFDQSKNGYAGYIDGGASQEEFYKFIKPILEKMDGTEELLVKLNREDLLRKQRTFDNGSIPHQIHLGELHAILRRQEDFYPFLKDNREKIEKILTFRIPYYVGPLARGNSRFAWMTRKSEETITPWNFEEVVDKGASAQSFIERMTNFDKNLPNEKVLPKHSLLYEYFTVYNELTKVKYVTEGMRKPAFLSGEQKKAIVDLLFKTNRKVTVKQLKEDYFKKIECFDSVEISGVEDRFNASLGTYHDLLKIIKDKDFLDNEENEDILEDIVLTLTLFEDREMIEERLKTYAHLFDDKVMKQLKRRRYTGWGRLSRKLINGIRDKQSGKTILDFLKSDGFANRNFMQLIHDDSLTFKEDIQKAQVSGQGDSLHEHIANLAGSPAIKKGILQTVKVVDELVKVMGRHKPENIVIEMARENQTTQKGQKNSRERMKRIEEGIKELGSQILKEHPVENTQLQNEKLYLYYLQNGRDMYVDQELDINRLSDYDVDHIVPQSFLKDDSIDNKVLTRSDKARGKSDNVPSEEVVKKMKNYWRQLLNAKLITQRKFDNLTKAERGGLSELDKAGFIKRQLVETRQITKHVAQILDSRMNTKYDENDKLIREVKVITLKSKLVSDFRKDFQFYKVREINNYHHAHDAYLNAVVGTALIKKYPKLESEFVYGDYKVYDVRKMIAKSEQEIGKATAKYFFYSNIMNFFKTEITLANGEIRKRPLIETNGETGEIVWDKGRDFATVRKVLSMPQVNIVKKTEVQTGGFSKESILPKRNSDKLIARKKDWDPKKYGGFDSPTVAYSVLVVAKVEKGKSKKLKSVKELLGITIMERSSFEKNPIDFLEAKGYKEVKKDLIIKLPKYSLFELENGRKRMLASAGELQKGNELALPSKYVNFLYLASHYEKLKGSPEDNEQKQLFVEQHKHYLDEIIEQISEFSKRVILADANLDKVLSAYNKHRDKPIREQAENIIHLFTLTNLGAPAAFKYFDTTIDRKRYTSTKEVLDATLIHQSITGLYETRIDLSQLGGDGGGGGGGGTLNIEDEYRLHETSKGPDVPLGSTWLSDFPQAWAETGGMGLAVRQAPLIIPLKATSTPVSIKQYPMSQEARLGIKPHIQRLLDQGILVPCQSPWNTPLLPVKKPGTNDYRPVQDLREVNKRVEDIHPTVPNPYNLLSGLPPSHQWYTVLDLKDAFFCLRLHPTSQSLFAFEWRDPEMGISGQLTWTRLPQGFKNSPTLFNEALHRDLADFRIQHPDLILLQYVDDLLLAATSELDCQQGTRALLQTLGDLGYRASAKKAQICQKQVKYLGYLLKEGQRWLTEARKETVMGQPTPKTPRQLREFLGKAGFCRLFIPGFAEMAAPLYPLTKPGTLFEWGPDQQKAYQEIKQALLTAPALGLPDLTKPFELFVDEKQGYAKGVLTQKLGPWRRPVAYLSKKLDPVAAGWPPCLRMVAAIAVLTKDAGKLTMGQPLVILAPHAVEALVKQPPDRWLSNARMTHYQALLLDTDRVQFGPIVALNPATLLPLPEEGLQHDCLDILAEAHGTRPDLTDQPLPDADHTWYTDGSSFLQEGQRKAGAAVTTETEVVWAKALPAGTSAQRAELIALTQALKMAEGKKLNVYTDSRYAFATAHIHGEIYRRRGWLTSEGKEIKNKDEILALLKALFLPKRLSIIHCPGHQKGNRAEARGNRMADQAAREVATRETPETSTLLAGKRTADGSEFEKRTADGSEFESPKKKAKVE

SEQ ID NO: 2603 - protein, 2096 aa, synthetic construct
MPAAKRVKLDGGDKKYSIGLDIGTNSVGWAVITDEYKVPSKKFKVLGNTDRHSIKKNLIGALLFDSGETAEATRLKRTARRRYTRRKNRICYLQEIFSNEMAKVDDSFFHRLEESFLVEEDKKHERHPIFGNIVDEVAYHEKYPTIYHLRKKLVDSTDKADLRLIYLALAHMIKFRGHFLIEGDLNPDNSDVDKLFIQLVQTYNQLFEENPINASGVDAKAILSARLSKSRRLENLIAQLPGEKKNGLFGNLIALSLGLTPNFKSNFDLAEDAKLQLSKDTYDDDLDNLLAQIGDQYADLFLAAKNLSDAILLSDILRVNTEITKAPLSASMIKRYDEHHQDLTLLKALVRQQLPEKYKEIFFDQSKNGYAGYIDGGASQEEFYKFIKPILEKMDGTEELLVKLNREDLLRKQRTFDNGSIPHQIHLGELHAILRRQEDFYPFLKDNREKIEKILTFRIPYYVGPLARGNSRFAWMTRKSEETITPWNFEEVVDKGASAQSFIERMTNFDKNLPNEKVLPKHSLLYEYFTVYNELTKVKYVTEGMRKPAFLSGEQKKAIVDLLFKTNRKVTVKQLKEDYFKKIECFDSVEISGVEDRFNASLGTYHDLLKIIKDKDFLDNEENEDILEDIVLTLTLFEDREMIEERLKTYAHLFDDKVMKQLKRRRYTGWGRLSRKLINGIRDKQSGKTILDFLKSDGFANRNFMQLIHDDSLTFKEDIQKAQVSGQGDSLHEHIANLAGSPAIKKGILQTVKVVDELVKVMGRHKPENIVIEMARENQTTQKGQKNSRERMKRIEEGIKELGSQILKEHPVENTQLQNEKLYLYYLQNGRDMYVDQELDINRLSDYDVDHIVPQSFLKDDSIDNKVLTRSDKARGKSDNVPSEEVVKKMKNYWRQLLNAKLITQRKFDNLTKAERGGLSELDKAGFIKRQLVETRQITKHVAQILDSRMNTKYDENDKLIREVKVITLKSKLVSDFRKDFQFYKVREINNYHHAHDAYLNAVVGTALIKKYPKLESEFVYGDYKVYDVRKMIAKSEQEIGKATAKYFFYSNIMNFFKTEITLANGEIRKRPLIETNGETGEIVWDKGRDFATVRKVLSMPQVNIVKKTEVQTGGFSKESILPKRNSDKLIARKKDWDPKKYGGFDSPTVAYSVLVVAKVEKGKSKKLKSVKELLGITIMERSSFEKNPIDFLEAKGYKEVKKDLIIKLPKYSLFELENGRKRMLASAGELQKGNELALPSKYVNFLYLASHYEKLKGSPEDNEQKQLFVEQHKHYLDEIIEQISEFSKRVILADANLDKVLSAYNKHRDKPIREQAENIIHLFTLTNLGAPAAFKYFDTTIDRKRYTSTKEVLDATLIHQSITGLYETRIDLSQLGGDGGGGSGGGEAAAKGGTLNIEDEYRLHETSKGPDVPLGSTWLSDFPQAWAETGGMGLAVRQAPLIIPLKATSTPVSIKQYPMSQEARLGIKPHIQRLLDQGILVPCQSPWNTPLLPVKKPGTNDYRPVQDLREVNKRVEDIHPTVPNPYNLLSGLPPSHQWYTVLDLKDAFFCLRLHPTSQSLFAFEWRDPEMGISGQLTWTRLPQGFKNSPTLFNEALHRDLADFRIQHPDLILLQYVDDLLLAATSELDCQQGTRALLQTLGDLGYRASAKKAQICQKQVKYLGYLLKEGQRWLTEARKETVMGQPTPKTPRQLREFLGKAGFCRLFIPGFAEMAAPLYPLTKPGTLFEWGPDQQKAYQEIKQALLTAPALGLPDLTKPFELFVDEKQGYAKGVLTQKLGPWRRPVAYLSKKLDPVAAGWPPCLRMVAAIAVLTKDAGKLTMGQPLVILAPHAVEALVKQPPDRWLSNARMTHYQALLLDTDRVQFGPIVALNPATLLPLPEEGLQHDCLDILAEAHGTRPDLTDQPLPDADHTWYTDGSSFLQEGQRKAGAAVTTETEVVWAKALPAGTSAQRAELIALTQALKMAEGKKLNVYTDSRYAFATAHIHGEIYRRRGWLTSEGKEIKNKDEILALLKALFLPKRLSIIHCPGHQKGNRAEARGNRMADQAAREVATRETPETSTLLAGKRTADGSEFEKRTADGSEFESPKKKAKVE

SEQ ID NO: 2604 - protein, 2091 aa, synthetic construct
MPAAKRVKLDGGDKKYSIGLDIGTNSVGWAVITDEYKVPSKKFKVLGNTDRHSIKKNLIGALLFDSGETAEATRLKRTARRRYTRRKNRICYLQEIFSNEMAKVDDSFFHRLEESFLVEEDKKHERHPIFGNIVDEVAYHEKYPTIYHLRKKLVDSTDKADLRLIYLALAHMIKFRGHFLIEGDLNPDNSDVDKLFIQLVQTYNQLFEENPINASGVDAKAILSARLSKSRRLENLIAQLPGEKKNGLFGNLIALSLGLTPNFKSNFDLAEDAKLQLSKDTYDDDLDNLLAQIGDQYADLFLAAKNLSDAILLSDILRVNTEITKAPLSASMIKRYDEHHQDLTLLKALVRQQLPEKYKEIFFDQSKNGYAGYIDGGASQEEFYKFIKPILEKMDGTEELLVKLNREDLLRKQRTFDNGSIPHQIHLGELHAILRRQEDFYPFLKDNREKIEKILTFRIPYYVGPLARGNSRFAWMTRKSEETITPWNFEEVVDKGASAQSFIERMTNFDKNLPNEKVLPKHSLLYEYFTVYNELTKVKYVTEGMRKPAFLSGEQKKAIVDLLFKTNRKVTVKQLKEDYFKKIECFDSVEISGVEDRFNASLGTYHDLLKIIKDKDFLDNEENEDILEDIVLTLTLFEDREMIEERLKTYAHLFDDKVMKQLKRRRYTGWGRLSRKLINGIRDKQSGKTILDFLKSDGFANRNFMQLIHDDSLTFKEDIQKAQVSGQGDSLHEHIANLAGSPAIKKGILQTVKVVDELVKVMGRHKPENIVIEMARENQTTQKGQKNSRERMKRIEEGIKELGSQILKEHPVENTQLQNEKLYLYYLQNGRDMYVDQELDINRLSDYDVDHIVPQSFLKDDSIDNKVLTRSDKARGKSDNVPSEEVVKKMKNYWRQLLNAKLITQRKFDNLTKAERGGLSELDKAGFIKRQLVETRQITKHVAQILDSRMNTKYDENDKLIREVKVITLKSKLVSDFRKDFQFYKVREINNYHHAHDAYLNAVVGTALIKKYPKLESEFVYGDYKVYDVRKMIAKSEQEIGKATAKYFFYSNIMNFFKTEITLANGEIRKRPLIETNGETGEIVWDKGRDFATVRKVLSMPQVNIVKKTEVQTGGFSKESILPKRNSDKLIARKKDWDPKKYGGFDSPTVAYSVLVVAKVEKGKSKKLKSVKELLGITIMERSSFEKNPIDFLEAKGYKEVKKDLIIKLPKYSLFELENGRKRMLASAGELQKGNELALPSKYVNFLYLASHYEKLKGSPEDNEQKQLFVEQHKHYLDEIIEQISEFSKRVILADANLDKVLSAYNKHRDKPIREQAENIIHLFTLTNLGAPAAFKYFDTTIDRKRYTSTKEVLDATLIHQSITGLYETRIDLSQLGGDGGGGSGGSGGTLNIEDEYRLHETSKGPDVPLGSTWLSDFPQAWAETGGMGLAVRQAPLIIPLKATSTPVSIKQYPMSQEARLGIKPHIQRLLDQGILVPCQSPWNTPLLPVKKPGTNDYRPVQDLREVNKRVEDIHPTVPNPYNLLSGLPPSHQWYTVLDLKDAFFCLRLHPTSQSLFAFEWRDPEMGISGQLTWTRLPQGFKNSPTLFNEALHRDLADFRIQHPDLILLQYVDDLLLAATSELDCQQGTRALLQTLGDLGYRASAKKAQICQKQVKYLGYLLKEGQRWLTEARKETVMGQPTPKTPRQLREFLGKAGFCRLFIPGFAEMAAPLYPLTKPGTLFEWGPDQQKAYQEIKQALLTAPALGLPDLTKPFELFVDEKQGYAKGVLTQKLGPWRRPVAYLSKKLDPVAAGWPPCLRMVAAIAVLTKDAGKLTMGQPLVILAPHAVEALVKQPPDRWLSNARMTHYQALLLDTDRVQFGPIVALNPATLLPLPEEGLQHDCLDILAEAHGTRPDLTDQPLPDADHTWYTDGSSFLQEGQRKAGAAVTTETEVVWAKALPAGTSAQRAELIALTQALKMAEGKKLNVYTDSRYAFATAHIHGEIYRRRGWLTSEGKEIKNKDEILALLKALFLPKRLSIIHCPGHQKGNRAEARGNRMADQAAREVATRETPETSTLLAGKRTADGSEFEKRTADGSEFESPKKKAKVE

SEQ ID NO: 2605 - protein, 2094 aa, synthetic construct
MPAAKRVKLDGGDKKYSIGLDIGTNSVGWAVITDEYKVPSKKFKVLGNTDRHSIKKNLIGALLFDSGETAEATRLKRTARRRYTRRKNRICYLQEIFSNEMAKVDDSFFHRLEESFLVEEDKKHERHPIFGNIVDEVAYHEKYPTIYHLRKKLVDSTDKADLRLIYLALAHMIKFRGHFLIEGDLNPDNSDVDKLFIQLVQTYNQLFEENPINASGVDAKAILSARLSKSRRLENLIAQLPGEKKNGLFGNLIALSLGLTPNFKSNFDLAEDAKLQLSKDTYDDDLDNLLAQIGDQYADLFLAAKNLSDAILLSDILRVNTEITKAPLSASMIKRYDEHHQDLTLLKALVRQQLPEKYKEIFFDQSKNGYAGYIDGGASQEEFYKFIKPILEKMDGTEELLVKLNREDLLRKQRTFDNGSIPHQIHLGELHAILRRQEDFYPFLKDNREKIEKILTFRIPYYVGPLARGNSRFAWMTRKSEETITPWNFEEVVDKGASAQSFIERMTNFDKNLPNEKVLPKHSLLYEYFTVYNELTKVKYVTEGMRKPAFLSGEQKKAIVDLLFKTNRKVTVKQLKEDYFKKIECFDSVEISGVEDRFNASLGTYHDLLKIIKDKDFLDNEENEDILEDIVLTLTLFEDREMIEERLKTYAHLFDDKVMKQLKRRRYTGWGRLSRKLINGIRDKQSGKTILDFLKSDGFANRNFMQLIHDDSLTFKEDIQKAQVSGQGDSLHEHIANLAGSPAIKKGILQTVKVVDELVKVMGRHKPENIVIEMARENQTTQKGQKNSRERMKRIEEGIKELGSQILKEHPVENTQLQNEKLYLYYLQNGRDMYVDQELDINRLSDYDVDHIVPQSFLKDDSIDNKVLTRSDKARGKSDNVPSEEVVKKMKNYWRQLLNAKLITQRKFDNLTKAERGGLSELDKAGFIKRQLVETRQITKHVAQILDSRMNTKYDENDKLIREVKVITLKSKLVSDFRKDFQFYKVREINNYHHAHDAYLNAVVGTALIKKYPKLESEFVYGDYKVYDVRKMIAKSEQEIGKATAKYFFYSNIMNFFKTEITLANGEIRKRPLIETNGETGEIVWDKGRDFATVRKVLSMPQVNIVKKTEVQTGGFSKESILPKRNSDKLIARKKDWDPKKYGGFDSPTVAYSVLVVAKVEKGKSKKLKSVKELLGITIMERSSFEKNPIDFLEAKGYKEVKKDLIIKLPKYSLFELENGRKRMLASAGELQKGNELALPSKYVNFLYLASHYEKLKGSPEDNEQKQLFVEQHKHYLDEIIEQISEFSKRVILADANLDKVLSAYNKHRDKPIREQAENIIHLFTLTNLGAPAAFKYFDTTIDRKRYTSTKEVLDATLIHQSITGLYETRIDLSQLGGDGGGGGGGSGSSGGTLNIEDEYRLHETSKGPDVPLGSTWLSDFPQAWAETGGMGLAVRQAPLIIPLKATSTPVSIKQYPMSQEARLGIKPHIQRLLDQGILVPCQSPWNTPLLPVKKPGTNDYRPVQDLREVNKRVEDIHPTVPNPYNLLSGLPPSHQWYTVLDLKDAFFCLRLHPTSQSLFAFEWRDPEMGISGQLTWTRLPQGFKNSPTLFNEALHRDLADFRIQHPDLILLQYVDDLLLAATSELDCQQGTRALLQTLGDLGYRASAKKAQICQKQVKYLGYLLKEGQRWLTEARKETVMGQPTPKTPRQLREFLGKAGFCRLFIPGFAEMAAPLYPLTKPGTLFEWGPDQQKAYQEIKQALLTAPALGLPDLTKPFELFVDEKQGYAKGVLTQKLGPWRRPVAYLSKKLDPVAAGWPPCLRMVAAIAVLTKDAGKLTMGQPLVILAPHAVEALVKQPPDRWLSNARMTHYQALLLDTDRVQFGPIVALNPATLLPLPEEGLQHDCLDILAEAHGTRPDLTDQPLPDADHTWYTDGSSFLQEGQRKAGAAVTTETEVVWAKALPAGTSAQRAELIALTQALKMAEGKKLNVYTDSRYAFATAHIHGEIYRRRGWLTSEGKEIKNKDEILALLKALFLPKRLSIIHCPGHQKGNRAEARGNRMADQAAREVATRETPETSTLLAGKRTADGSEFEKRTADGSEFESPKKKAKVE

SEQ ID NO: 2606 - protein, 2091 aa, synthetic construct
MPAAKRVKLDGGDKKYSIGLDIGTNSVGWAVITDEYKVPSKKFKVLGNTDRHSIKKNLIGALLFDSGETAEATRLKRTARRRYTRRKNRICYLQEIFSNEMAKVDDSFFHRLEESFLVEEDKKHERHPIFGNIVDEVAYHEKYPTIYHLRKKLVDSTDKADLRLIYLALAHMIKFRGHFLIEGDLNPDNSDVDKLFIQLVQTYNQLFEENPINASGVDAKAILSARLSKSRRLENLIAQLPGEKKNGLFGNLIALSLGLTPNFKSNFDLAEDAKLQLSKDTYDDDLDNLLAQIGDQYADLFLAAKNLSDAILLSDILRVNTEITKAPLSASMIKRYDEHHQDLTLLKALVRQQLPEKYKEIFFDQSKNGYAGYIDGGASQEEFYKFIKPILEKMDGTEELLVKLNREDLLRKQRTFDNGSIPHQIHLGELHAILRRQEDFYPFLKDNREKIEKILTFRIPYYVGPLARGNSRFAWMTRKSEETITPWNFEEVVDKGASAQSFIERMTNFDKNLPNEKVLPKHSLLYEYFTVYNELTKVKYVTEGMRKPAFLSGEQKKAIVDLLFKTNRKVTVKQLKEDYFKKIECFDSVEISGVEDRFNASLGTYHDLLKIIKDKDFLDNEENEDILEDIVLTLTLFEDREMIEERLKTYAHLFDDKVMKQLKRRRYTGWGRLSRKLINGIRDKQSGKTILDFLKSDGFANRNFMQLIHDDSLTFKEDIQKAQVSGQGDSLHEHIANLAGSPAIKKGILQTVKVVDELVKVMGRHKPENIVIEMARENQTTQKGQKNSRERMKRIEEGIKELGSQILKEHPVENTQLQNEKLYLYYLQNGRDMYVDQELDINRLSDYDVDHIVPQSFLKDDSIDNKVLTRSDKARGKSDNVPSEEVVKKMKNYWRQLLNAKLITQRKFDNLTKAERGGLSELDKAGFIKRQLVETRQITKHVAQILDSRMNTKYDENDKLIREVKVITLKSKLVSDFRKDFQFYKVREINNYHHAHDAYLNAVVGTALIKKYPKLESEFVYGDYKVYDVRKMIAKSEQEIGKATAKYFFYSNIMNFFKTEITLANGEIRKRPLIETNGETGEIVWDKGRDFATVRKVLSMPQVNIVKKTEVQTGGFSKESILPKRNSDKLIARKKDWDPKKYGGFDSPTVAYSVLVVAKVEKGKSKKLKSVKELLGITIMERSSFEKNPIDFLEAKGYKEVKKDLIIKLPKYSLFELENGRKRMLASAGELQKGNELALPSKYVNFLYLASHYEKLKGSPEDNEQKQLFVEQHKHYLDEIIEQISEFSKRVILADANLDKVLSAYNKHRDKPIREQAENIIHLFTLTNLGAPAAFKYFDTTIDRKRYTSTKEVLDATLIHQSITGLYETRIDLSQLGGDGGPAPGSSGGTLNIEDEYRLHETSKGPDVPLGSTWLSDFPQAWAETGGMGLAVRQAPLIIPLKATSTPVSIKQYPMSQEARLGIKPHIQRLLDQGILVPCQSPWNTPLLPVKKPGTNDYRPVQDLREVNKRVEDIHPTVPNPYNLLSGLPPSHQWYTVLDLKDAFFCLRLHPTSQSLFAFEWRDPEMGISGQLTWTRLPQGFKNSPTLFNEALHRDLADFRIQHPDLILLQYVDDLLLAATSELDCQQGTRALLQTLGDLGYRASAKKAQICQKQVKYLGYLLKEGQRWLTEARKETVMGQPTPKTPRQLREFLGKAGFCRLFIPGFAEMAAPLYPLTKPGTLFEWGPDQQKAYQEIKQALLTAPALGLPDLTKPFELFVDEKQGYAKGVLTQKLGPWRRPVAYLSKKLDPVAAGWPPCLRMVAAIAVLTKDAGKLTMGQPLVILAPHAVEALVKQPPDRWLSNARMTHYQALLLDTDRVQFGPIVALNPATLLPLPEEGLQHDCLDILAEAHGTRPDLTDQPLPDADHTWYTDGSSFLQEGQRKAGAAVTTETEVVWAKALPAGTSAQRAELIALTQALKMAEGKKLNVYTDSRYAFATAHIHGEIYRRRGWLTSEGKEIKNKDEILALLKALFLPKRLSIIHCPGHQKGNRAEARGNRMADQAAREVATRETPETSTLLAGKRTADGSEFEKRTADGSEFESPKKKAKVE

SEQ ID NO: 2607 - protein, 2093 aa, synthetic construct
MPAAKRVKLDGGDKKYSIGLDIGTNSVGWAVITDEYKVPSKKFKVLGNTDRHSIKKNLIGALLFDSGETAEATRLKRTARRRYTRRKNRICYLQEIFSNEMAKVDDSFFHRLEESFLVEEDKKHERHPIFGNIVDEVAYHEKYPTIYHLRKKLVDSTDKADLRLIYLALAHMIKFRGHFLIEGDLNPDNSDVDKLFIQLVQTYNQLFEENPINASGVDAKAILSARLSKSRRLENLIAQLPGEKKNGLFGNLIALSLGLTPNFKSNFDLAEDAKLQLSKDTYDDDLDNLLAQIGDQYADLFLAAKNLSDAILLSDILRVNTEITKAPLSASMIKRYDEHHQDLTLLKALVRQQLPEKYKEIFFDQSKNGYAGYIDGGASQEEFYKFIKPILEKMDGTEELLVKLNREDLLRKQRTFDNGSIPHQIHLGELHAILRRQEDFYPFLKDNREKIEKILTFRIPYYVGPLARGNSRFAWMTRKSEETITPWNFEEVVDKGASAQSFIERMTNFDKNLPNEKVLPKHSLLYEYFTVYNELTKVKYVTEGMRKPAFLSGEQKKAIVDLLFKTNRKVTVKQLKEDYFKKIECFDSVEISGVEDRFNASLGTYHDLLKIIKDKDFLDNEENEDILEDIVLTLTLFEDREMIEERLKTYAHLFDDKVMKQLKRRRYTGWGRLSRKLINGIRDKQSGKTILDFLKSDGFANRNFMQLIHDDSLTFKEDIQKAQVSGQGDSLHEHIANLAGSPAIKKGILQTVKVVDELVKVMGRHKPENIVIEMARENQTTQKGQKNSRERMKRIEEGIKELGSQILKEHPVENTQLQNEKLYLYYLQNGRDMYVDQELDINRLSDYDVDHIVPQSFLKDDSIDNKVLTRSDKARGKSDNVPSEEVVKKMKNYWRQLLNAKLITQRKFDNLTKAERGGLSELDKAGFIKRQLVETRQITKHVAQILDSRMNTKYDENDKLIREVKVITLKSKLVSDFRKDFQFYKVREINNYHHAHDAYLNAVVGTALIKKYPKLESEFVYGDYKVYDVRKMIAKSEQEIGKATAKYFFYSNIMNFFKTEITLANGEIRKRPLIETNGETGEIVWDKGRDFATVRKVLSMPQVNIVKKTEVQTGGFSKESILPKRNSDKLIARKKDWDPKKYGGFDSPTVAYSVLVVAKVEKGKSKKLKSVKELLGITIMERSSFEKNPIDFLEAKGYKEVKKDLIIKLPKYSLFELENGRKRMLASAGELQKGNELALPSKYVNFLYLASHYEKLKGSPEDNEQKQLFVEQHKHYLDEIIEQISEFSKRVILADANLDKVLSAYNKHRDKPIREQAENIIHLFTLTNLGAPAAFKYFDTTIDRKRYTSTKEVLDATLIHQSITGLYETRIDLSQLGGDGGGGGEAAAKGGTLNIEDEYRLHETSKGPDVPLGSTWLSDFPQAWAETGGMGLAVRQAPLIIPLKATSTPVSIKQYPMSQEARLGIKPHIQRLLDQGILVPCQSPWNTPLLPVKKPGTNDYRPVQDLREVNKRVEDIHPTVPNPYNLLSGLPPSHQWYTVLDLKDAFFCLRLHPTSQSLFAFEWRDPEMGISGQLTWTRLPQGFKNSPTLFNEALHRDLADFRIQHPDLILLQYVDDLLLAATSELDCQQGTRALLQTLGDLGYRASAKKAQICQKQVKYLGYLLKEGQRWLTEARKETVMGQPTPKTPRQLREFLGKAGFCRLFIPGFAEMAAPLYPLTKPGTLFEWGPDQQKAYQEIKQALLTAPALGLPDLTKPFELFVDEKQGYAKGVLTQKLGPWRRPVAYLSKKLDPVAAGWPPCLRMVAAIAVLTKDAGKLTMGQPLVILAPHAVEALVKQPPDRWLSNARMTHYQALLLDTDRVQFGPIVALNPATLLPLPEEGLQHDCLDILAEAHGTRPDLTDQPLPDADHTWYTDGSSFLQEGQRKAGAAVTTETEVVWAKALPAGTSAQRAELIALTQALKMAEGKKLNVYTDSRYAFATAHIHGEIYRRRGWLTSEGKEIKNKDEILALLKALFLPKRLSIIHCPGHQKGNRAEARGNRMADQAAREVATRETPETSTLLAGKRTADGSEFEKRTADGSEFESPKKKAKVE

SEQ ID NO: 2608 - protein, 2096 aa, synthetic construct
MPAAKRVKLDGGDKKYSIGLDIGTNSVGWAVITDEYKVPSKKFKVLGNTDRHSIKKNLIGALLFDSGETAEATRLKRTARRRYTRRKNRICYLQEIFSNEMAKVDDSFFHRLEESFLVEEDKKHERHPIFGNIVDEVAYHEKYPTIYHLRKKLVDSTDKADLRLIYLALAHMIKFRGHFLIEGDLNPDNSDVDKLFIQLVQTYNQLFEENPINASGVDAKAILSARLSKSRRLENLIAQLPGEKKNGLFGNLIALSLGLTPNFKSNFDLAEDAKLQLSKDTYDDDLDNLLAQIGDQYADLFLAAKNLSDAILLSDILRVNTEITKAPLSASMIKRYDEHHQDLTLLKALVRQQLPEKYKEIFFDQSKNGYAGYIDGGASQEEFYKFIKPILEKMDGTEELLVKLNREDLLRKQRTFDNGSIPHQIHLGELHAILRRQEDFYPFLKDNREKIEKILTFRIPYYVGPLARGNSRFAWMTRKSEETITPWNFEEVVDKGASAQSFIERMTNFDKNLPNEKVLPKHSLLYEYFTVYNELTKVKYVTEGMRKPAFLSGEQKKAIVDLLFKTNRKVTVKQLKEDYFKKIECFDSVEISGVEDRFNASLGTYHDLLKIIKDKDFLDNEENEDILEDIVLTLTLFEDREMIEERLKTYAHLFDDKVMKQLKRRRYTGWGRLSRKLINGIRDKQSGKTILDFLKSDGFANRNFMQLIHDDSLTFKEDIQKAQVSGQGDSLHEHIANLAGSPAIKKGILQTVKVVDELVKVMGRHKPENIVIEMARENQTTQKGQKNSRERMKRIEEGIKELGSQILKEHPVENTQLQNEKLYLYYLQNGRDMYVDQELDINRLSDYDVDHIVPQSFLKDDSIDNKVLTRSDKARGKSDNVPSEEVVKKMKNYWRQLLNAKLITQRKFDNLTKAERGGLSELDKAGFIKRQLVETRQITKHVAQILDSRMNTKYDENDKLIREVKVITLKSKLVSDFRKDFQFYKVREINNYHHAHDAYLNAVVGTALIKKYPKLESEFVYGDYKVYDVRKMIAKSEQEIGKATAKYFFYSNIMNFFKTEITLANGEIRKRPLIETNGETGEIVWDKGRDFATVRKVLSMPQVNIVKKTEVQTGGFSKESILPKRNSDKLIARKKDWDPKKYGGFDSPTVAYSVLVVAKVEKGKSKKLKSVKELLGITIMERSSFEKNPIDFLEAKGYKEVKKDLIIKLPKYSLFELENGRKRMLASAGELQKGNELALPSKYVNFLYLASHYEKLKGSPEDNEQKQLFVEQHKHYLDEIIEQISEFSKRVILADANLDKVLSAYNKHRDKPIREQAENIIHLFTLTNLGAPAAFKYFDTTIDRKRYTSTKEVLDATLIHQSITGLYETRIDLSQLGGDGGGGSEAAAKGSSGGTLNIEDEYRLHETSKGPDVPLGSTWLSDFPQAWAETGGMGLAVRQAPLIIPLKATSTPVSIKQYPMSQEARLGIKPHIQRLLDQGILVPCQSPWNTPLLPVKKPGTNDYRPVQDLREVNKRVEDIHPTVPNPYNLLSGLPPSHQWYTVLDLKDAFFCLRLHPTSQSLFAFEWRDPEMGISGQLTWTRLPQGFKNSPTLFNEALHRDLADFRIQHPDLILLQYVDDLLLAATSELDCQQGTRALLQTLGDLGYRASAKKAQICQKQVKYLGYLLKEGQRWLTEARKETVMGQPTPKTPRQLREFLGKAGFCRLFIPGFAEMAAPLYPLTKPGTLFEWGPDQQKAYQEIKQALLTAPALGLPDLTKPFELFVDEKQGYAKGVLTQKLGPWRRPVAYLSKKLDPVAAGWPPCLRMVAAIAVLTKDAGKLTMGQPLVILAPHAVEALVKQPPDRWLSNARMTHYQALLLDTDRVQFGPIVALNPATLLPLPEEGLQHDCLDILAEAHGTRPDLTDQPLPDADHTWYTDGSSFLQEGQRKAGAAVTTETEVVWAKALPAGTSAQRAELIALTQALKMAEGKKLNVYTDSRYAFATAHIHGEIYRRRGWLTSEGKEIKNKDEILALLKALFLPKRLSIIHCPGHQKGNRAEARGNRMADQAAREVATRETPETSTLLAGKRTADGSEFEKRTADGSEFESPKKKAKVE

SEQ ID NO: 2609 - protein, 2118 aa, synthetic construct
MPAAKRVKLDGGDKKYSIGLDIGTNSVGWAVITDEYKVPSKKFKVLGNTDRHSIKKNLIGALLFDSGETAEATRLKRTARRRYTRRKNRICYLQEIFSNEMAKVDDSFFHRLEESFLVEEDKKHERHPIFGNIVDEVAYHEKYPTIYHLRKKLVDSTDKADLRLIYLALAHMIKFRGHFLIEGDLNPDNSDVDKLFIQLVQTYNQLFEENPINASGVDAKAILSARLSKSRRLENLIAQLPGEKKNGLFGNLIALSLGLTPNFKSNFDLAEDAKLQLSKDTYDDDLDNLLAQIGDQYADLFLAAKNLSDAILLSDILRVNTEITKAPLSASMIKRYDEHHQDLTLLKALVRQQLPEKYKEIFFDQSKNGYAGYIDGGASQEEFYKFIKPILEKMDGTEELLVKLNREDLLRKQRTFDNGSIPHQIHLGELHAILRRQEDFYPFLKDNREKIEKILTFRIPYYVGPLARGNSRFAWMTRKSEETITPWNFEEVVDKGASAQSFIERMTNFDKNLPNEKVLPKHSLLYEYFTVYNELTKVKYVTEGMRKPAFLSGEQKKAIVDLLFKTNRKVTVKQLKEDYFKKIECFDSVEISGVEDRFNASLGTYHDLLKIIKDKDFLDNEENEDILEDIVLTLTLFEDREMIEERLKTYAHLFDDKVMKQLKRRRYTGWGRLSRKLINGIRDKQSGKTILDFLKSDGFANRNFMQLIHDDSLTFKEDIQKAQVSGQGDSLHEHIANLAGSPAIKKGILQTVKVVDELVKVMGRHKPENIVIEMARENQTTQKGQKNSRERMKRIEEGIKELGSQILKEHPVENTQLQNEKLYLYYLQNGRDMYVDQELDINRLSDYDVDHIVPQSFLKDDSIDNKVLTRSDKARGKSDNVPSEEVVKKMKNYWRQLLNAKLITQRKFDNLTKAERGGLSELDKAGFIKRQLVETRQITKHVAQILDSRMNTKYDENDKLIREVKVITLKSKLVSDFRKDFQFYKVREINNYHHAHDAYLNAVVGTALIKKYPKLESEFVYGDYKVYDVRKMIAKSEQEIGKATAKYFFYSNIMNFFKTEITLANGEIRKRPLIETNGETGEIVWDKGRDFATVRKVLSMPQVNIVKKTEVQTGGFSKESILPKRNSDKLIARKKDWDPKKYGGFDSPTVAYSVLVVAKVEKGKSKKLKSVKELLGITIMERSSFEKNPIDFLEAKGYKEVKKDLIIKLPKYSLFELENGRKRMLASAGELQKGNELALPSKYVNFLYLASHYEKLKGSPEDNEQKQLFVEQHKHYLDEIIEQISEFSKRVILADANLDKVLSAYNKHRDKPIREQAENIIHLFTLTNLGAPAAFKYFDTTIDRKRYTSTKEVLDATLIHQSITGLYETRIDLSQLGGDGGSGGSSGGSSGSETPGTSESATPESSGGSSGGSSGGTLNIEDEYRLHETSKGPDVPLGSTWLSDFPQAWAETGGMGLAVRQAPLIIPLKATSTPVSIKQYPMSQEARLGIKPHIQRLLDQGILVPCQSPWNTPLLPVKKPGTNDYRPVQDLREVNKRVEDIHPTVPNPYNLLSGLPPSHQWYTVLDLKDAFFCLRLHPTSQSLFAFEWRDPEMGISGQLTWTRLPQGFKNSPTLFNEALHRDLADFRIQHPDLILLQYVDDLLLAATSELDCQQGTRALLQTLGDLGYRASAKKAQICQKQVKYLGYLLKEGQRWLTEARKETVMGQPTPKTPRQLREFLGKAGFCRLFIPGFAEMAAPLYPLTKPGTLFEWGPDQQKAYQEIKQALLTAPALGLPDLTKPFELFVDEKQGYAKGVLTQKLGPWRRPVAYLSKKLDPVAAGWPPCLRMVAAIAVLTKDAGKLTMGQPLVILAPHAVEALVKQPPDRWLSNARMTHYQALLLDTDRVQFGPIVALNPATLLPLPEEGLQHDCLDILAEAHGTRPDLTDQPLPDADHTWYTDGSSFLQEGQRKAGAAVTTETEVVWAKALPAGTSAQRAELIALTQALKMAEGKKLNVYTDSRYAFATAHIHGEIYRRRGWLTSEGKEIKNKDEILALLKALFLPKRLSIIHCPGHQKGNRAEARGNRMADQAAREVATRETPETSTLLAGKRTADGSEFEKRTADGSEFESPKKKAKVE

SEQ ID NO: 2610 - protein, 2125 aa, synthetic construct
MPAAKRVKLDGGDKKYSIGLDIGTNSVGWAVITDEYKVPSKKFKVLGNTDRHSIKKNLIGALLFDSGETAEATRLKRTARRRYTRRKNRICYLQEIFSNEMAKVDDSFFHRLEESFLVEEDKKHERHPIFGNIVDEVAYHEKYPTIYHLRKKLVDSTDKADLRLIYLALAHMIKFRGHFLIEGDLNPDNSDVDKLFIQLVQTYNQLFEENPINASGVDAKAILSARLSKSRRLENLIAQLPGEKKNGLFGNLIALSLGLTPNFKSNFDLAEDAKLQLSKDTYDDDLDNLLAQIGDQYADLFLAAKNLSDAILLSDILRVNTEITKAPLSASMIKRYDEHHQDLTLLKALVRQQLPEKYKEIFFDQSKNGYAGYIDGGASQEEFYKFIKPILEKMDGTEELLVKLNREDLLRKQRTFDNGSIPHQIHLGELHAILRRQEDFYPFLKDNREKIEKILTFRIPYYVGPLARGNSRFAWMTRKSEETITPWNFEEVVDKGASAQSFIERMTNFDKNLPNEKVLPKHSLLYEYFTVYNELTKVKYVTEGMRKPAFLSGEQKKAIVDLLFKTNRKVTVKQLKEDYFKKIECFDSVEISGVEDRFNASLGTYHDLLKIIKDKDFLDNEENEDILEDIVLTLTLFEDREMIEERLKTYAHLFDDKVMKQLKRRRYTGWGRLSRKLINGIRDKQSGKTILDFLKSDGFANRNFMQLIHDDSLTFKEDIQKAQVSGQGDSLHEHIANLAGSPAIKKGILQTVKVVDELVKVMGRHKPENIVIEMARENQTTQKGQKNSRERMKRIEEGIKELGSQILKEHPVENTQLQNEKLYLYYLQNGRDMYVDQELDINRLSDYDVDHIVPQSFLKDDSIDNKVLTRSDKARGKSDNVPSEEVVKKMKNYWRQLLNAKLITQRKFDNLTKAERGGLSELDKAGFIKRQLVETRQITKHVAQILDSRMNTKYDENDKLIREVKVITLKSKLVSDFRKDFQFYKVREINNYHHAHDAYLNAVVGTALIKKYPKLESEFVYGDYKVYDVRKMIAKSEQEIGKATAKYFFYSNIMNFFKTEITLANGEIRKRPLIETNGETGEIVWDKGRDFATVRKVLSMPQVNIVKKTEVQTGGFSKESILPKRNSDKLIARKKDWDPKKYGGFDSPTVAYSVLVVAKVEKGKSKKLKSVKELLGITIMERSSFEKNPIDFLEAKGYKEVKKDLIIKLPKYSLFELENGRKRMLASAGELQKGNELALPSKYVNFLYLASHYEKLKGSPEDNEQKQLFVEQHKHYLDEIIEQISEFSKRVILADANLDKVLSAYNKHRDKPIREQAENIIHLFTLTNLGAPAAFKYFDTTIDRKRYTSTKEVLDATLIHQSITGLYETRIDLSQLGGDGGEAAAKEAAAKEAAAKEAAAKGGTLNIEDEYRLHETSKEPDVSLGSTWLSDFPQAWAETGGMGLAVRQAPLIIPLKATSTPVSIKQYPMSQEARLGIKPHIQRLLDQGILVPCQSPWNTPLLPVKKPGTNDYRPVQDLREVNKRVEDIHPTVPNPYNLLSGLPPSHQWYTVLDLKDAFFCLRLHPTSQPLFAFEWRDPEMGISGQLTWTRLPQGFKNSPTLFNEALHRDLADFRIQHPDLILLQYVDDLLLAATSELDCQQGTRALLQTLGNLGYRASAKKAQICQKQVKYLGYLLKEGQRWLTEARKETVMGQPTPKTPRQLREFLGKAGFCRLFIPGFAEMAAPLYPLTKPGTLFNWGPDQQKAYQEIKQALLTAPALGLPDLTKPFELFVDEKQGYAKGVLTQKLGPWRRPVAYLSKKLDPVAAGWPPCLRMVAAIAVLTKDAGKLTMGQPLVILAPHAVEALVKQPPDRWLSNARMTHYQALLLDTDRVQFGPVVALNPATLLPLPEEGLQHNCLDILAEAHGTRPDLTDQPLPDADHTWYTDGSSLLQEGQRKAGAAVTTETEVIWAKALPAGTSAQRAELIALTQALKMAEGKKLNVYTDSRYAFATAHIHGEIYRRRGWLTSEGKEIKNKDEILALLKALFLPKRLSIIHCPGHQKGHSAEARGNRMADQAARKAAITETPDTSTLLIENSSPSGGSKRTADGSEFEAGKRTADGSEFEKRTADGSEFESPKKKAKVE

SEQ ID NO: 2611 - protein, 2151 aa, synthetic construct
MPAAKRVKLDGGDKKYSIGLDIGTNSVGWAVITDEYKVPSKKFKVLGNTDRHSIKKNLIGALLFDSGETAEATRLKRTARRRYTRRKNRICYLQEIFSNEMAKVDDSFFHRLEESFLVEEDKKHERHPIFGNIVDEVAYHEKYPTIYHLRKKLVDSTDKADLRLIYLALAHMIKFRGHFLIEGDLNPDNSDVDKLFIQLVQTYNQLFEENPINASGVDAKAILSARLSKSRRLENLIAQLPGEKKNGLFGNLIALSLGLTPNFKSNFDLAEDAKLQLSKDTYDDDLDNLLAQIGDQYADLFLAAKNLSDAILLSDILRVNTEITKAPLSASMIKRYDEHHQDLTLLKALVRQQLPEKYKEIFFDQSKNGYAGYIDGGASQEEFYKFIKPILEKMDGTEELLVKLNREDLLRKQRTFDNGSIPHQIHLGELHAILRRQEDFYPFLKDNREKIEKILTFRIPYYVGPLARGNSRFAWMTRKSEETITPWNFEEVVDKGASAQSFIERMTNFDKNLPNEKVLPKHSLLYEYFTVYNELTKVKYVTEGMRKPAFLSGEQKKAIVDLLFKTNRKVTVKQLKEDYFKKIECFDSVEISGVEDRFNASLGTYHDLLKIIKDKDFLDNEENEDILEDIVLTLTLFEDREMIEERLKTYAHLFDDKVMKQLKRRRYTGWGRLSRKLINGIRDKQSGKTILDFLKSDGFANRNFMQLIHDDSLTFKEDIQKAQVSGQGDSLHEHIANLAGSPAIKKGILQTVKVVDELVKVMGRHKPENIVIEMARENQTTQKGQKNSRERMKRIEEGIKELGSQILKEHPVENTQLQNEKLYLYYLQNGRDMYVDQELDINRLSDYDVDHIVPQSFLKDDSIDNKVLTRSDKARGKSDNVPSEEVVKKMKNYWRQLLNAKLITQRKFDNLTKAERGGLSELDKAGFIKRQLVETRQITKHVAQILDSRMNTKYDENDKLIREVKVITLKSKLVSDFRKDFQFYKVREINNYHHAHDAYLNAVVGTALIKKYPKLESEFVYGDYKVYDVRKMIAKSEQEIGKATAKYFFYSNIMNFFKTEITLANGEIRKRPLIETNGETGEIVWDKGRDFATVRKVLSMPQVNIVKKTEVQTGGFSKESILPKRNSDKLIARKKDWDPKKYGGFDSPTVAYSVLVVAKVEKGKSKKLKSVKELLGITIMERSSFEKNPIDFLEAKGYKEVKKDLIIKLPKYSLFELENGRKRMLASAGELQKGNELALPSKYVNFLYLASHYEKLKGSPEDNEQKQLFVEQHKHYLDEIIEQISEFSKRVILADANLDKVLSAYNKHRDKPIREQAENIIHLFTLTNLGAPAAFKYFDTTIDRKRYTSTKEVLDATLIHQSITGLYETRIDLSQLGGDGGAEAAAKEAAAKEAAAKEAAAKALEAEAAAKEAAAKEAAAKEAAAKAGGTLNIEDEYRLHETSKEPDVSLGSTWLSDFPQAWAETGGMGLAVRQAPLIIPLKATSTPVSIKQYPMSQEARLGIKPHIQRLLDQGILVPCQSPWNTPLLPVKKPGTNDYRPVQDLREVNKRVEDIHPTVPNPYNLLSGLPPSHQWYTVLDLKDAFFCLRLHPTSQPLFAFEWRDPEMGISGQLTWTRLPQGFKNSPTLFNEALHRDLADFRIQHPDLILLQYVDDLLLAATSELDCQQGTRALLQTLGNLGYRASAKKAQICQKQVKYLGYLLKEGQRWLTEARKETVMGQPTPKTPRQLREFLGKAGFCRLFIPGFAEMAAPLYPLTKPGTLFNWGPDQQKAYQEIKQALLTAPALGLPDLTKPFELFVDEKQGYAKGVLTQKLGPWRRPVAYLSKKLDPVAAGWPPCLRMVAAIAVLTKDAGKLTMGQPLVILAPHAVEALVKQPPDRWLSNARMTHYQALLLDTDRVQFGPVVALNPATLLPLPEEGLQHNCLDILAEAHGTRPDLTDQPLPDADHTWYTDGSSLLQEGQRKAGAAVTTETEVIWAKALPAGTSAQRAELIALTQALKMAEGKKLNVYTDSRYAFATAHIHGEIYRRRGWLTSEGKEIKNKDEILALLKALFLPKRLSIIHCPGHQKGHSAEARGNRMADQAARKAAITETPDTSTLLIENSSPSGGSKRTADGSEFEAGKRTADGSEFEKRTADGSEFESPKKKAKVE

SEQ ID NO: 2612 - protein, 2123 aa, synthetic construct
MPAAKRVKLDGGDKKYSIGLDIGTNSVGWAVITDEYKVPSKKFKVLGNTDRHSIKKNLIGALLFDSGETAEATRLKRTARRRYTRRKNRICYLQEIFSNEMAKVDDSFFHRLEESFLVEEDKKHERHPIFGNIVDEVAYHEKYPTIYHLRKKLVDSTDKADLRLIYLALAHMIKFRGHFLIEGDLNPDNSDVDKLFIQLVQTYNQLFEENPINASGVDAKAILSARLSKSRRLENLIAQLPGEKKNGLFGNLIALSLGLTPNFKSNFDLAEDAKLQLSKDTYDDDLDNLLAQIGDQYADLFLAAKNLSDAILLSDILRVNTEITKAPLSASMIKRYDEHHQDLTLLKALVRQQLPEKYKEIFFDQSKNGYAGYIDGGASQEEFYKFIKPILEKMDGTEELLVKLNREDLLRKQRTFDNGSIPHQIHLGELHAILRRQEDFYPFLKDNREKIEKILTFRIPYYVGPLARGNSRFAWMTRKSEETITPWNFEEVVDKGASAQSFIERMTNFDKNLPNEKVLPKHSLLYEYFTVYNELTKVKYVTEGMRKPAFLSGEQKKAIVDLLFKTNRKVTVKQLKEDYFKKIECFDSVEISGVEDRFNASLGTYHDLLKIIKDKDFLDNEENEDILEDIVLTLTLFEDREMIEERLKTYAHLFDDKVMKQLKRRRYTGWGRLSRKLINGIRDKQSGKTILDFLKSDGFANRNFMQLIHDDSLTFKEDIQKAQVSGQGDSLHEHIANLAGSPAIKKGILQTVKVVDELVKVMGRHKPENIVIEMARENQTTQKGQKNSRERMKRIEEGIKELGSQILKEHPVENTQLQNEKLYLYYLQNGRDMYVDQELDINRLSDYDVDHIVPQSFLKDDSIDNKVLTRSDKARGKSDNVPSEEVVKKMKNYWRQLLNAKLITQRKFDNLTKAERGGLSELDKAGFIKRQLVETRQITKHVAQILDSRMNTKYDENDKLIREVKVITLKSKLVSDFRKDFQFYKVREINNYHHAHDAYLNAVVGTALIKKYPKLESEFVYGDYKVYDVRKMIAKSEQEIGKATAKYFFYSNIMNFFKTEITLANGEIRKRPLIETNGETGEIVWDKGRDFATVRKVLSMPQVNIVKKTEVQTGGFSKESILPKRNSDKLIARKKDWDPKKYGGFDSPTVAYSVLVVAKVEKGKSKKLKSVKELLGITIMERSSFEKNPIDFLEAKGYKEVKKDLIIKLPKYSLFELENGRKRMLASAGELQKGNELALPSKYVNFLYLASHYEKLKGSPEDNEQKQLFVEQHKHYLDEIIEQISEFSKRVILADANLDKVLSAYNKHRDKPIREQAENIIHLFTLTNLGAPAAFKYFDTTIDRKRYTSTKEVLDATLIHQSITGLYETRIDLSQLGGDGGGSSGSSGSSGSSGSSGSSGGTLNIEDEYRLHETSKEPDVSLGSTWLSDFPQAWAETGGMGLAVRQAPLIIPLKATSTPVSIKQYPMSQEARLGIKPHIQRLLDQGILVPCQSPWNTPLLPVKKPGTNDYRPVQDLREVNKRVEDIHPTVPNPYNLLSGLPPSHQWYTVLDLKDAFFCLRLHPTSQPLFAFEWRDPEMGISGQLTWTRLPQGFKNSPTLFNEALHRDLADFRIQHPDLILLQYVDDLLLAATSELDCQQGTRALLQTLGNLGYRASAKKAQICQKQVKYLGYLLKEGQRWLTEARKETVMGQPTPKTPRQLREFLGKAGFCRLFIPGFAEMAAPLYPLTKPGTLFNWGPDQQKAYQEIKQALLTAPALGLPDLTKPFELFVDEKQGYAKGVLTQKLGPWRRPVAYLSKKLDPVAAGWPPCLRMVAAIAVLTKDAGKLTMGQPLVILAPHAVEALVKQPPDRWLSNARMTHYQALLLDTDRVQFGPVVALNPATLLPLPEEGLQHNCLDILAEAHGTRPDLTDQPLPDADHTWYTDGSSLLQEGQRKAGAAVTTETEVIWAKALPAGTSAQRAELIALTQALKMAEGKKLNVYTDSRYAFATAHIHGEIYRRRGWLTSEGKEIKNKDEILALLKALFLPKRLSIIHCPGHQKGHSAEARGNRMADQAARKAAITETPDTSTLLIENSSPSGGSKRTADGSEFEAGKRTADGSEFEKRTADGSEFESPKKKAKVE

SEQ ID NO: 2613 - protein, 2130 aa, synthetic construct
MPAAKRVKLDGGDKKYSIGLDIGTNSVGWAVITDEYKVPSKKFKVLGNTDRHSIKKNLIGALLFDSGETAEATRLKRTARRRYTRRKNRICYLQEIFSNEMAKVDDSFFHRLEESFLVEEDKKHERHPIFGNIVDEVAYHEKYPTIYHLRKKLVDSTDKADLRLIYLALAHMIKFRGHFLIEGDLNPDNSDVDKLFIQLVQTYNQLFEENPINASGVDAKAILSARLSKSRRLENLIAQLPGEKKNGLFGNLIALSLGLTPNFKSNFDLAEDAKLQLSKDTYDDDLDNLLAQIGDQYADLFLAAKNLSDAILLSDILRVNTEITKAPLSASMIKRYDEHHQDLTLLKALVRQQLPEKYKEIFFDQSKNGYAGYIDGGASQEEFYKFIKPILEKMDGTEELLVKLNREDLLRKQRTFDNGSIPHQIHLGELHAILRRQEDFYPFLKDNREKIEKILTFRIPYYVGPLARGNSRFAWMTRKSEETITPWNFEEVVDKGASAQSFIERMTNFDKNLPNEKVLPKHSLLYEYFTVYNELTKVKYVTEGMRKPAFLSGEQKKAIVDLLFKTNRKVTVKQLKEDYFKKIECFDSVEISGVEDRFNASLGTYHDLLKIIKDKDFLDNEENEDILEDIVLTLTLFEDREMIEERLKTYAHLFDDKVMKQLKRRRYTGWGRLSRKLINGIRDKQSGKTILDFLKSDGFANRNFMQLIHDDSLTFKEDIQKAQVSGQGDSLHEHIANLAGSPAIKKGILQTVKVVDELVKVMGRHKPENIVIEMARENQTTQKGQKNSRERMKRIEEGIKELGSQILKEHPVENTQLQNEKLYLYYLQNGRDMYVDQELDINRLSDYDVDHIVPQSFLKDDSIDNKVLTRSDKARGKSDNVPSEEVVKKMKNYWRQLLNAKLITQRKFDNLTKAERGGLSELDKAGFIKRQLVETRQITKHVAQILDSRMNTKYDENDKLIREVKVITLKSKLVSDFRKDFQFYKVREINNYHHAHDAYLNAVVGTALIKKYPKLESEFVYGDYKVYDVRKMIAKSEQEIGKATAKYFFYSNIMNFFKTEITLANGEIRKRPLIETNGETGEIVWDKGRDFATVRKVLSMPQVNIVKKTEVQTGGFSKESILPKRNSDKLIARKKDWDPKKYGGFDSPTVAYSVLVVAKVEKGKSKKLKSVKELLGITIMERSSFEKNPIDFLEAKGYKEVKKDLIIKLPKYSLFELENGRKRMLASAGELQKGNELALPSKYVNFLYLASHYEKLKGSPEDNEQKQLFVEQHKHYLDEIIEQISEFSKRVILADANLDKVLSAYNKHRDKPIREQAENIIHLFTLTNLGAPAAFKYFDTTIDRKRYTSTKEVLDATLIHQSITGLYETRIDLSQLGGDGGGGGGSGGGGSGGGGSGGGGSGGGGSGGTLNIEDEYRLHETSKEPDVSLGSTWLSDFPQAWAETGGMGLAVRQAPLIIPLKATSTPVSIKQYPMSQEARLGIKPHIQRLLDQGILVPCQSPWNTPLLPVKKPGTNDYRPVQDLREVNKRVEDIHPTVPNPYNLLSGLPPSHQWYTVLDLKDAFFCLRLHPTSQPLFAFEWRDPEMGISGQLTWTRLPQGFKNSPTLFNEALHRDLADFRIQHPDLILLQYVDDLLLAATSELDCQQGTRALLQTLGNLGYRASAKKAQICQKQVKYLGYLLKEGQRWLTEARKETVMGQPTPKTPRQLREFLGKAGFCRLFIPGFAEMAAPLYPLTKPGTLFNWGPDQQKAYQEIKQALLTAPALGLPDLTKPFELFVDEKQGYAKGVLTQKLGPWRRPVAYLSKKLDPVAAGWPPCLRMVAAIAVLTKDAGKLTMGQPLVILAPHAVEALVKQPPDRWLSNARMTHYQALLLDTDRVQFGPVVALNPATLLPLPEEGLQHNCLDILAEAHGTRPDLTDQPLPDADHTWYTDGSSLLQEGQRKAGAAVTTETEVIWAKALPAGTSAQRAELIALTQALKMAEGKKLNVYTDSRYAFATAHIHGEIYRRRGWLTSEGKEIKNKDEILALLKALFLPKRLSIIHCPGHQKGHSAEARGNRMADQAARKAAITETPDTSTLLIENSSPSGGSKRTADGSEFEAGKRTADGSEFEKRTADGSEFESPKKKAKVE

SEQ ID NO: 2614 - protein, 2116 aa, synthetic construct
MPAAKRVKLDGGDKKYSIGLDIGTNSVGWAVITDEYKVPSKKFKVLGNTDRHSIKKNLIGALLFDSGETAEATRLKRTARRRYTRRKNRICYLQEIFSNEMAKVDDSFFHRLEESFLVEEDKKHERHPIFGNIVDEVAYHEKYPTIYHLRKKLVDSTDKADLRLIYLALAHMIKFRGHFLIEGDLNPDNSDVDKLFIQLVQTYNQLFEENPINASGVDAKAILSARLSKSRRLENLIAQLPGEKKNGLFGNLIALSLGLTPNFKSNFDLAEDAKLQLSKDTYDDDLDNLLAQIGDQYADLFLAAKNLSDAILLSDILRVNTEITKAPLSASMIKRYDEHHQDLTLLKALVRQQLPEKYKEIFFDQSKNGYAGYIDGGASQEEFYKFIKPILEKMDGTEELLVKLNREDLLRKQRTFDNGSIPHQIHLGELHAILRRQEDFYPFLKDNREKIEKILTFRIPYYVGPLARGNSRFAWMTRKSEETITPWNFEEVVDKGASAQSFIERMTNFDKNLPNEKVLPKHSLLYEYFTVYNELTKVKYVTEGMRKPAFLSGEQKKAIVDLLFKTNRKVTVKQLKEDYFKKIECFDSVEISGVEDRFNASLGTYHDLLKIIKDKDFLDNEENEDILEDIVLTLTLFEDREMIEERLKTYAHLFDDKVMKQLKRRRYTGWGRLSRKLINGIRDKQSGKTILDFLKSDGFANRNFMQLIHDDSLTFKEDIQKAQVSGQGDSLHEHIANLAGSPAIKKGILQTVKVVDELVKVMGRHKPENIVIEMARENQTTQKGQKNSRERMKRIEEGIKELGSQILKEHPVENTQLQNEKLYLYYLQNGRDMYVDQELDINRLSDYDVDHIVPQSFLKDDSIDNKVLTRSDKARGKSDNVPSEEVVKKMKNYWRQLLNAKLITQRKFDNLTKAERGGLSELDKAGFIKRQLVETRQITKHVAQILDSRMNTKYDENDKLIREVKVITLKSKLVSDFRKDFQFYKVREINNYHHAHDAYLNAVVGTALIKKYPKLESEFVYGDYKVYDVRKMIAKSEQEIGKATAKYFFYSNIMNFFKTEITLANGEIRKRPLIETNGETGEIVWDKGRDFATVRKVLSMPQVNIVKKTEVQTGGFSKESILPKRNSDKLIARKKDWDPKKYGGFDSPTVAYSVLVVAKVEKGKSKKLKSVKELLGITIMERSSFEKNPIDFLEAKGYKEVKKDLIIKLPKYSLFELENGRKRMLASAGELQKGNELALPSKYVNFLYLASHYEKLKGSPEDNEQKQLFVEQHKHYLDEIIEQISEFSKRVILADANLDKVLSAYNKHRDKPIREQAENIIHLFTLTNLGAPAAFKYFDTTIDRKRYTSTKEVLDATLIHQSITGLYETRIDLSQLGGDGGEAAAKGGGPAPGGTLNIEDEYRLHETSKEPDVSLGSTWLSDFPQAWAETGGMGLAVRQAPLIIPLKATSTPVSIKQYPMSQEARLGIKPHIQRLLDQGILVPCQSPWNTPLLPVKKPGTNDYRPVQDLREVNKRVEDIHPTVPNPYNLLSGLPPSHQWYTVLDLKDAFFCLRLHPTSQPLFAFEWRDPEMGISGQLTWTRLPQGFKNSPTLFNEALHRDLADFRIQHPDLILLQYVDDLLLAATSELDCQQGTRALLQTLGNLGYRASAKKAQICQKQVKYLGYLLKEGQRWLTEARKETVMGQPTPKTPRQLREFLGKAGFCRLFIPGFAEMAAPLYPLTKPGTLFNWGPDQQKAYQEIKQALLTAPALGLPDLTKPFELFVDEKQGYAKGVLTQKLGPWRRPVAYLSKKLDPVAAGWPPCLRMVAAIAVLTKDAGKLTMGQPLVILAPHAVEALVKQPPDRWLSNARMTHYQALLLDTDRVQFGPVVALNPATLLPLPEEGLQHNCLDILAEAHGTRPDLTDQPLPDADHTWYTDGSSLLQEGQRKAGAAVTTETEVIWAKALPAGTSAQRAELIALTQALKMAEGKKLNVYTDSRYAFATAHIHGEIYRRRGWLTSEGKEIKNKDEILALLKALFLPKRLSIIHCPGHQKGHSAEARGNRMADQAARKAAITETPDTSTLLIENSSPSGGSKRTADGSEFEAGKRTADGSEFEKRTADGSEFESPKKKAKVE

SEQ ID NO: 2615 - protein, 2125 aa, synthetic construct
MPAAKRVKLDGGDKKYSIGLDIGTNSVGWAVITDEYKVPSKKFKVLGNTDRHSIKKNLIGALLFDSGETAEATRLKRTARRRYTRRKNRICYLQEIFSNEMAKVDDSFFHRLEESFLVEEDKKHERHPIFGNIVDEVAYHEKYPTIYHLRKKLVDSTDKADLRLIYLALAHMIKFRGHFLIEGDLNPDNSDVDKLFIQLVQTYNQLFEENPINASGVDAKAILSARLSKSRRLENLIAQLPGEKKNGLFGNLIALSLGLTPNFKSNFDLAEDAKLQLSKDTYDDDLDNLLAQIGDQYADLFLAAKNLSDAILLSDILRVNTEITKAPLSASMIKRYDEHHQDLTLLKALVRQQLPEKYKEIFFDQSKNGYAGYIDGGASQEEFYKFIKPILEKMDGTEELLVKLNREDLLRKQRTFDNGSIPHQIHLGELHAILRRQEDFYPFLKDNREKIEKILTFRIPYYVGPLARGNSRFAWMTRKSEETITPWNFEEVVDKGASAQSFIERMTNFDKNLPNEKVLPKHSLLYEYFTVYNELTKVKYVTEGMRKPAFLSGEQKKAIVDLLFKTNRKVTVKQLKEDYFKKIECFDSVEISGVEDRFNASLGTYHDLLKIIKDKDFLDNEENEDILEDIVLTLTLFEDREMIEERLKTYAHLFDDKVMKQLKRRRYTGWGRLSRKLINGIRDKQSGKTILDFLKSDGFANRNFMQLIHDDSLTFKEDIQKAQVSGQGDSLHEHIANLAGSPAIKKGILQTVKVVDELVKVMGRHKPENIVIEMARENQTTQKGQKNSRERMKRIEEGIKELGSQILKEHPVENTQLQNEKLYLYYLQNGRDMYVDQELDINRLSDYDVDHIVPQSFLKDDSIDNKVLTRSDKARGKSDNVPSEEVVKKMKNYWRQLLNAKLITQRKFDNLTKAERGGLSELDKAGFIKRQLVETRQITKHVAQILDSRMNTKYDENDKLIREVKVITLKSKLVSDFRKDFQFYKVREINNYHHAHDAYLNAVVGTALIKKYPKLESEFVYGDYKVYDVRKMIAKSEQEIGKATAKYFFYSNIMNFFKTEITLANGEIRKRPLIETNGETGEIVWDKGRDFATVRKVLSMPQVNIVKKTEVQTGGFSKESILPKRNSDKLIARKKDWDPKKYGGFDSPTVAYSVLVVAKVEKGKSKKLKSVKELLGITIMERSSFEKNPIDFLEAKGYKEVKKDLIIKLPKYSLFELENGRKRMLASAGELQKGNELALPSKYVNFLYLASHYEKLKGSPEDNEQKQLFVEQHKHYLDEIIEQISEFSKRVILADANLDKVLSAYNKHRDKPIREQAENIIHLFTLTNLGAPAAFKYFDTTIDRKRYTSTKEVLDATLIHQSITGLYETRIDLSQLGGDGGGGGGSGGGGSGGGGSGGGGSGGTLNIEDEYRLHETSKEPDVSLGSTWLSDFPQAWAETGGMGLAVRQAPLIIPLKATSTPVSIKQYPMSQEARLGIKPHIQRLLDQGILVPCQSPWNTPLLPVKKPGTNDYRPVQDLREVNKRVEDIHPTVPNPYNLLSGLPPSHQWYTVLDLKDAFFCLRLHPTSQPLFAFEWRDPEMGISGQLTWTRLPQGFKNSPTLFNEALHRDLADFRIQHPDLILLQYVDDLLLAATSELDCQQGTRALLQTLGNLGYRASAKKAQICQKQVKYLGYLLKEGQRWLTEARKETVMGQPTPKTPRQLREFLGKAGFCRLFIPGFAEMAAPLYPLTKPGTLFNWGPDQQKAYQEIKQALLTAPALGLPDLTKPFELFVDEKQGYAKGVLTQKLGPWRRPVAYLSKKLDPVAAGWPPCLRMVAAIAVLTKDAGKLTMGQPLVILAPHAVEALVKQPPDRWLSNARMTHYQALLLDTDRVQFGPVVALNPATLLPLPEEGLQHNCLDILAEAHGTRPDLTDQPLPDADHTWYTDGSSLLQEGQRKAGAAVTTETEVIWAKALPAGTSAQRAELIALTQALKMAEGKKLNVYTDSRYAFATAHIHGEIYRRRGWLTSEGKEIKNKDEILALLKALFLPKRLSIIHCPGHQKGHSAEARGNRMADQAARKAAITETPDTSTLLIENSSPSGGSKRTADGSEFEAGKRTADGSEFEKRTADGSEFESPKKKAKVE

SEQ ID NO: 2616 - protein, 2114 aa, synthetic construct
MPAAKRVKLDGGDKKYSIGLDIGTNSVGWAVITDEYKVPSKKFKVLGNTDRHSIKKNLIGALLFDSGETAEATRLKRTARRRYTRRKNRICYLQEIFSNEMAKVDDSFFHRLEESFLVEEDKKHERHPIFGNIVDEVAYHEKYPTIYHLRKKLVDSTDKADLRLIYLALAHMIKFRGHFLIEGDLNPDNSDVDKLFIQLVQTYNQLFEENPINASGVDAKAILSARLSKSRRLENLIAQLPGEKKNGLFGNLIALSLGLTPNFKSNFDLAEDAKLQLSKDTYDDDLDNLLAQIGDQYADLFLAAKNLSDAILLSDILRVNTEITKAPLSASMIKRYDEHHQDLTLLKALVRQQLPEKYKEIFFDQSKNGYAGYIDGGASQEEFYKFIKPILEKMDGTEELLVKLNREDLLRKQRTFDNGSIPHQIHLGELHAILRRQEDFYPFLKDNREKIEKILTFRIPYYVGPLARGNSRFAWMTRKSEETITPWNFEEVVDKGASAQSFIERMTNFDKNLPNEKVLPKHSLLYEYFTVYNELTKVKYVTEGMRKPAFLSGEQKKAIVDLLFKTNRKVTVKQLKEDYFKKIECFDSVEISGVEDRFNASLGTYHDLLKIIKDKDFLDNEENEDILEDIVLTLTLFEDREMIEERLKTYAHLFDDKVMKQLKRRRYTGWGRLSRKLINGIRDKQSGKTILDFLKSDGFANRNFMQLIHDDSLTFKEDIQKAQVSGQGDSLHEHIANLAGSPAIKKGILQTVKVVDELVKVMGRHKPENIVIEMARENQTTQKGQKNSRERMKRIEEGIKELGSQILKEHPVENTQLQNEKLYLYYLQNGRDMYVDQELDINRLSDYDVDHIVPQSFLKDDSIDNKVLTRSDKARGKSDNVPSEEVVKKMKNYWRQLLNAKLITQRKFDNLTKAERGGLSELDKAGFIKRQLVETRQITKHVAQILDSRMNTKYDENDKLIREVKVITLKSKLVSDFRKDFQFYKVREINNYHHAHDAYLNAVVGTALIKKYPKLESEFVYGDYKVYDVRKMIAKSEQEIGKATAKYFFYSNIMNFFKTEITLANGEIRKRPLIETNGETGEIVWDKGRDFATVRKVLSMPQVNIVKKTEVQTGGFSKESILPKRNSDKLIARKKDWDPKKYGGFDSPTVAYSVLVVAKVEKGKSKKLKSVKELLGITIMERSSFEKNPIDFLEAKGYKEVKKDLIIKLPKYSLFELENGRKRMLASAGELQKGNELALPSKYVNFLYLASHYEKLKGSPEDNEQKQLFVEQHKHYLDEIIEQISEFSKRVILADANLDKVLSAYNKHRDKPIREQAENIIHLFTLTNLGAPAAFKYFDTTIDRKRYTSTKEVLDATLIHQSITGLYETRIDLSQLGGDGGPAPGSSGGGGGTLNIEDEYRLHETSKEPDVSLGSTWLSDFPQAWAETGGMGLAVRQAPLIIPLKATSTPVSIKQYPMSQEARLGIKPHIQRLLDQGILVPCQSPWNTPLLPVKKPGTNDYRPVQDLREVNKRVEDIHPTVPNPYNLLSGLPPSHQWYTVLDLKDAFFCLRLHPTSQPLFAFEWRDPEMGISGQLTWTRLPQGFKNSPTLFNEALHRDLADFRIQHPDLILLQYVDDLLLAATSELDCQQGTRALLQTLGNLGYRASAKKAQICQKQVKYLGYLLKEGQRWLTEARKETVMGQPTPKTPRQLREFLGKAGFCRLFIPGFAEMAAPLYPLTKPGTLFNWGPDQQKAYQEIKQALLTAPALGLPDLTKPFELFVDEKQGYAKGVLTQKLGPWRRPVAYLSKKLDPVAAGWPPCLRMVAAIAVLTKDAGKLTMGQPLVILAPHAVEALVKQPPDRWLSNARMTHYQALLLDTDRVQFGPVVALNPATLLPLPEEGLQHNCLDILAEAHGTRPDLTDQPLPDADHTWYTDGSSLLQEGQRKAGAAVTTETEVIWAKALPAGTSAQRAELIALTQALKMAEGKKLNVYTDSRYAFATAHIHGEIYRRRGWLTSEGKEIKNKDEILALLKALFLPKRLSIIHCPGHQKGHSAEARGNRMADQAARKAAITETPDTSTLLIENSSPSGGSKRTADGSEFEAGKRTADGSEFEKRTADGSEFESPKKKAKVE

SEQ ID NO: 2617 - protein, 2114 aa, synthetic construct
MPAAKRVKLDGGDKKYSIGLDIGTNSVGWAVITDEYKVPSKKFKVLGNTDRHSIKKNLIGALLFDSGETAEATRLKRTARRRYTRRKNRICYLQEIFSNEMAKVDDSFFHRLEESFLVEEDKKHERHPIFGNIVDEVAYHEKYPTIYHLRKKLVDSTDKADLRLIYLALAHMIKFRGHFLIEGDLNPDNSDVDKLFIQLVQTYNQLFEENPINASGVDAKAILSARLSKSRRLENLIAQLPGEKKNGLFGNLIALSLGLTPNFKSNFDLAEDAKLQLSKDTYDDDLDNLLAQIGDQYADLFLAAKNLSDAILLSDILRVNTEITKAPLSASMIKRYDEHHQDLTLLKALVRQQLPEKYKEIFFDQSKNGYAGYIDGGASQEEFYKFIKPILEKMDGTEELLVKLNREDLLRKQRTFDNGSIPHQIHLGELHAILRRQEDFYPFLKDNREKIEKILTFRIPYYVGPLARGNSRFAWMTRKSEETITPWNFEEVVDKGASAQSFIERMTNFDKNLPNEKVLPKHSLLYEYFTVYNELTKVKYVTEGMRKPAFLSGEQKKAIVDLLFKTNRKVTVKQLKEDYFKKIECFDSVEISGVEDRFNASLGTYHDLLKIIKDKDFLDNEENEDILEDIVLTLTLFEDREMIEERLKTYAHLFDDKVMKQLKRRRYTGWGRLSRKLINGIRDKQSGKTILDFLKSDGFANRNFMQLIHDDSLTFKEDIQKAQVSGQGDSLHEHIANLAGSPAIKKGILQTVKVVDELVKVMGRHKPENIVIEMARENQTTQKGQKNSRERMKRIEEGIKELGSQILKEHPVENTQLQNEKLYLYYLQNGRDMYVDQELDINRLSDYDVDHIVPQSFLKDDSIDNKVLTRSDKARGKSDNVPSEEVVKKMKNYWRQLLNAKLITQRKFDNLTKAERGGLSELDKAGFIKRQLVETRQITKHVAQILDSRMNTKYDENDKLIREVKVITLKSKLVSDFRKDFQFYKVREINNYHHAHDAYLNAVVGTALIKKYPKLESEFVYGDYKVYDVRKMIAKSEQEIGKATAKYFFYSNIMNFFKTEITLANGEIRKRPLIETNGETGEIVWDKGRDFATVRKVLSMPQVNIVKKTEVQTGGFSKESILPKRNSDKLIARKKDWDPKKYGGFDSPTVAYSVLVVAKVEKGKSKKLKSVKELLGITIMERSSFEKNPIDFLEAKGYKEVKKDLIIKLPKYSLFELENGRKRMLASAGELQKGNELALPSKYVNFLYLASHYEKLKGSPEDNEQKQLFVEQHKHYLDEIIEQISEFSKRVILADANLDKVLSAYNKHRDKPIREQAENIIHLFTLTNLGAPAAFKYFDTTIDRKRYTSTKEVLDATLIHQSITGLYETRIDLSQLGGDGGGSSGGGGGSGGTLNIEDEYRLHETSKEPDVSLGSTWLSDFPQAWAETGGMGLAVRQAPLIIPLKATSTPVSIKQYPMSQEARLGIKPHIQRLLDQGILVPCQSPWNTPLLPVKKPGTNDYRPVQDLREVNKRVEDIHPTVPNPYNLLSGLPPSHQWYTVLDLKDAFFCLRLHPTSQPLFAFEWRDPEMGISGQLTWTRLPQGFKNSPTLFNEALHRDLADFRIQHPDLILLQYVDDLLLAATSELDCQQGTRALLQTLGNLGYRASAKKAQICQKQVKYLGYLLKEGQRWLTEARKETVMGQPTPKTPRQLREFLGKAGFCRLFIPGFAEMAAPLYPLTKPGTLFNWGPDQQKAYQEIKQALLTAPALGLPDLTKPFELFVDEKQGYAKGVLTQKLGPWRRPVAYLSKKLDPVAAGWPPCLRMVAAIAVLTKDAGKLTMGQPLVILAPHAVEALVKQPPDRWLSNARMTHYQALLLDTDRVQFGPVVALNPATLLPLPEEGLQHNCLDILAEAHGTRPDLTDQPLPDADHTWYTDGSSLLQEGQRKAGAAVTTETEVIWAKALPAGTSAQRAELIALTQALKMAEGKKLNVYTDSRYAFATAHIHGEIYRRRGWLTSEGKEIKNKDEILALLKALFLPKRLSIIHCPGHQKGHSAEARGNRMADQAARKAAITETPDTSTLLIENSSPSGGSKRTADGSEFEAGKRTADGSEFEKRTADGSEFESPKKKAKVE

SEQ ID NO: 2618 - protein, 2114 aa, synthetic construct
MPAAKRVKLDGGDKKYSIGLDIGTNSVGWAVITDEYKVPSKKFKVLGNTDRHSIKKNLIGALLFDSGETAEATRLKRTARRRYTRRKNRICYLQEIFSNEMAKVDDSFFHRLEESFLVEEDKKHERHPIFGNIVDEVAYHEKYPTIYHLRKKLVDSTDKADLRLIYLALAHMIKFRGHFLIEGDLNPDNSDVDKLFIQLVQTYNQLFEENPINASGVDAKAILSARLSKSRRLENLIAQLPGEKKNGLFGNLIALSLGLTPNFKSNFDLAEDAKLQLSKDTYDDDLDNLLAQIGDQYADLFLAAKNLSDAILLSDILRVNTEITKAPLSASMIKRYDEHHQDLTLLKALVRQQLPEKYKEIFFDQSKNGYAGYIDGGASQEEFYKFIKPILEKMDGTEELLVKLNREDLLRKQRTFDNGSIPHQIHLGELHAILRRQEDFYPFLKDNREKIEKILTFRIPYYVGPLARGNSRFAWMTRKSEETITPWNFEEVVDKGASAQSFIERMTNFDKNLPNEKVLPKHSLLYEYFTVYNELTKVKYVTEGMRKPAFLSGEQKKAIVDLLFKTNRKVTVKQLKEDYFKKIECFDSVEISGVEDRFNASLGTYHDLLKIIKDKDFLDNEENEDILEDIVLTLTLFEDREMIEERLKTYAHLFDDKVMKQLKRRRYTGWGRLSRKLINGIRDKQSGKTILDFLKSDGFANRNFMQLIHDDSLTFKEDIQKAQVSGQGDSLHEHIANLAGSPAIKKGILQTVKVVDELVKVMGRHKPENIVIEMARENQTTQKGQKNSRERMKRIEEGIKELGSQILKEHPVENTQLQNEKLYLYYLQNGRDMYVDQELDINRLSDYDVDHIVPQSFLKDDSIDNKVLTRSDKARGKSDNVPSEEVVKKMKNYWRQLLNAKLITQRKFDNLTKAERGGLSELDKAGFIKRQLVETRQITKHVAQILDSRMNTKYDENDKLIREVKVITLKSKLVSDFRKDFQFYKVREINNYHHAHDAYLNAVVGTALIKKYPKLESEFVYGDYKVYDVRKMIAKSEQEIGKATAKYFFYSNIMNFFKTEITLANGEIRKRPLIETNGETGEIVWDKGRDFATVRKVLSMPQVNIVKKTEVQTGGFSKESILPKRNSDKLIARKKDWDPKKYGGFDSPTVAYSVLVVAKVEKGKSKKLKSVKELLGITIMERSSFEKNPIDFLEAKGYKEVKKDLIIKLPKYSLFELENGRKRMLASAGELQKGNELALPSKYVNFLYLASHYEKLKGSPEDNEQKQLFVEQHKHYLDEIIEQISEFSKRVILADANLDKVLSAYNKHRDKPIREQAENIIHLFTLTNLGAPAAFKYFDTTIDRKRYTSTKEVLDATLIHQSITGLYETRIDLSQLGGDGGGGGPAPGGSGGTLNIEDEYRLHETSKEPDVSLGSTWLSDFPQAWAETGGMGLAVRQAPLIIPLKATSTPVSIKQYPMSQEARLGIKPHIQRLLDQGILVPCQSPWNTPLLPVKKPGTNDYRPVQDLREVNKRVEDIHPTVPNPYNLLSGLPPSHQWYTVLDLKDAFFCLRLHPTSQPLFAFEWRDPEMGISGQLTWTRLPQGFKNSPTLFNEALHRDLADFRIQHPDLILLQYVDDLLLAATSELDCQQGTRALLQTLGNLGYRASAKKAQICQKQVKYLGYLLKEGQRWLTEARKETVMGQPTPKTPRQLREFLGKAGFCRLFIPGFAEMAAPLYPLTKPGTLFNWGPDQQKAYQEIKQALLTAPALGLPDLTKPFELFVDEKQGYAKGVLTQKLGPWRRPVAYLSKKLDPVAAGWPPCLRMVAAIAVLTKDAGKLTMGQPLVILAPHAVEALVKQPPDRWLSNARMTHYQALLLDTDRVQFGPVVALNPATLLPLPEEGLQHNCLDILAEAHGTRPDLTDQPLPDADHTWYTDGSSLLQEGQRKAGAAVTTETEVIWAKALPAGTSAQRAELIALTQALKMAEGKKLNVYTDSRYAFATAHIHGEIYRRRGWLTSEGKEIKNKDEILALLKALFLPKRLSIIHCPGHQKGHSAEARGNRMADQAARKAAITETPDTSTLLIENSSPSGGSKRTADGSEFEAGKRTADGSEFEKRTADGSEFESPKKKAKVE

SEQ ID NO: 2619 - protein, 2116 aa, synthetic construct
MPAAKRVKLDGGDKKYSIGLDIGTNSVGWAVITDEYKVPSKKFKVLGNTDRHSIKKNLIGALLFDSGETAEATRLKRTARRRYTRRKNRICYLQEIFSNEMAKVDDSFFHRLEESFLVEEDKKHERHPIFGNIVDEVAYHEKYPTIYHLRKKLVDSTDKADLRLIYLALAHMIKFRGHFLIEGDLNPDNSDVDKLFIQLVQTYNQLFEENPINASGVDAKAILSARLSKSRRLENLIAQLPGEKKNGLFGNLIALSLGLTPNFKSNFDLAEDAKLQLSKDTYDDDLDNLLAQIGDQYADLFLAAKNLSDAILLSDILRVNTEITKAPLSASMIKRYDEHHQDLTLLKALVRQQLPEKYKEIFFDQSKNGYAGYIDGGASQEEFYKFIKPILEKMDGTEELLVKLNREDLLRKQRTFDNGSIPHQIHLGELHAILRRQEDFYPFLKDNREKIEKILTFRIPYYVGPLARGNSRFAWMTRKSEETITPWNFEEVVDKGASAQSFIERMTNFDKNLPNEKVLPKHSLLYEYFTVYNELTKVKYVTEGMRKPAFLSGEQKKAIVDLLFKTNRKVTVKQLKEDYFKKIECFDSVEISGVEDRFNASLGTYHDLLKIIKDKDFLDNEENEDILEDIVLTLTLFEDREMIEERLKTYAHLFDDKVMKQLKRRRYTGWGRLSRKLINGIRDKQSGKTILDFLKSDGFANRNFMQLIHDDSLTFKEDIQKAQVSGQGDSLHEHIANLAGSPAIKKGILQTVKVVDELVKVMGRHKPENIVIEMARENQTTQKGQKNSRERMKRIEEGIKELGSQILKEHPVENTQLQNEKLYLYYLQNGRDMYVDQELDINRLSDYDVDHIVPQSFLKDDSIDNKVLTRSDKARGKSDNVPSEEVVKKMKNYWRQLLNAKLITQRKFDNLTKAERGGLSELDKAGFIKRQLVETRQITKHVAQILDSRMNTKYDENDKLIREVKVITLKSKLVSDFRKDFQFYKVREINNYHHAHDAYLNAVVGTALIKKYPKLESEFVYGDYKVYDVRKMIAKSEQEIGKATAKYFFYSNIMNFFKTEITLANGEIRKRPLIETNGETGEIVWDKGRDFATVRKVLSMPQVNIVKKTEVQTGGFSKESILPKRNSDKLIARKKDWDPKKYGGFDSPTVAYSVLVVAKVEKGKSKKLKSVKELLGITIMERSSFEKNPIDFLEAKGYKEVKKDLIIKLPKYSLFELENGRKRMLASAGELQKGNELALPSKYVNFLYLASHYEKLKGSPEDNEQKQLFVEQHKHYLDEIIEQISEFSKRVILADANLDKVLSAYNKHRDKPIREQAENIIHLFTLTNLGAPAAFKYFDTTIDRKRYTSTKEVLDATLIHQSITGLYETRIDLSQLGGDGGPAPAPAPAPAPGGTLNIEDEYRLHETSKEPDVSLGSTWLSDFPQAWAETGGMGLAVRQAPLIIPLKATSTPVSIKQYPMSQEARLGIKPHIQRLLDQGILVPCQSPWNTPLLPVKKPGTNDYRPVQDLREVNKRVEDIHPTVPNPYNLLSGLPPSHQWYTVLDLKDAFFCLRLHPTSQPLFAFEWRDPEMGISGQLTWTRLPQGFKNSPTLFNEALHRDLADFRIQHPDLILLQYVDDLLLAATSELDCQQGTRALLQTLGNLGYRASAKKAQICQKQVKYLGYLLKEGQRWLTEARKETVMGQPTPKTPRQLREFLGKAGFCRLFIPGFAEMAAPLYPLTKPGTLFNWGPDQQKAYQEIKQALLTAPALGLPDLTKPFELFVDEKQGYAKGVLTQKLGPWRRPVAYLSKKLDPVAAGWPPCLRMVAAIAVLTKDAGKLTMGQPLVILAPHAVEALVKQPPDRWLSNARMTHYQALLLDTDRVQFGPVVALNPATLLPLPEEGLQHNCLDILAEAHGTRPDLTDQPLPDADHTWYTDGSSLLQEGQRKAGAAVTTETEVIWAKALPAGTSAQRAELIALTQALKMAEGKKLNVYTDSRYAFATAHIHGEIYRRRGWLTSEGKEIKNKDEILALLKALFLPKRLSIIHCPGHQKGHSAEARGNRMADQAARKAAITETPDTSTLLIENSSPSGGSKRTADGSEFEAGKRTADGSEFEKRTADGSEFESPKKKAKVE

SEQ ID NO: 2620 - protein, 2110 aa, synthetic construct
MPAAKRVKLDGGDKKYSIGLDIGTNSVGWAVITDEYKVPSKKFKVLGNTDRHSIKKNLIGALLFDSGETAEATRLKRTARRRYTRRKNRICYLQEIFSNEMAKVDDSFFHRLEESFLVEEDKKHERHPIFGNIVDEVAYHEKYPTIYHLRKKLVDSTDKADLRLIYLALAHMIKFRGHFLIEGDLNPDNSDVDKLFIQLVQTYNQLFEENPINASGVDAKAILSARLSKSRRLENLIAQLPGEKKNGLFGNLIALSLGLTPNFKSNFDLAEDAKLQLSKDTYDDDLDNLLAQIGDQYADLFLAAKNLSDAILLSDILRVNTEITKAPLSASMIKRYDEHHQDLTLLKALVRQQLPEKYKEIFFDQSKNGYAGYIDGGASQEEFYKFIKPILEKMDGTEELLVKLNREDLLRKQRTFDNGSIPHQIHLGELHAILRRQEDFYPFLKDNREKIEKILTFRIPYYVGPLARGNSRFAWMTRKSEETITPWNFEEVVDKGASAQSFIERMTNFDKNLPNEKVLPKHSLLYEYFTVYNELTKVKYVTEGMRKPAFLSGEQKKAIVDLLFKTNRKVTVKQLKEDYFKKIECFDSVEISGVEDRFNASLGTYHDLLKIIKDKDFLDNEENEDILEDIVLTLTLFEDREMIEERLKTYAHLFDDKVMKQLKRRRYTGWGRLSRKLINGIRDKQSGKTILDFLKSDGFANRNFMQLIHDDSLTFKEDIQKAQVSGQGDSLHEHIANLAGSPAIKKGILQTVKVVDELVKVMGRHKPENIVIEMARENQTTQKGQKNSRERMKRIEEGIKELGSQILKEHPVENTQLQNEKLYLYYLQNGRDMYVDQELDINRLSDYDVDHIVPQSFLKDDSIDNKVLTRSDKARGKSDNVPSEEVVKKMKNYWRQLLNAKLITQRKFDNLTKAERGGLSELDKAGFIKRQLVETRQITKHVAQILDSRMNTKYDENDKLIREVKVITLKSKLVSDFRKDFQFYKVREINNYHHAHDAYLNAVVGTALIKKYPKLESEFVYGDYKVYDVRKMIAKSEQEIGKATAKYFFYSNIMNFFKTEITLANGEIRKRPLIETNGETGEIVWDKGRDFATVRKVLSMPQVNIVKKTEVQTGGFSKESILPKRNSDKLIARKKDWDPKKYGGFDSPTVAYSVLVVAKVEKGKSKKLKSVKELLGITIMERSSFEKNPIDFLEAKGYKEVKKDLIIKLPKYSLFELENGRKRMLASAGELQKGNELALPSKYVNFLYLASHYEKLKGSPEDNEQKQLFVEQHKHYLDEIIEQISEFSKRVILADANLDKVLSAYNKHRDKPIREQAENIIHLFTLTNLGAPAAFKYFDTTIDRKRYTSTKEVLDATLIHQSITGLYETRIDLSQLGGDGGEAAAKGGTLNIEDEYRLHETSKEPDVSLGSTWLSDFPQAWAETGGMGLAVRQAPLIIPLKATSTPVSIKQYPMSQEARLGIKPHIQRLLDQGILVPCQSPWNTPLLPVKKPGTNDYRPVQDLREVNKRVEDIHPTVPNPYNLLSGLPPSHQWYTVLDLKDAFFCLRLHPTSQPLFAFEWRDPEMGISGQLTWTRLPQGFKNSPTLFNEALHRDLADFRIQHPDLILLQYVDDLLLAATSELDCQQGTRALLQTLGNLGYRASAKKAQICQKQVKYLGYLLKEGQRWLTEARKETVMGQPTPKTPRQLREFLGKAGFCRLFIPGFAEMAAPLYPLTKPGTLFNWGPDQQKAYQEIKQALLTAPALGLPDLTKPFELFVDEKQGYAKGVLTQKLGPWRRPVAYLSKKLDPVAAGWPPCLRMVAAIAVLTKDAGKLTMGQPLVILAPHAVEALVKQPPDRWLSNARMTHYQALLLDTDRVQFGPVVALNPATLLPLPEEGLQHNCLDILAEAHGTRPDLTDQPLPDADHTWYTDGSSLLQEGQRKAGAAVTTETEVIWAKALPAGTSAQRAELIALTQALKMAEGKKLNVYTDSRYAFATAHIHGEIYRRRGWLTSEGKEIKNKDEILALLKALFLPKRLSIIHCPGHQKGHSAEARGNRMADQAARKAAITETPDTSTLLIENSSPSGGSKRTADGSEFEAGKRTADGSEFEKRTADGSEFESPKKKAKVE

SEQ ID NO: 2621 - protein, 2111 aa, synthetic construct
MPAAKRVKLDGGDKKYSIGLDIGTNSVGWAVITDEYKVPSKKFKVLGNTDRHSIKKNLIGALLFDSGETAEATRLKRTARRRYTRRKNRICYLQEIFSNEMAKVDDSFFHRLEESFLVEEDKKHERHPIFGNIVDEVAYHEKYPTIYHLRKKLVDSTDKADLRLIYLALAHMIKFRGHFLIEGDLNPDNSDVDKLFIQLVQTYNQLFEENPINASGVDAKAILSARLSKSRRLENLIAQLPGEKKNGLFGNLIALSLGLTPNFKSNFDLAEDAKLQLSKDTYDDDLDNLLAQIGDQYADLFLAAKNLSDAILLSDILRVNTEITKAPLSASMIKRYDEHHQDLTLLKALVRQQLPEKYKEIFFDQSKNGYAGYIDGGASQEEFYKFIKPILEKMDGTEELLVKLNREDLLRKQRTFDNGSIPHQIHLGELHAILRRQEDFYPFLKDNREKIEKILTFRIPYYVGPLARGNSRFAWMTRKSEETITPWNFEEVVDKGASAQSFIERMTNFDKNLPNEKVLPKHSLLYEYFTVYNELTKVKYVTEGMRKPAFLSGEQKKAIVDLLFKTNRKVTVKQLKEDYFKKIECFDSVEISGVEDRFNASLGTYHDLLKIIKDKDFLDNEENEDILEDIVLTLTLFEDREMIEERLKTYAHLFDDKVMKQLKRRRYTGWGRLSRKLINGIRDKQSGKTILDFLKSDGFANRNFMQLIHDDSLTFKEDIQKAQVSGQGDSLHEHIANLAGSPAIKKGILQTVKVVDELVKVMGRHKPENIVIEMARENQTTQKGQKNSRERMKRIEEGIKELGSQILKEHPVENTQLQNEKLYLYYLQNGRDMYVDQELDINRLSDYDVDHIVPQSFLKDDSIDNKVLTRSDKARGKSDNVPSEEVVKKMKNYWRQLLNAKLITQRKFDNLTKAERGGLSELDKAGFIKRQLVETRQITKHVAQILDSRMNTKYDENDKLIREVKVITLKSKLVSDFRKDFQFYKVREINNYHHAHDAYLNAVVGTALIKKYPKLESEFVYGDYKVYDVRKMIAKSEQEIGKATAKYFFYSNIMNFFKTEITLANGEIRKRPLIETNGETGEIVWDKGRDFATVRKVLSMPQVNIVKKTEVQTGGFSKESILPKRNSDKLIARKKDWDPKKYGGFDSPTVAYSVLVVAKVEKGKSKKLKSVKELLGITIMERSSFEKNPIDFLEAKGYKEVKKDLIIKLPKYSLFELENGRKRMLASAGELQKGNELALPSKYVNFLYLASHYEKLKGSPEDNEQKQLFVEQHKHYLDEIIEQISEFSKRVILADANLDKVLSAYNKHRDKPIREQAENIIHLFTLTNLGAPAAFKYFDTTIDRKRYTSTKEVLDATLIHQSITGLYETRIDLSQLGGDGGGGGGSSGGTLNIEDEYRLHETSKEPDVSLGSTWLSDFPQAWAETGGMGLAVRQAPLIIPLKATSTPVSIKQYPMSQEARLGIKPHIQRLLDQGILVPCQSPWNTPLLPVKKPGTNDYRPVQDLREVNKRVEDIHPTVPNPYNLLSGLPPSHQWYTVLDLKDAFFCLRLHPTSQPLFAFEWRDPEMGISGQLTWTRLPQGFKNSPTLFNEALHRDLADFRIQHPDLILLQYVDDLLLAATSELDCQQGTRALLQTLGNLGYRASAKKAQICQKQVKYLGYLLKEGQRWLTEARKETVMGQPTPKTPRQLREFLGKAGFCRLFIPGFAEMAAPLYPLTKPGTLFNWGPDQQKAYQEIKQALLTAPALGLPDLTKPFELFVDEKQGYAKGVLTQKLGPWRRPVAYLSKKLDPVAAGWPPCLRMVAAIAVLTKDAGKLTMGQPLVILAPHAVEALVKQPPDRWLSNARMTHYQALLLDTDRVQFGPVVALNPATLLPLPEEGLQHNCLDILAEAHGTRPDLTDQPLPDADHTWYTDGSSLLQEGQRKAGAAVTTETEVIWAKALPAGTSAQRAELIALTQALKMAEGKKLNVYTDSRYAFATAHIHGEIYRRRGWLTSEGKEIKNKDEILALLKALFLPKRLSIIHCPGHQKGHSAEARGNRMADQAARKAAITETPDTSTLLIENSSPSGGSKRTADGSEFEAGKRTADGSEFEKRTADGSEFESPKKKAKVE

SEQ ID NO: 2622 - protein, 2114 aa, synthetic construct
MPAAKRVKLDGGDKKYSIGLDIGTNSVGWAVITDEYKVPSKKFKVLGNTDRHSIKKNLIGALLFDSGETAEATRLKRTARRRYTRRKNRICYLQEIFSNEMAKVDDSFFHRLEESFLVEEDKKHERHPIFGNIVDEVAYHEKYPTIYHLRKKLVDSTDKADLRLIYLALAHMIKFRGHFLIEGDLNPDNSDVDKLFIQLVQTYNQLFEENPINASGVDAKAILSARLSKSRRLENLIAQLPGEKKNGLFGNLIALSLGLTPNFKSNFDLAEDAKLQLSKDTYDDDLDNLLAQIGDQYADLFLAAKNLSDAILLSDILRVNTEITKAPLSASMIKRYDEHHQDLTLLKALVRQQLPEKYKEIFFDQSKNGYAGYIDGGASQEEFYKFIKPILEKMDGTEELLVKLNREDLLRKQRTFDNGSIPHQIHLGELHAILRRQEDFYPFLKDNREKIEKILTFRIPYYVGPLARGNSRFAWMTRKSEETITPWNFEEVVDKGASAQSFIERMTNFDKNLPNEKVLPKHSLLYEYFTVYNELTKVKYVTEGMRKPAFLSGEQKKAIVDLLFKTNRKVTVKQLKEDYFKKIECFDSVEISGVEDRFNASLGTYHDLLKIIKDKDFLDNEENEDILEDIVLTLTLFEDREMIEERLKTYAHLFDDKVMKQLKRRRYTGWGRLSRKLINGIRDKQSGKTILDFLKSDGFANRNFMQLIHDDSLTFKEDIQKAQVSGQGDSLHEHIANLAGSPAIKKGILQTVKVVDELVKVMGRHKPENIVIEMARENQTTQKGQKNSRERMKRIEEGIKELGSQILKEHPVENTQLQNEKLYLYYLQNGRDMYVDQELDINRLSDYDVDHIVPQSFLKDDSIDNKVLTRSDKARGKSDNVPSEEVVKKMKNYWRQLLNAKLITQRKFDNLTKAERGGLSELDKAGFIKRQLVETRQITKHVAQILDSRMNTKYDENDKLIREVKVITLKSKLVSDFRKDFQFYKVREINNYHHAHDAYLNAVVGTALIKKYPKLESEFVYGDYKVYDVRKMIAKSEQEIGKATAKYFFYSNIMNFFKTEITLANGEIRKRPLIETNGETGEIVWDKGRDFATVRKVLSMPQVNIVKKTEVQTGGFSKESILPKRNSDKLIARKKDWDPKKYGGFDSPTVAYSVLVVAKVEKGKSKKLKSVKELLGITIMERSSFEKNPIDFLEAKGYKEVKKDLIIKLPKYSLFELENGRKRMLASAGELQKGNELALPSKYVNFLYLASHYEKLKGSPEDNEQKQLFVEQHKHYLDEIIEQISEFSKRVILADANLDKVLSAYNKHRDKPIREQAENIIHLFTLTNLGAPAAFKYFDTTIDRKRYTSTKEVLDATLIHQSITGLYETRIDLSQLGGDGGGGSGGGPAPGGTLNIEDEYRLHETSKEPDVSLGSTWLSDFPQAWAETGGMGLAVRQAPLIIPLKATSTPVSIKQYPMSQEARLGIKPHIQRLLDQGILVPCQSPWNTPLLPVKKPGTNDYRPVQDLREVNKRVEDIHPTVPNPYNLLSGLPPSHQWYTVLDLKDAFFCLRLHPTSQPLFAFEWRDPEMGISGQLTWTRLPQGFKNSPTLFNEALHRDLADFRIQHPDLILLQYVDDLLLAATSELDCQQGTRALLQTLGNLGYRASAKKAQICQKQVKYLGYLLKEGQRWLTEARKETVMGQPTPKTPRQLREFLGKAGFCRLFIPGFAEMAAPLYPLTKPGTLFNWGPDQQKAYQEIKQALLTAPALGLPDLTKPFELFVDEKQGYAKGVLTQKLGPWRRPVAYLSKKLDPVAAGWPPCLRMVAAIAVLTKDAGKLTMGQPLVILAPHAVEALVKQPPDRWLSNARMTHYQALLLDTDRVQFGPVVALNPATLLPLPEEGLQHNCLDILAEAHGTRPDLTDQPLPDADHTWYTDGSSLLQEGQRKAGAAVTTETEVIWAKALPAGTSAQRAELIALTQALKMAEGKKLNVYTDSRYAFATAHIHGEIYRRRGWLTSEGKEIKNKDEILALLKALFLPKRLSIIHCPGHQKGHSAEARGNRMADQAARKAAITETPDTSTLLIENSSPSGGSKRTADGSEFEAGKRTADGSEFEKRTADGSEFESPKKKAKVE

SEQ ID NO: 2623 - protein, 2120 aa, synthetic construct
MPAAKRVKLDGGDKKYSIGLDIGTNSVGWAVITDEYKVPSKKFKVLGNTDRHSIKKNLIGALLFDSGETAEATRLKRTARRRYTRRKNRICYLQEIFSNEMAKVDDSFFHRLEESFLVEEDKKHERHPIFGNIVDEVAYHEKYPTIYHLRKKLVDSTDKADLRLIYLALAHMIKFRGHFLIEGDLNPDNSDVDKLFIQLVQTYNQLFEENPINASGVDAKAILSARLSKSRRLENLIAQLPGEKKNGLFGNLIALSLGLTPNFKSNFDLAEDAKLQLSKDTYDDDLDNLLAQIGDQYADLFLAAKNLSDAILLSDILRVNTEITKAPLSASMIKRYDEHHQDLTLLKALVRQQLPEKYKEIFFDQSKNGYAGYIDGGASQEEFYKFIKPILEKMDGTEELLVKLNREDLLRKQRTFDNGSIPHQIHLGELHAILRRQEDFYPFLKDNREKIEKILTFRIPYYVGPLARGNSRFAWMTRKSEETITPWNFEEVVDKGASAQSFIERMTNFDKNLPNEKVLPKHSLLYEYFTVYNELTKVKYVTEGMRKPAFLSGEQKKAIVDLLFKTNRKVTVKQLKEDYFKKIECFDSVEISGVEDRFNASLGTYHDLLKIIKDKDFLDNEENEDILEDIVLTLTLFEDREMIEERLKTYAHLFDDKVMKQLKRRRYTGWGRLSRKLINGIRDKQSGKTILDFLKSDGFANRNFMQLIHDDSLTFKEDIQKAQVSGQGDSLHEHIANLAGSPAIKKGILQTVKVVDELVKVMGRHKPENIVIEMARENQTTQKGQKNSRERMKRIEEGIKELGSQILKEHPVENTQLQNEKLYLYYLQNGRDMYVDQELDINRLSDYDVDHIVPQSFLKDDSIDNKVLTRSDKARGKSDNVPSEEVVKKMKNYWRQLLNAKLITQRKFDNLTKAERGGLSELDKAGFIKRQLVETRQITKHVAQILDSRMNTKYDENDKLIREVKVITLKSKLVSDFRKDFQFYKVREINNYHHAHDAYLNAVVGTALIKKYPKLESEFVYGDYKVYDVRKMIAKSEQEIGKATAKYFFYSNIMNFFKTEITLANGEIRKRPLIETNGETGEIVWDKGRDFATVRKVLSMPQVNIVKKTEVQTGGFSKESILPKRNSDKLIARKKDWDPKKYGGFDSPTVAYSVLVVAKVEKGKSKKLKSVKELLGITIMERSSFEKNPIDFLEAKGYKEVKKDLIIKLPKYSLFELENGRKRMLASAGELQKGNELALPSKYVNFLYLASHYEKLKGSPEDNEQKQLFVEQHKHYLDEIIEQISEFSKRVILADANLDKVLSAYNKHRDKPIREQAENIIHLFTLTNLGAPAAFKYFDTTIDRKRYTSTKEVLDATLIHQSITGLYETRIDLSQLGGDGGEAAAKGGGGSEAAAKGGTLNIEDEYRLHETSKEPDVSLGSTWLSDFPQAWAETGGMGLAVRQAPLIIPLKATSTPVSIKQYPMSQEARLGIKPHIQRLLDQGILVPCQSPWNTPLLPVKKPGTNDYRPVQDLREVNKRVEDIHPTVPNPYNLLSGLPPSHQWYTVLDLKDAFFCLRLHPTSQPLFAFEWRDPEMGISGQLTWTRLPQGFKNSPTLFNEALHRDLADFRIQHPDLILLQYVDDLLLAATSELDCQQGTRALLQTLGNLGYRASAKKAQICQKQVKYLGYLLKEGQRWLTEARKETVMGQPTPKTPRQLREFLGKAGFCRLFIPGFAEMAAPLYPLTKPGTLFNWGPDQQKAYQEIKQALLTAPALGLPDLTKPFELFVDEKQGYAKGVLTQKLGPWRRPVAYLSKKLDPVAAGWPPCLRMVAAIAVLTKDAGKLTMGQPLVILAPHAVEALVKQPPDRWLSNARMTHYQALLLDTDRVQFGPVVALNPATLLPLPEEGLQHNCLDILAEAHGTRPDLTDQPLPDADHTWYTDGSSLLQEGQRKAGAAVTTETEVIWAKALPAGTSAQRAELIALTQALKMAEGKKLNVYTDSRYAFATAHIHGEIYRRRGWLTSEGKEIKNKDEILALLKALFLPKRLSIIHCPGHQKGHSAEARGNRMADQAARKAAITETPDTSTLLIENSSPSGGSKRTADGSEFEAGKRTADGSEFEKRTADGSEFESPKKKAKVE

SEQ ID NO: 2624 - protein, 2108 aa, synthetic construct
MPAAKRVKLDGGDKKYSIGLDIGTNSVGWAVITDEYKVPSKKFKVLGNTDRHSIKKNLIGALLFDSGETAEATRLKRTARRRYTRRKNRICYLQEIFSNEMAKVDDSFFHRLEESFLVEEDKKHERHPIFGNIVDEVAYHEKYPTIYHLRKKLVDSTDKADLRLIYLALAHMIKFRGHFLIEGDLNPDNSDVDKLFIQLVQTYNQLFEENPINASGVDAKAILSARLSKSRRLENLIAQLPGEKKNGLFGNLIALSLGLTPNFKSNFDLAEDAKLQLSKDTYDDDLDNLLAQIGDQYADLFLAAKNLSDAILLSDILRVNTEITKAPLSASMIKRYDEHHQDLTLLKALVRQQLPEKYKEIFFDQSKNGYAGYIDGGASQEEFYKFIKPILEKMDGTEELLVKLNREDLLRKQRTFDNGSIPHQIHLGELHAILRRQEDFYPFLKDNREKIEKILTFRIPYYVGPLARGNSRFAWMTRKSEETITPWNFEEVVDKGASAQSFIERMTNFDKNLPNEKVLPKHSLLYEYFTVYNELTKVKYVTEGMRKPAFLSGEQKKAIVDLLFKTNRKVTVKQLKEDYFKKIECFDSVEISGVEDRFNASLGTYHDLLKIIKDKDFLDNEENEDILEDIVLTLTLFEDREMIEERLKTYAHLFDDKVMKQLKRRRYTGWGRLSRKLINGIRDKQSGKTILDFLKSDGFANRNFMQLIHDDSLTFKEDIQKAQVSGQGDSLHEHIANLAGSPAIKKGILQTVKVVDELVKVMGRHKPENIVIEMARENQTTQKGQKNSRERMKRIEEGIKELGSQILKEHPVENTQLQNEKLYLYYLQNGRDMYVDQELDINRLSDYDVDHIVPQSFLKDDSIDNKVLTRSDKARGKSDNVPSEEVVKKMKNYWRQLLNAKLITQRKFDNLTKAERGGLSELDKAGFIKRQLVETRQITKHVAQILDSRMNTKYDENDKLIREVKVITLKSKLVSDFRKDFQFYKVREINNYHHAHDAYLNAVVGTALIKKYPKLESEFVYGDYKVYDVRKMIAKSEQEIGKATAKYFFYSNIMNFFKTEITLANGEIRKRPLIETNGETGEIVWDKGRDFATVRKVLSMPQVNIVKKTEVQTGGFSKESILPKRNSDKLIARKKDWDPKKYGGFDSPTVAYSVLVVAKVEKGKSKKLKSVKELLGITIMERSSFEKNPIDFLEAKGYKEVKKDLIIKLPKYSLFELENGRKRMLASAGELQKGNELALPSKYVNFLYLASHYEKLKGSPEDNEQKQLFVEQHKHYLDEIIEQISEFSKRVILADANLDKVLSAYNKHRDKPIREQAENIIHLFTLTNLGAPAAFKYFDTTIDRKRYTSTKEVLDATLIHQSITGLYETRIDLSQLGGDGGPAPGGTLNIEDEYRLHETSKEPDVSLGSTWLSDFPQAWAETGGMGLAVRQAPLIIPLKATSTPVSIKQYPMSQEARLGIKPHIQRLLDQGILVPCQSPWNTPLLPVKKPGTNDYRPVQDLREVNKRVEDIHPTVPNPYNLLSGLPPSHQWYTVLDLKDAFFCLRLHPTSQPLFAFEWRDPEMGISGQLTWTRLPQGFKNSPTLFNEALHRDLADFRIQHPDLILLQYVDDLLLAATSELDCQQGTRALLQTLGNLGYRASAKKAQICQKQVKYLGYLLKEGQRWLTEARKETVMGQPTPKTPRQLREFLGKAGFCRLFIPGFAEMAAPLYPLTKPGTLFNWGPDQQKAYQEIKQALLTAPALGLPDLTKPFELFVDEKQGYAKGVLTQKLGPWRRPVAYLSKKLDPVAAGWPPCLRMVAAIAVLTKDAGKLTMGQPLVILAPHAVEALVKQPPDRWLSNARMTHYQALLLDTDRVQFGPVVALNPATLLPLPEEGLQHNCLDILAEAHGTRPDLTDQPLPDADHTWYTDGSSLLQEGQRKAGAAVTTETEVIWAKALPAGTSAQRAELIALTQALKMAEGKKLNVYTDSRYAFATAHIHGEIYRRRGWLTSEGKEIKNKDEILALLKALFLPKRLSIIHCPGHQKGHSAEARGNRMADQAARKAAITETPDTSTLLIENSSPSGGSKRTADGSEFEAGKRTADGSEFEKRTADGSEFESPKKKAKVE

SEQ ID NO: 2625 - protein, 2113 aa, synthetic construct
MPAAKRVKLDGGDKKYSIGLDIGTNSVGWAVITDEYKVPSKKFKVLGNTDRHSIKKNLIGALLFDSGETAEATRLKRTARRRYTRRKNRICYLQEIFSNEMAKVDDSFFHRLEESFLVEEDKKHERHPIFGNIVDEVAYHEKYPTIYHLRKKLVDSTDKADLRLIYLALAHMIKFRGHFLIEGDLNPDNSDVDKLFIQLVQTYNQLFEENPINASGVDAKAILSARLSKSRRLENLIAQLPGEKKNGLFGNLIALSLGLTPNFKSNFDLAEDAKLQLSKDTYDDDLDNLLAQIGDQYADLFLAAKNLSDAILLSDILRVNTEITKAPLSASMIKRYDEHHQDLTLLKALVRQQLPEKYKEIFFDQSKNGYAGYIDGGASQEEFYKFIKPILEKMDGTEELLVKLNREDLLRKQRTFDNGSIPHQIHLGELHAILRRQEDFYPFLKDNREKIEKILTFRIPYYVGPLARGNSRFAWMTRKSEETITPWNFEEVVDKGASAQSFIERMTNFDKNLPNEKVLPKHSLLYEYFTVYNELTKVKYVTEGMRKPAFLSGEQKKAIVDLLFKTNRKVTVKQLKEDYFKKIECFDSVEISGVEDRFNASLGTYHDLLKIIKDKDFLDNEENEDILEDIVLTLTLFEDREMIEERLKTYAHLFDDKVMKQLKRRRYTGWGRLSRKLINGIRDKQSGKTILDFLKSDGFANRNFMQLIHDDSLTFKEDIQKAQVSGQGDSLHEHIANLAGSPAIKKGILQTVKVVDELVKVMGRHKPENIVIEMARENQTTQKGQKNSRERMKRIEEGIKELGSQILKEHPVENTQLQNEKLYLYYLQNGRDMYVDQELDINRLSDYDVDHIVPQSFLKDDSIDNKVLTRSDKARGKSDNVPSEEVVKKMKNYWRQLLNAKLITQRKFDNLTKAERGGLSELDKAGFIKRQLVETRQITKHVAQILDSRMNTKYDENDKLIREVKVITLKSKLVSDFRKDFQFYKVREINNYHHAHDAYLNAVVGTALIKKYPKLESEFVYGDYKVYDVRKMIAKSEQEIGKATAKYFFYSNIMNFFKTEITLANGEIRKRPLIETNGETGEIVWDKGRDFATVRKVLSMPQVNIVKKTEVQTGGFSKESILPKRNSDKLIARKKDWDPKKYGGFDSPTVAYSVLVVAKVEKGKSKKLKSVKELLGITIMERSSFEKNPIDFLEAKGYKEVKKDLIIKLPKYSLFELENGRKRMLASAGELQKGNELALPSKYVNFLYLASHYEKLKGSPEDNEQKQLFVEQHKHYLDEIIEQISEFSKRVILADANLDKVLSAYNKHRDKPIREQAENIIHLFTLTNLGAPAAFKYFDTTIDRKRYTSTKEVLDATLIHQSITGLYETRIDLSQLGGDGGEAAAKGSSGGTLNIEDEYRLHETSKEPDVSLGSTWLSDFPQAWAETGGMGLAVRQAPLIIPLKATSTPVSIKQYPMSQEARLGIKPHIQRLLDQGILVPCQSPWNTPLLPVKKPGTNDYRPVQDLREVNKRVEDIHPTVPNPYNLLSGLPPSHQWYTVLDLKDAFFCLRLHPTSQPLFAFEWRDPEMGISGQLTWTRLPQGFKNSPTLFNEALHRDLADFRIQHPDLILLQYVDDLLLAATSELDCQQGTRALLQTLGNLGYRASAKKAQICQKQVKYLGYLLKEGQRWLTEARKETVMGQPTPKTPRQLREFLGKAGFCRLFIPGFAEMAAPLYPLTKPGTLFNWGPDQQKAYQEIKQALLTAPALGLPDLTKPFELFVDEKQGYAKGVLTQKLGPWRRPVAYLSKKLDPVAAGWPPCLRMVAAIAVLTKDAGKLTMGQPLVILAPHAVEALVKQPPDRWLSNARMTHYQALLLDTDRVQFGPVVALNPATLLPLPEEGLQHNCLDILAEAHGTRPDLTDQPLPDADHTWYTDGSSLLQEGQRKAGAAVTTETEVIWAKALPAGTSAQRAELIALTQALKMAEGKKLNVYTDSRYAFATAHIHGEIYRRRGWLTSEGKEIKNKDEILALLKALFLPKRLSIIHCPGHQKGHSAEARGNRMADQAARKAAITETPDTSTLLIENSSPSGGSKRTADGSEFEAGKRTADGSEFEKRTADGSEFESPKKKAKVE

SEQ ID NO: 2626 - protein, 2113 aa, synthetic construct
MPAAKRVKLDGGDKKYSIGLDIGTNSVGWAVITDEYKVPSKKFKVLGNTDRHSIKKNLIGALLFDSGETAEATRLKRTARRRYTRRKNRICYLQEIFSNEMAKVDDSFFHRLEESFLVEEDKKHERHPIFGNIVDEVAYHEKYPTIYHLRKKLVDSTDKADLRLIYLALAHMIKFRGHFLIEGDLNPDNSDVDKLFIQLVQTYNQLFEENPINASGVDAKAILSARLSKSRRLENLIAQLPGEKKNGLFGNLIALSLGLTPNFKSNFDLAEDAKLQLSKDTYDDDLDNLLAQIGDQYADLFLAAKNLSDAILLSDILRVNTEITKAPLSASMIKRYDEHHQDLTLLKALVRQQLPEKYKEIFFDQSKNGYAGYIDGGASQEEFYKFIKPILEKMDGTEELLVKLNREDLLRKQRTFDNGSIPHQIHLGELHAILRRQEDFYPFLKDNREKIEKILTFRIPYYVGPLARGNSRFAWMTRKSEETITPWNFEEVVDKGASAQSFIERMTNFDKNLPNEKVLPKHSLLYEYFTVYNELTKVKYVTEGMRKPAFLSGEQKKAIVDLLFKTNRKVTVKQLKEDYFKKIECFDSVEISGVEDRFNASLGTYHDLLKIIKDKDFLDNEENEDILEDIVLTLTLFEDREMIEERLKTYAHLFDDKVMKQLKRRRYTGWGRLSRKLINGIRDKQSGKTILDFLKSDGFANRNFMQLIHDDSLTFKEDIQKAQVSGQGDSLHEHIANLAGSPAIKKGILQTVKVVDELVKVMGRHKPENIVIEMARENQTTQKGQKNSRERMKRIEEGIKELGSQILKEHPVENTQLQNEKLYLYYLQNGRDMYVDQELDINRLSDYDVDHIVPQSFLKDDSIDNKVLTRSDKARGKSDNVPSEEVVKKMKNYWRQLLNAKLITQRKFDNLTKAERGGLSELDKAGFIKRQLVETRQITKHVAQILDSRMNTKYDENDKLIREVKVITLKSKLVSDFRKDFQFYKVREINNYHHAHDAYLNAVVGTALIKKYPKLESEFVYGDYKVYDVRKMIAKSEQEIGKATAKYFFYSNIMNFFKTEITLANGEIRKRPLIETNGETGEIVWDKGRDFATVRKVLSMPQVNIVKKTEVQTGGFSKESILPKRNSDKLIARKKDWDPKKYGGFDSPTVAYSVLVVAKVEKGKSKKLKSVKELLGITIMERSSFEKNPIDFLEAKGYKEVKKDLIIKLPKYSLFELENGRKRMLASAGELQKGNELALPSKYVNFLYLASHYEKLKGSPEDNEQKQLFVEQHKHYLDEIIEQISEFSKRVILADANLDKVLSAYNKHRDKPIREQAENIIHLFTLTNLGAPAAFKYFDTTIDRKRYTSTKEVLDATLIHQSITGLYETRIDLSQLGGDGGGGGGGGGGGGTLNIEDEYRLHETSKEPDVSLGSTWLSDFPQAWAETGGMGLAVRQAPLIIPLKATSTPVSIKQYPMSQEARLGIKPHIQRLLDQGILVPCQSPWNTPLLPVKKPGTNDYRPVQDLREVNKRVEDIHPTVPNPYNLLSGLPPSHQWYTVLDLKDAFFCLRLHPTSQPLFAFEWRDPEMGISGQLTWTRLPQGFKNSPTLFNEALHRDLADFRIQHPDLILLQYVDDLLLAATSELDCQQGTRALLQTLGNLGYRASAKKAQICQKQVKYLGYLLKEGQRWLTEARKETVMGQPTPKTPRQLREFLGKAGFCRLFIPGFAEMAAPLYPLTKPGTLFNWGPDQQKAYQEIKQALLTAPALGLPDLTKPFELFVDEKQGYAKGVLTQKLGPWRRPVAYLSKKLDPVAAGWPPCLRMVAAIAVLTKDAGKLTMGQPLVILAPHAVEALVKQPPDRWLSNARMTHYQALLLDTDRVQFGPVVALNPATLLPLPEEGLQHNCLDILAEAHGTRPDLTDQPLPDADHTWYTDGSSLLQEGQRKAGAAVTTETEVIWAKALPAGTSAQRAELIALTQALKMAEGKKLNVYTDSRYAFATAHIHGEIYRRRGWLTSEGKEIKNKDEILALLKALFLPKRLSIIHCPGHQKGHSAEARGNRMADQAARKAAITETPDTSTLLIENSSPSGGSKRTADGSEFEAGKRTADGSEFEKRTADGSEFESPKKKAKVE

SEQ ID NO: 2627 - protein, 2120 aa, synthetic construct
MPAAKRVKLDGGDKKYSIGLDIGTNSVGWAVITDEYKVPSKKFKVLGNTDRHSIKKNLIGALLFDSGETAEATRLKRTARRRYTRRKNRICYLQEIFSNEMAKVDDSFFHRLEESFLVEEDKKHERHPIFGNIVDEVAYHEKYPTIYHLRKKLVDSTDKADLRLIYLALAHMIKFRGHFLIEGDLNPDNSDVDKLFIQLVQTYNQLFEENPINASGVDAKAILSARLSKSRRLENLIAQLPGEKKNGLFGNLIALSLGLTPNFKSNFDLAEDAKLQLSKDTYDDDLDNLLAQIGDQYADLFLAAKNLSDAILLSDILRVNTEITKAPLSASMIKRYDEHHQDLTLLKALVRQQLPEKYKEIFFDQSKNGYAGYIDGGASQEEFYKFIKPILEKMDGTEELLVKLNREDLLRKQRTFDNGSIPHQIHLGELHAILRRQEDFYPFLKDNREKIEKILTFRIPYYVGPLARGNSRFAWMTRKSEETITPWNFEEVVDKGASAQSFIERMTNFDKNLPNEKVLPKHSLLYEYFTVYNELTKVKYVTEGMRKPAFLSGEQKKAIVDLLFKTNRKVTVKQLKEDYFKKIECFDSVEISGVEDRFNASLGTYHDLLKIIKDKDFLDNEENEDILEDIVLTLTLFEDREMIEERLKTYAHLFDDKVMKQLKRRRYTGWGRLSRKLINGIRDKQSGKTILDFLKSDGFANRNFMQLIHDDSLTFKEDIQKAQVSGQGDSLHEHIANLAGSPAIKKGILQTVKVVDELVKVMGRHKPENIVIEMARENQTTQKGQKNSRERMKRIEEGIKELGSQILKEHPVENTQLQNEKLYLYYLQNGRDMYVDQELDINRLSDYDVDHIVPQSFLKDDSIDNKVLTRSDKARGKSDNVPSEEVVKKMKNYWRQLLNAKLITQRKFDNLTKAERGGLSELDKAGFIKRQLVETRQITKHVAQILDSRMNTKYDENDKLIREVKVITLKSKLVSDFRKDFQFYKVREINNYHHAHDAYLNAVVGTALIKKYPKLESEFVYGDYKVYDVRKMIAKSEQEIGKATAKYFFYSNIMNFFKTEITLANGEIRKRPLIETNGETGEIVWDKGRDFATVRKVLSMPQVNIVKKTEVQTGGFSKESILPKRNSDKLIARKKDWDPKKYGGFDSPTVAYSVLVVAKVEKGKSKKLKSVKELLGITIMERSSFEKNPIDFLEAKGYKEVKKDLIIKLPKYSLFELENGRKRMLASAGELQKGNELALPSKYVNFLYLASHYEKLKGSPEDNEQKQLFVEQHKHYLDEIIEQISEFSKRVILADANLDKVLSAYNKHRDKPIREQAENIIHLFTLTNLGAPAAFKYFDTTIDRKRYTSTKEVLDATLIHQSITGLYETRIDLSQLGGDGGEAAAKEAAAKEAAAKGGTLNIEDEYRLHETSKEPDVSLGSTWLSDFPQAWAETGGMGLAVRQAPLIIPLKATSTPVSIKQYPMSQEARLGIKPHIQRLLDQGILVPCQSPWNTPLLPVKKPGTNDYRPVQDLREVNKRVEDIHPTVPNPYNLLSGLPPSHQWYTVLDLKDAFFCLRLHPTSQPLFAFEWRDPEMGISGQLTWTRLPQGFKNSPTLFNEALHRDLADFRIQHPDLILLQYVDDLLLAATSELDCQQGTRALLQTLGNLGYRASAKKAQICQKQVKYLGYLLKEGQRWLTEARKETVMGQPTPKTPRQLREFLGKAGFCRLFIPGFAEMAAPLYPLTKPGTLFNWGPDQQKAYQEIKQALLTAPALGLPDLTKPFELFVDEKQGYAKGVLTQKLGPWRRPVAYLSKKLDPVAAGWPPCLRMVAAIAVLTKDAGKLTMGQPLVILAPHAVEALVKQPPDRWLSNARMTHYQALLLDTDRVQFGPVVALNPATLLPLPEEGLQHNCLDILAEAHGTRPDLTDQPLPDADHTWYTDGSSLLQEGQRKAGAAVTTETEVIWAKALPAGTSAQRAELIALTQALKMAEGKKLNVYTDSRYAFATAHIHGEIYRRRGWLTSEGKEIKNKDEILALLKALFLPKRLSIIHCPGHQKGHSAEARGNRMADQAARKAAITETPDTSTLLIENSSPSGGSKRTADGSEFEAGKRTADGSEFEKRTADGSEFESPKKKAKVE

SEQ ID NO: 2628 - protein, 2116 aa, synthetic construct
MPAAKRVKLDGGDKKYSIGLDIGTNSVGWAVITDEYKVPSKKFKVLGNTDRHSIKKNLIGALLFDSGETAEATRLKRTARRRYTRRKNRICYLQEIFSNEMAKVDDSFFHRLEESFLVEEDKKHERHPIFGNIVDEVAYHEKYPTIYHLRKKLVDSTDKADLRLIYLALAHMIKFRGHFLIEGDLNPDNSDVDKLFIQLVQTYNQLFEENPINASGVDAKAILSARLSKSRRLENLIAQLPGEKKNGLFGNLIALSLGLTPNFKSNFDLAEDAKLQLSKDTYDDDLDNLLAQIGDQYADLFLAAKNLSDAILLSDILRVNTEITKAPLSASMIKRYDEHHQDLTLLKALVRQQLPEKYKEIFFDQSKNGYAGYIDGGASQEEFYKFIKPILEKMDGTEELLVKLNREDLLRKQRTFDNGSIPHQIHLGELHAILRRQEDFYPFLKDNREKIEKILTFRIPYYVGPLARGNSRFAWMTRKSEETITPWNFEEVVDKGASAQSFIERMTNFDKNLPNEKVLPKHSLLYEYFTVYNELTKVKYVTEGMRKPAFLSGEQKKAIVDLLFKTNRKVTVKQLKEDYFKKIECFDSVEISGVEDRFNASLGTYHDLLKIIKDKDFLDNEENEDILEDIVLTLTLFEDREMIEERLKTYAHLFDDKVMKQLKRRRYTGWGRLSRKLINGIRDKQSGKTILDFLKSDGFANRNFMQLIHDDSLTFKEDIQKAQVSGQGDSLHEHIANLAGSPAIKKGILQTVKVVDELVKVMGRHKPENIVIEMARENQTTQKGQKNSRERMKRIEEGIKELGSQILKEHPVENTQLQNEKLYLYYLQNGRDMYVDQELDINRLSDYDVDHIVPQSFLKDDSIDNKVLTRSDKARGKSDNVPSEEVVKKMKNYWRQLLNAKLITQRKFDNLTKAERGGLSELDKAGFIKRQLVETRQITKHVAQILDSRMNTKYDENDKLIREVKVITLKSKLVSDFRKDFQFYKVREINNYHHAHDAYLNAVVGTALIKKYPKLESEFVYGDYKVYDVRKMIAKSEQEIGKATAKYFFYSNIMNFFKTEITLANGEIRKRPLIETNGETGEIVWDKGRDFATVRKVLSMPQVNIVKKTEVQTGGFSKESILPKRNSDKLIARKKDWDPKKYGGFDSPTVAYSVLVVAKVEKGKSKKLKSVKELLGITIMERSSFEKNPIDFLEAKGYKEVKKDLIIKLPKYSLFELENGRKRMLASAGELQKGNELALPSKYVNFLYLASHYEKLKGSPEDNEQKQLFVEQHKHYLDEIIEQISEFSKRVILADANLDKVLSAYNKHRDKPIREQAENIIHLFTLTNLGAPAAFKYFDTTIDRKRYTSTKEVLDATLIHQSITGLYETRIDLSQLGGDGGEAAAKPAPGSSGGTLNIEDEYRLHETSKEPDVSLGSTWLSDFPQAWAETGGMGLAVRQAPLIIPLKATSTPVSIKQYPMSQEARLGIKPHIQRLLDQGILVPCQSPWNTPLLPVKKPGTNDYRPVQDLREVNKRVEDIHPTVPNPYNLLSGLPPSHQWYTVLDLKDAFFCLRLHPTSQPLFAFEWRDPEMGISGQLTWTRLPQGFKNSPTLFNEALHRDLADFRIQHPDLILLQYVDDLLLAATSELDCQQGTRALLQTLGNLGYRASAKKAQICQKQVKYLGYLLKEGQRWLTEARKETVMGQPTPKTPRQLREFLGKAGFCRLFIPGFAEMAAPLYPLTKPGTLFNWGPDQQKAYQEIKQALLTAPALGLPDLTKPFELFVDEKQGYAKGVLTQKLGPWRRPVAYLSKKLDPVAAGWPPCLRMVAAIAVLTKDAGKLTMGQPLVILAPHAVEALVKQPPDRWLSNARMTHYQALLLDTDRVQFGPVVALNPATLLPLPEEGLQHNCLDILAEAHGTRPDLTDQPLPDADHTWYTDGSSLLQEGQRKAGAAVTTETEVIWAKALPAGTSAQRAELIALTQALKMAEGKKLNVYTDSRYAFATAHIHGEIYRRRGWLTSEGKEIKNKDEILALLKALFLPKRLSIIHCPGHQKGHSAEARGNRMADQAARKAAITETPDTSTLLIENSSPSGGSKRTADGSEFEAGKRTADGSEFEKRTADGSEFESPKKKAKVE

SEQ ID NO: 2629 - protein, 2116 aa, synthetic construct
MPAAKRVKLDGGDKKYSIGLDIGTNSVGWAVITDEYKVPSKKFKVLGNTDRHSIKKNLIGALLFDSGETAEATRLKRTARRRYTRRKNRICYLQEIFSNEMAKVDDSFFHRLEESFLVEEDKKHERHPIFGNIVDEVAYHEKYPTIYHLRKKLVDSTDKADLRLIYLALAHMIKFRGHFLIEGDLNPDNSDVDKLFIQLVQTYNQLFEENPINASGVDAKAILSARLSKSRRLENLIAQLPGEKKNGLFGNLIALSLGLTPNFKSNFDLAEDAKLQLSKDTYDDDLDNLLAQIGDQYADLFLAAKNLSDAILLSDILRVNTEITKAPLSASMIKRYDEHHQDLTLLKALVRQQLPEKYKEIFFDQSKNGYAGYIDGGASQEEFYKFIKPILEKMDGTEELLVKLNREDLLRKQRTFDNGSIPHQIHLGELHAILRRQEDFYPFLKDNREKIEKILTFRIPYYVGPLARGNSRFAWMTRKSEETITPWNFEEVVDKGASAQSFIERMTNFDKNLPNEKVLPKHSLLYEYFTVYNELTKVKYVTEGMRKPAFLSGEQKKAIVDLLFKTNRKVTVKQLKEDYFKKIECFDSVEISGVEDRFNASLGTYHDLLKIIKDKDFLDNEENEDILEDIVLTLTLFEDREMIEERLKTYAHLFDDKVMKQLKRRRYTGWGRLSRKLINGIRDKQSGKTILDFLKSDGFANRNFMQLIHDDSLTFKEDIQKAQVSGQGDSLHEHIANLAGSPAIKKGILQTVKVVDELVKVMGRHKPENIVIEMARENQTTQKGQKNSRERMKRIEEGIKELGSQILKEHPVENTQLQNEKLYLYYLQNGRDMYVDQELDINRLSDYDVDHIVPQSFLKDDSIDNKVLTRSDKARGKSDNVPSEEVVKKMKNYWRQLLNAKLITQRKFDNLTKAERGGLSELDKAGFIKRQLVETRQITKHVAQILDSRMNTKYDENDKLIREVKVITLKSKLVSDFRKDFQFYKVREINNYHHAHDAYLNAVVGTALIKKYPKLESEFVYGDYKVYDVRKMIAKSEQEIGKATAKYFFYSNIMNFFKTEITLANGEIRKRPLIETNGETGEIVWDKGRDFATVRKVLSMPQVNIVKKTEVQTGGFSKESILPKRNSDKLIARKKDWDPKKYGGFDSPTVAYSVLVVAKVEKGKSKKLKSVKELLGITIMERSSFEKNPIDFLEAKGYKEVKKDLIIKLPKYSLFELENGRKRMLASAGELQKGNELALPSKYVNFLYLASHYEKLKGSPEDNEQKQLFVEQHKHYLDEIIEQISEFSKRVILADANLDKVLSAYNKHRDKPIREQAENIIHLFTLTNLGAPAAFKYFDTTIDRKRYTSTKEVLDATLIHQSITGLYETRIDLSQLGGDGGGGSEAAAKGGGGGTLNIEDEYRLHETSKEPDVSLGSTWLSDFPQAWAETGGMGLAVRQAPLIIPLKATSTPVSIKQYPMSQEARLGIKPHIQRLLDQGILVPCQSPWNTPLLPVKKPGTNDYRPVQDLREVNKRVEDIHPTVPNPYNLLSGLPPSHQWYTVLDLKDAFFCLRLHPTSQPLFAFEWRDPEMGISGQLTWTRLPQGFKNSPTLFNEALHRDLADFRIQHPDLILLQYVDDLLLAATSELDCQQGTRALLQTLGNLGYRASAKKAQICQKQVKYLGYLLKEGQRWLTEARKETVMGQPTPKTPRQLREFLGKAGFCRLFIPGFAEMAAPLYPLTKPGTLFNWGPDQQKAYQEIKQALLTAPALGLPDLTKPFELFVDEKQGYAKGVLTQKLGPWRRPVAYLSKKLDPVAAGWPPCLRMVAAIAVLTKDAGKLTMGQPLVILAPHAVEALVKQPPDRWLSNARMTHYQALLLDTDRVQFGPVVALNPATLLPLPEEGLQHNCLDILAEAHGTRPDLTDQPLPDADHTWYTDGSSLLQEGQRKAGAAVTTETEVIWAKALPAGTSAQRAELIALTQALKMAEGKKLNVYTDSRYAFATAHIHGEIYRRRGWLTSEGKEIKNKDEILALLKALFLPKRLSIIHCPGHQKGHSAEARGNRMADQAARKAAITETPDTSTLLIENSSPSGGSKRTADGSEFEAGKRTADGSEFEKRTADGSEFESPKKKAKVE

SEQ ID NO: 2630 - protein, 2135 aa, synthetic construct
MPAAKRVKLDGGDKKYSIGLDIGTNSVGWAVITDEYKVPSKKFKVLGNTDRHSIKKNLIGALLFDSGETAEATRLKRTARRRYTRRKNRICYLQEIFSNEMAKVDDSFFHRLEESFLVEEDKKHERHPIFGNIVDEVAYHEKYPTIYHLRKKLVDSTDKADLRLIYLALAHMIKFRGHFLIEGDLNPDNSDVDKLFIQLVQTYNQLFEENPINASGVDAKAILSARLSKSRRLENLIAQLPGEKKNGLFGNLIALSLGLTPNFKSNFDLAEDAKLQLSKDTYDDDLDNLLAQIGDQYADLFLAAKNLSDAILLSDILRVNTEITKAPLSASMIKRYDEHHQDLTLLKALVRQQLPEKYKEIFFDQSKNGYAGYIDGGASQEEFYKFIKPILEKMDGTEELLVKLNREDLLRKQRTFDNGSIPHQIHLGELHAILRRQEDFYPFLKDNREKIEKILTFRIPYYVGPLARGNSRFAWMTRKSEETITPWNFEEVVDKGASAQSFIERMTNFDKNLPNEKVLPKHSLLYEYFTVYNELTKVKYVTEGMRKPAFLSGEQKKAIVDLLFKTNRKVTVKQLKEDYFKKIECFDSVEISGVEDRFNASLGTYHDLLKIIKDKDFLDNEENEDILEDIVLTLTLFEDREMIEERLKTYAHLFDDKVMKQLKRRRYTGWGRLSRKLINGIRDKQSGKTILDFLKSDGFANRNFMQLIHDDSLTFKEDIQKAQVSGQGDSLHEHIANLAGSPAIKKGILQTVKVVDELVKVMGRHKPENIVIEMARENQTTQKGQKNSRERMKRIEEGIKELGSQILKEHPVENTQLQNEKLYLYYLQNGRDMYVDQELDINRLSDYDVDHIVPQSFLKDDSIDNKVLTRSDKARGKSDNVPSEEVVKKMKNYWRQLLNAKLITQRKFDNLTKAERGGLSELDKAGFIKRQLVETRQITKHVAQILDSRMNTKYDENDKLIREVKVITLKSKLVSDFRKDFQFYKVREINNYHHAHDAYLNAVVGTALIKKYPKLESEFVYGDYKVYDVRKMIAKSEQEIGKATAKYFFYSNIMNFFKTEITLANGEIRKRPLIETNGETGEIVWDKGRDFATVRKVLSMPQVNIVKKTEVQTGGFSKESILPKRNSDKLIARKKDWDPKKYGGFDSPTVAYSVLVVAKVEKGKSKKLKSVKELLGITIMERSSFEKNPIDFLEAKGYKEVKKDLIIKLPKYSLFELENGRKRMLASAGELQKGNELALPSKYVNFLYLASHYEKLKGSPEDNEQKQLFVEQHKHYLDEIIEQISEFSKRVILADANLDKVLSAYNKHRDKPIREQAENIIHLFTLTNLGAPAAFKYFDTTIDRKRYTSTKEVLDATLIHQSITGLYETRIDLSQLGGDGGEAAAKEAAAKEAAAKEAAAKEAAAKEAAAKGGTLNIEDEYRLHETSKEPDVSLGSTWLSDFPQAWAETGGMGLAVRQAPLIIPLKATSTPVSIKQYPMSQEARLGIKPHIQRLLDQGILVPCQSPWNTPLLPVKKPGTNDYRPVQDLREVNKRVEDIHPTVPNPYNLLSGLPPSHQWYTVLDLKDAFFCLRLHPTSQPLFAFEWRDPEMGISGQLTWTRLPQGFKNSPTLFNEALHRDLADFRIQHPDLILLQYVDDLLLAATSELDCQQGTRALLQTLGNLGYRASAKKAQICQKQVKYLGYLLKEGQRWLTEARKETVMGQPTPKTPRQLREFLGKAGFCRLFIPGFAEMAAPLYPLTKPGTLFNWGPDQQKAYQEIKQALLTAPALGLPDLTKPFELFVDEKQGYAKGVLTQKLGPWRRPVAYLSKKLDPVAAGWPPCLRMVAAIAVLTKDAGKLTMGQPLVILAPHAVEALVKQPPDRWLSNARMTHYQALLLDTDRVQFGPVVALNPATLLPLPEEGLQHNCLDILAEAHGTRPDLTDQPLPDADHTWYTDGSSLLQEGQRKAGAAVTTETEVIWAKALPAGTSAQRAELIALTQALKMAEGKKLNVYTDSRYAFATAHIHGEIYRRRGWLTSEGKEIKNKDEILALLKALFLPKRLSIIHCPGHQKGHSAEARGNRMADQAARKAAITETPDTSTLLIENSSPSGGSKRTADGSEFEAGKRTADGSEFEKRTADGSEFESPKKKAKVE

SEQ ID NO: 2631 - protein, 2108 aa, synthetic construct
MPAAKRVKLDGGDKKYSIGLDIGTNSVGWAVITDEYKVPSKKFKVLGNTDRHSIKKNLIGALLFDSGETAEATRLKRTARRRYTRRKNRICYLQEIFSNEMAKVDDSFFHRLEESFLVEEDKKHERHPIFGNIVDEVAYHEKYPTIYHLRKKLVDSTDKADLRLIYLALAHMIKFRGHFLIEGDLNPDNSDVDKLFIQLVQTYNQLFEENPINASGVDAKAILSARLSKSRRLENLIAQLPGEKKNGLFGNLIALSLGLTPNFKSNFDLAEDAKLQLSKDTYDDDLDNLLAQIGDQYADLFLAAKNLSDAILLSDILRVNTEITKAPLSASMIKRYDEHHQDLTLLKALVRQQLPEKYKEIFFDQSKNGYAGYIDGGASQEEFYKFIKPILEKMDGTEELLVKLNREDLLRKQRTFDNGSIPHQIHLGELHAILRRQEDFYPFLKDNREKIEKILTFRIPYYVGPLARGNSRFAWMTRKSEETITPWNFEEVVDKGASAQSFIERMTNFDKNLPNEKVLPKHSLLYEYFTVYNELTKVKYVTEGMRKPAFLSGEQKKAIVDLLFKTNRKVTVKQLKEDYFKKIECFDSVEISGVEDRFNASLGTYHDLLKIIKDKDFLDNEENEDILEDIVLTLTLFEDREMIEERLKTYAHLFDDKVMKQLKRRRYTGWGRLSRKLINGIRDKQSGKTILDFLKSDGFANRNFMQLIHDDSLTFKEDIQKAQVSGQGDSLHEHIANLAGSPAIKKGILQTVKVVDELVKVMGRHKPENIVIEMARENQTTQKGQKNSRERMKRIEEGIKELGSQILKEHPVENTQLQNEKLYLYYLQNGRDMYVDQELDINRLSDYDVDHIVPQSFLKDDSIDNKVLTRSDKARGKSDNVPSEEVVKKMKNYWRQLLNAKLITQRKFDNLTKAERGGLSELDKAGFIKRQLVETRQITKHVAQILDSRMNTKYDENDKLIREVKVITLKSKLVSDFRKDFQFYKVREINNYHHAHDAYLNAVVGTALIKKYPKLESEFVYGDYKVYDVRKMIAKSEQEIGKATAKYFFYSNIMNFFKTEITLANGEIRKRPLIETNGETGEIVWDKGRDFATVRKVLSMPQVNIVKKTEVQTGGFSKESILPKRNSDKLIARKKDWDPKKYGGFDSPTVAYSVLVVAKVEKGKSKKLKSVKELLGITIMERSSFEKNPIDFLEAKGYKEVKKDLIIKLPKYSLFELENGRKRMLASAGELQKGNELALPSKYVNFLYLASHYEKLKGSPEDNEQKQLFVEQHKHYLDEIIEQISEFSKRVILADANLDKVLSAYNKHRDKPIREQAENIIHLFTLTNLGAPAAFKYFDTTIDRKRYTSTKEVLDATLIHQSITGLYETRIDLSQLGGDGGGGSGGTLNIEDEYRLHETSKEPDVSLGSTWLSDFPQAWAETGGMGLAVRQAPLIIPLKATSTPVSIKQYPMSQEARLGIKPHIQRLLDQGILVPCQSPWNTPLLPVKKPGTNDYRPVQDLREVNKRVEDIHPTVPNPYNLLSGLPPSHQWYTVLDLKDAFFCLRLHPTSQPLFAFEWRDPEMGISGQLTWTRLPQGFKNSPTLFNEALHRDLADFRIQHPDLILLQYVDDLLLAATSELDCQQGTRALLQTLGNLGYRASAKKAQICQKQVKYLGYLLKEGQRWLTEARKETVMGQPTPKTPRQLREFLGKAGFCRLFIPGFAEMAAPLYPLTKPGTLFNWGPDQQKAYQEIKQALLTAPALGLPDLTKPFELFVDEKQGYAKGVLTQKLGPWRRPVAYLSKKLDPVAAGWPPCLRMVAAIAVLTKDAGKLTMGQPLVILAPHAVEALVKQPPDRWLSNARMTHYQALLLDTDRVQFGPVVALNPATLLPLPEEGLQHNCLDILAEAHGTRPDLTDQPLPDADHTWYTDGSSLLQEGQRKAGAAVTTETEVIWAKALPAGTSAQRAELIALTQALKMAEGKKLNVYTDSRYAFATAHIHGEIYRRRGWLTSEGKEIKNKDEILALLKALFLPKRLSIIHCPGHQKGHSAEARGNRMADQAARKAAITETPDTSTLLIENSSPSGGSKRTADGSEFEAGKRTADGSEFEKRTADGSEFESPKKKAKVE

SEQ ID NO: 2632 - protein, 2114 aa, synthetic construct
MPAAKRVKLDGGDKKYSIGLDIGTNSVGWAVITDEYKVPSKKFKVLGNTDRHSIKKNLIGALLFDSGETAEATRLKRTARRRYTRRKNRICYLQEIFSNEMAKVDDSFFHRLEESFLVEEDKKHERHPIFGNIVDEVAYHEKYPTIYHLRKKLVDSTDKADLRLIYLALAHMIKFRGHFLIEGDLNPDNSDVDKLFIQLVQTYNQLFEENPINASGVDAKAILSARLSKSRRLENLIAQLPGEKKNGLFGNLIALSLGLTPNFKSNFDLAEDAKLQLSKDTYDDDLDNLLAQIGDQYADLFLAAKNLSDAILLSDILRVNTEITKAPLSASMIKRYDEHHQDLTLLKALVRQQLPEKYKEIFFDQSKNGYAGYIDGGASQEEFYKFIKPILEKMDGTEELLVKLNREDLLRKQRTFDNGSIPHQIHLGELHAILRRQEDFYPFLKDNREKIEKILTFRIPYYVGPLARGNSRFAWMTRKSEETITPWNFEEVVDKGASAQSFIERMTNFDKNLPNEKVLPKHSLLYEYFTVYNELTKVKYVTEGMRKPAFLSGEQKKAIVDLLFKTNRKVTVKQLKEDYFKKIECFDSVEISGVEDRFNASLGTYHDLLKIIKDKDFLDNEENEDILEDIVLTLTLFEDREMIEERLKTYAHLFDDKVMKQLKRRRYTGWGRLSRKLINGIRDKQSGKTILDFLKSDGFANRNFMQLIHDDSLTFKEDIQKAQVSGQGDSLHEHIANLAGSPAIKKGILQTVKVVDELVKVMGRHKPENIVIEMARENQTTQKGQKNSRERMKRIEEGIKELGSQILKEHPVENTQLQNEKLYLYYLQNGRDMYVDQELDINRLSDYDVDHIVPQSFLKDDSIDNKVLTRSDKARGKSDNVPSEEVVKKMKNYWRQLLNAKLITQRKFDNLTKAERGGLSELDKAGFIKRQLVETRQITKHVAQILDSRMNTKYDENDKLIREVKVITLKSKLVSDFRKDFQFYKVREINNYHHAHDAYLNAVVGTALIKKYPKLESEFVYGDYKVYDVRKMIAKSEQEIGKATAKYFFYSNIMNFFKTEITLANGEIRKRPLIETNGETGEIVWDKGRDFATVRKVLSMPQVNIVKKTEVQTGGFSKESILPKRNSDKLIARKKDWDPKKYGGFDSPTVAYSVLVVAKVEKGKSKKLKSVKELLGITIMERSSFEKNPIDFLEAKGYKEVKKDLIIKLPKYSLFELENGRKRMLASAGELQKGNELALPSKYVNFLYLASHYEKLKGSPEDNEQKQLFVEQHKHYLDEIIEQISEFSKRVILADANLDKVLSAYNKHRDKPIREQAENIIHLFTLTNLGAPAAFKYFDTTIDRKRYTSTKEVLDATLIHQSITGLYETRIDLSQLGGDGGGGGGSSGGSGGTLNIEDEYRLHETSKEPDVSLGSTWLSDFPQAWAETGGMGLAVRQAPLIIPLKATSTPVSIKQYPMSQEARLGIKPHIQRLLDQGILVPCQSPWNTPLLPVKKPGTNDYRPVQDLREVNKRVEDIHPTVPNPYNLLSGLPPSHQWYTVLDLKDAFFCLRLHPTSQPLFAFEWRDPEMGISGQLTWTRLPQGFKNSPTLFNEALHRDLADFRIQHPDLILLQYVDDLLLAATSELDCQQGTRALLQTLGNLGYRASAKKAQICQKQVKYLGYLLKEGQRWLTEARKETVMGQPTPKTPRQLREFLGKAGFCRLFIPGFAEMAAPLYPLTKPGTLFNWGPDQQKAYQEIKQALLTAPALGLPDLTKPFELFVDEKQGYAKGVLTQKLGPWRRPVAYLSKKLDPVAAGWPPCLRMVAAIAVLTKDAGKLTMGQPLVILAPHAVEALVKQPPDRWLSNARMTHYQALLLDTDRVQFGPVVALNPATLLPLPEEGLQHNCLDILAEAHGTRPDLTDQPLPDADHTWYTDGSSLLQEGQRKAGAAVTTETEVIWAKALPAGTSAQRAELIALTQALKMAEGKKLNVYTDSRYAFATAHIHGEIYRRRGWLTSEGKEIKNKDEILALLKALFLPKRLSIIHCPGHQKGHSAEARGNRMADQAARKAAITETPDTSTLLIENSSPSGGSKRTADGSEFEAGKRTADGSEFEKRTADGSEFESPKKKAKVE

SEQ ID NO: 2633 - protein, 2114 aa, synthetic construct
MPAAKRVKLDGGDKKYSIGLDIGTNSVGWAVITDEYKVPSKKFKVLGNTDRHSIKKNLIGALLFDSGETAEATRLKRTARRRYTRRKNRICYLQEIFSNEMAKVDDSFFHRLEESFLVEEDKKHERHPIFGNIVDEVAYHEKYPTIYHLRKKLVDSTDKADLRLIYLALAHMIKFRGHFLIEGDLNPDNSDVDKLFIQLVQTYNQLFEENPINASGVDAKAILSARLSKSRRLENLIAQLPGEKKNGLFGNLIALSLGLTPNFKSNFDLAEDAKLQLSKDTYDDDLDNLLAQIGDQYADLFLAAKNLSDAILLSDILRVNTEITKAPLSASMIKRYDEHHQDLTLLKALVRQQLPEKYKEIFFDQSKNGYAGYIDGGASQEEFYKFIKPILEKMDGTEELLVKLNREDLLRKQRTFDNGSIPHQIHLGELHAILRRQEDFYPFLKDNREKIEKILTFRIPYYVGPLARGNSRFAWMTRKSEETITPWNFEEVVDKGASAQSFIERMTNFDKNLPNEKVLPKHSLLYEYFTVYNELTKVKYVTEGMRKPAFLSGEQKKAIVDLLFKTNRKVTVKQLKEDYFKKIECFDSVEISGVEDRFNASLGTYHDLLKIIKDKDFLDNEENEDILEDIVLTLTLFEDREMIEERLKTYAHLFDDKVMKQLKRRRYTGWGRLSRKLINGIRDKQSGKTILDFLKSDGFANRNFMQLIHDDSLTFKEDIQKAQVSGQGDSLHEHIANLAGSPAIKKGILQTVKVVDELVKVMGRHKPENIVIEMARENQTTQKGQKNSRERMKRIEEGIKELGSQILKEHPVENTQLQNEKLYLYYLQNGRDMYVDQELDINRLSDYDVDHIVPQSFLKDDSIDNKVLTRSDKARGKSDNVPSEEVVKKMKNYWRQLLNAKLITQRKFDNLTKAERGGLSELDKAGFIKRQLVETRQITKHVAQILDSRMNTKYDENDKLIREVKVITLKSKLVSDFRKDFQFYKVREINNYHHAHDAYLNAVVGTALIKKYPKLESEFVYGDYKVYDVRKMIAKSEQEIGKATAKYFFYSNIMNFFKTEITLANGEIRKRPLIETNGETGEIVWDKGRDFATVRKVLSMPQVNIVKKTEVQTGGFSKESILPKRNSDKLIARKKDWDPKKYGGFDSPTVAYSVLVVAKVEKGKSKKLKSVKELLGITIMERSSFEKNPIDFLEAKGYKEVKKDLIIKLPKYSLFELENGRKRMLASAGELQKGNELALPSKYVNFLYLASHYEKLKGSPEDNEQKQLFVEQHKHYLDEIIEQISEFSKRVILADANLDKVLSAYNKHRDKPIREQAENIIHLFTLTNLGAPAAFKYFDTTIDRKRYTSTKEVLDATLIHQSITGLYETRIDLSQLGGDGGGSSPAPGGGGGTLNIEDEYRLHETSKEPDVSLGSTWLSDFPQAWAETGGMGLAVRQAPLIIPLKATSTPVSIKQYPMSQEARLGIKPHIQRLLDQGILVPCQSPWNTPLLPVKKPGTNDYRPVQDLREVNKRVEDIHPTVPNPYNLLSGLPPSHQWYTVLDLKDAFFCLRLHPTSQPLFAFEWRDPEMGISGQLTWTRLPQGFKNSPTLFNEALHRDLADFRIQHPDLILLQYVDDLLLAATSELDCQQGTRALLQTLGNLGYRASAKKAQICQKQVKYLGYLLKEGQRWLTEARKETVMGQPTPKTPRQLREFLGKAGFCRLFIPGFAEMAAPLYPLTKPGTLFNWGPDQQKAYQEIKQALLTAPALGLPDLTKPFELFVDEKQGYAKGVLTQKLGPWRRPVAYLSKKLDPVAAGWPPCLRMVAAIAVLTKDAGKLTMGQPLVILAPHAVEALVKQPPDRWLSNARMTHYQALLLDTDRVQFGPVVALNPATLLPLPEEGLQHNCLDILAEAHGTRPDLTDQPLPDADHTWYTDGSSLLQEGQRKAGAAVTTETEVIWAKALPAGTSAQRAELIALTQALKMAEGKKLNVYTDSRYAFATAHIHGEIYRRRGWLTSEGKEIKNKDEILALLKALFLPKRLSIIHCPGHQKGHSAEARGNRMADQAARKAAITETPDTSTLLIENSSPSGGSKRTADGSEFEAGKRTADGSEFEKRTADGSEFESPKKKAKVE

SEQ ID NO: 2634 - protein, 2114 aa, synthetic construct
MPAAKRVKLDGGDKKYSIGLDIGTNSVGWAVITDEYKVPSKKFKVLGNTDRHSIKKNLIGALLFDSGETAEATRLKRTARRRYTRRKNRICYLQEIFSNEMAKVDDSFFHRLEESFLVEEDKKHERHPIFGNIVDEVAYHEKYPTIYHLRKKLVDSTDKADLRLIYLALAHMIKFRGHFLIEGDLNPDNSDVDKLFIQLVQTYNQLFEENPINASGVDAKAILSARLSKSRRLENLIAQLPGEKKNGLFGNLIALSLGLTPNFKSNFDLAEDAKLQLSKDTYDDDLDNLLAQIGDQYADLFLAAKNLSDAILLSDILRVNTEITKAPLSASMIKRYDEHHQDLTLLKALVRQQLPEKYKEIFFDQSKNGYAGYIDGGASQEEFYKFIKPILEKMDGTEELLVKLNREDLLRKQRTFDNGSIPHQIHLGELHAILRRQEDFYPFLKDNREKIEKILTFRIPYYVGPLARGNSRFAWMTRKSEETITPWNFEEVVDKGASAQSFIERMTNFDKNLPNEKVLPKHSLLYEYFTVYNELTKVKYVTEGMRKPAFLSGEQKKAIVDLLFKTNRKVTVKQLKEDYFKKIECFDSVEISGVEDRFNASLGTYHDLLKIIKDKDFLDNEENEDILEDIVLTLTLFEDREMIEERLKTYAHLFDDKVMKQLKRRRYTGWGRLSRKLINGIRDKQSGKTILDFLKSDGFANRNFMQLIHDDSLTFKEDIQKAQVSGQGDSLHEHIANLAGSPAIKKGILQTVKVVDELVKVMGRHKPENIVIEMARENQTTQKGQKNSRERMKRIEEGIKELGSQILKEHPVENTQLQNEKLYLYYLQNGRDMYVDQELDINRLSDYDVDHIVPQSFLKDDSIDNKVLTRSDKARGKSDNVPSEEVVKKMKNYWRQLLNAKLITQRKFDNLTKAERGGLSELDKAGFIKRQLVETRQITKHVAQILDSRMNTKYDENDKLIREVKVITLKSKLVSDFRKDFQFYKVREINNYHHAHDAYLNAVVGTALIKKYPKLESEFVYGDYKVYDVRKMIAKSEQEIGKATAKYFFYSNIMNFFKTEITLANGEIRKRPLIETNGETGEIVWDKGRDFATVRKVLSMPQVNIVKKTEVQTGGFSKESILPKRNSDKLIARKKDWDPKKYGGFDSPTVAYSVLVVAKVEKGKSKKLKSVKELLGITIMERSSFEKNPIDFLEAKGYKEVKKDLIIKLPKYSLFELENGRKRMLASAGELQKGNELALPSKYVNFLYLASHYEKLKGSPEDNEQKQLFVEQHKHYLDEIIEQISEFSKRVILADANLDKVLSAYNKHRDKPIREQAENIIHLFTLTNLGAPAAFKYFDTTIDRKRYTSTKEVLDATLIHQSITGLYETRIDLSQLGGDGGGSSGSSGSSGGTLNIEDEYRLHETSKEPDVSLGSTWLSDFPQAWAETGGMGLAVRQAPLIIPLKATSTPVSIKQYPMSQEARLGIKPHIQRLLDQGILVPCQSPWNTPLLPVKKPGTNDYRPVQDLREVNKRVEDIHPTVPNPYNLLSGLPPSHQWYTVLDLKDAFFCLRLHPTSQPLFAFEWRDPEMGISGQLTWTRLPQGFKNSPTLFNEALHRDLADFRIQHPDLILLQYVDDLLLAATSELDCQQGTRALLQTLGNLGYRASAKKAQICQKQVKYLGYLLKEGQRWLTEARKETVMGQPTPKTPRQLREFLGKAGFCRLFIPGFAEMAAPLYPLTKPGTLFNWGPDQQKAYQEIKQALLTAPALGLPDLTKPFELFVDEKQGYAKGVLTQKLGPWRRPVAYLSKKLDPVAAGWPPCLRMVAAIAVLTKDAGKLTMGQPLVILAPHAVEALVKQPPDRWLSNARMTHYQALLLDTDRVQFGPVVALNPATLLPLPEEGLQHNCLDILAEAHGTRPDLTDQPLPDADHTWYTDGSSLLQEGQRKAGAAVTTETEVIWAKALPAGTSAQRAELIALTQALKMAEGKKLNVYTDSRYAFATAHIHGEIYRRRGWLTSEGKEIKNKDEILALLKALFLPKRLSIIHCPGHQKGHSAEARGNRMADQAARKAAITETPDTSTLLIENSSPSGGSKRTADGSEFEAGKRTADGSEFEKRTADGSEFESPKKKAKVE

SEQ ID NO: 2635 - protein, 2112 aa, synthetic construct
MPAAKRVKLDGGDKKYSIGLDIGTNSVGWAVITDEYKVPSKKFKVLGNTDRHSIKKNLIGALLFDSGETAEATRLKRTARRRYTRRKNRICYLQEIFSNEMAKVDDSFFHRLEESFLVEEDKKHERHPIFGNIVDEVAYHEKYPTIYHLRKKLVDSTDKADLRLIYLALAHMIKFRGHFLIEGDLNPDNSDVDKLFIQLVQTYNQLFEENPINASGVDAKAILSARLSKSRRLENLIAQLPGEKKNGLFGNLIALSLGLTPNFKSNFDLAEDAKLQLSKDTYDDDLDNLLAQIGDQYADLFLAAKNLSDAILLSDILRVNTEITKAPLSASMIKRYDEHHQDLTLLKALVRQQLPEKYKEIFFDQSKNGYAGYIDGGASQEEFYKFIKPILEKMDGTEELLVKLNREDLLRKQRTFDNGSIPHQIHLGELHAILRRQEDFYPFLKDNREKIEKILTFRIPYYVGPLARGNSRFAWMTRKSEETITPWNFEEVVDKGASAQSFIERMTNFDKNLPNEKVLPKHSLLYEYFTVYNELTKVKYVTEGMRKPAFLSGEQKKAIVDLLFKTNRKVTVKQLKEDYFKKIECFDSVEISGVEDRFNASLGTYHDLLKIIKDKDFLDNEENEDILEDIVLTLTLFEDREMIEERLKTYAHLFDDKVMKQLKRRRYTGWGRLSRKLINGIRDKQSGKTILDFLKSDGFANRNFMQLIHDDSLTFKEDIQKAQVSGQGDSLHEHIANLAGSPAIKKGILQTVKVVDELVKVMGRHKPENIVIEMARENQTTQKGQKNSRERMKRIEEGIKELGSQILKEHPVENTQLQNEKLYLYYLQNGRDMYVDQELDINRLSDYDVDHIVPQSFLKDDSIDNKVLTRSDKARGKSDNVPSEEVVKKMKNYWRQLLNAKLITQRKFDNLTKAERGGLSELDKAGFIKRQLVETRQITKHVAQILDSRMNTKYDENDKLIREVKVITLKSKLVSDFRKDFQFYKVREINNYHHAHDAYLNAVVGTALIKKYPKLESEFVYGDYKVYDVRKMIAKSEQEIGKATAKYFFYSNIMNFFKTEITLANGEIRKRPLIETNGETGEIVWDKGRDFATVRKVLSMPQVNIVKKTEVQTGGFSKESILPKRNSDKLIARKKDWDPKKYGGFDSPTVAYSVLVVAKVEKGKSKKLKSVKELLGITIMERSSFEKNPIDFLEAKGYKEVKKDLIIKLPKYSLFELENGRKRMLASAGELQKGNELALPSKYVNFLYLASHYEKLKGSPEDNEQKQLFVEQHKHYLDEIIEQISEFSKRVILADANLDKVLSAYNKHRDKPIREQAENIIHLFTLTNLGAPAAFKYFDTTIDRKRYTSTKEVLDATLIHQSITGLYETRIDLSQLGGDGGGGGGGGGGGTLNIEDEYRLHETSKEPDVSLGSTWLSDFPQAWAETGGMGLAVRQAPLIIPLKATSTPVSIKQYPMSQEARLGIKPHIQRLLDQGILVPCQSPWNTPLLPVKKPGTNDYRPVQDLREVNKRVEDIHPTVPNPYNLLSGLPPSHQWYTVLDLKDAFFCLRLHPTSQPLFAFEWRDPEMGISGQLTWTRLPQGFKNSPTLFNEALHRDLADFRIQHPDLILLQYVDDLLLAATSELDCQQGTRALLQTLGNLGYRASAKKAQICQKQVKYLGYLLKEGQRWLTEARKETVMGQPTPKTPRQLREFLGKAGFCRLFIPGFAEMAAPLYPLTKPGTLFNWGPDQQKAYQEIKQALLTAPALGLPDLTKPFELFVDEKQGYAKGVLTQKLGPWRRPVAYLSKKLDPVAAGWPPCLRMVAAIAVLTKDAGKLTMGQPLVILAPHAVEALVKQPPDRWLSNARMTHYQALLLDTDRVQFGPVVALNPATLLPLPEEGLQHNCLDILAEAHGTRPDLTDQPLPDADHTWYTDGSSLLQEGQRKAGAAVTTETEVIWAKALPAGTSAQRAELIALTQALKMAEGKKLNVYTDSRYAFATAHIHGEIYRRRGWLTSEGKEIKNKDEILALLKALFLPKRLSIIHCPGHQKGHSAEARGNRMADQAARKAAITETPDTSTLLIENSSPSGGSKRTADGSEFEAGKRTADGSEFEKRTADGSEFESPKKKAKVE

SEQ ID NO: 2636 - protein, 2120 aa, synthetic construct
MPAAKRVKLDGGDKKYSIGLDIGTNSVGWAVITDEYKVPSKKFKVLGNTDRHSIKKNLIGALLFDSGETAEATRLKRTARRRYTRRKNRICYLQEIFSNEMAKVDDSFFHRLEESFLVEEDKKHERHPIFGNIVDEVAYHEKYPTIYHLRKKLVDSTDKADLRLIYLALAHMIKFRGHFLIEGDLNPDNSDVDKLFIQLVQTYNQLFEENPINASGVDAKAILSARLSKSRRLENLIAQLPGEKKNGLFGNLIALSLGLTPNFKSNFDLAEDAKLQLSKDTYDDDLDNLLAQIGDQYADLFLAAKNLSDAILLSDILRVNTEITKAPLSASMIKRYDEHHQDLTLLKALVRQQLPEKYKEIFFDQSKNGYAGYIDGGASQEEFYKFIKPILEKMDGTEELLVKLNREDLLRKQRTFDNGSIPHQIHLGELHAILRRQEDFYPFLKDNREKIEKILTFRIPYYVGPLARGNSRFAWMTRKSEETITPWNFEEVVDKGASAQSFIERMTNFDKNLPNEKVLPKHSLLYEYFTVYNELTKVKYVTEGMRKPAFLSGEQKKAIVDLLFKTNRKVTVKQLKEDYFKKIECFDSVEISGVEDRFNASLGTYHDLLKIIKDKDFLDNEENEDILEDIVLTLTLFEDREMIEERLKTYAHLFDDKVMKQLKRRRYTGWGRLSRKLINGIRDKQSGKTILDFLKSDGFANRNFMQLIHDDSLTFKEDIQKAQVSGQGDSLHEHIANLAGSPAIKKGILQTVKVVDELVKVMGRHKPENIVIEMARENQTTQKGQKNSRERMKRIEEGIKELGSQILKEHPVENTQLQNEKLYLYYLQNGRDMYVDQELDINRLSDYDVDHIVPQSFLKDDSIDNKVLTRSDKARGKSDNVPSEEVVKKMKNYWRQLLNAKLITQRKFDNLTKAERGGLSELDKAGFIKRQLVETRQITKHVAQILDSRMNTKYDENDKLIREVKVITLKSKLVSDFRKDFQFYKVREINNYHHAHDAYLNAVVGTALIKKYPKLESEFVYGDYKVYDVRKMIAKSEQEIGKATAKYFFYSNIMNFFKTEITLANGEIRKRPLIETNGETGEIVWDKGRDFATVRKVLSMPQVNIVKKTEVQTGGFSKESILPKRNSDKLIARKKDWDPKKYGGFDSPTVAYSVLVVAKVEKGKSKKLKSVKELLGITIMERSSFEKNPIDFLEAKGYKEVKKDLIIKLPKYSLFELENGRKRMLASAGELQKGNELALPSKYVNFLYLASHYEKLKGSPEDNEQKQLFVEQHKHYLDEIIEQISEFSKRVILADANLDKVLSAYNKHRDKPIREQAENIIHLFTLTNLGAPAAFKYFDTTIDRKRYTSTKEVLDATLIHQSITGLYETRIDLSQLGGDGGGGGGSEAAAKGGGGSGGTLNIEDEYRLHETSKEPDVSLGSTWLSDFPQAWAETGGMGLAVRQAPLIIPLKATSTPVSIKQYPMSQEARLGIKPHIQRLLDQGILVPCQSPWNTPLLPVKKPGTNDYRPVQDLREVNKRVEDIHPTVPNPYNLLSGLPPSHQWYTVLDLKDAFFCLRLHPTSQPLFAFEWRDPEMGISGQLTWTRLPQGFKNSPTLFNEALHRDLADFRIQHPDLILLQYVDDLLLAATSELDCQQGTRALLQTLGNLGYRASAKKAQICQKQVKYLGYLLKEGQRWLTEARKETVMGQPTPKTPRQLREFLGKAGFCRLFIPGFAEMAAPLYPLTKPGTLFNWGPDQQKAYQEIKQALLTAPALGLPDLTKPFELFVDEKQGYAKGVLTQKLGPWRRPVAYLSKKLDPVAAGWPPCLRMVAAIAVLTKDAGKLTMGQPLVILAPHAVEALVKQPPDRWLSNARMTHYQALLLDTDRVQFGPVVALNPATLLPLPEEGLQHNCLDILAEAHGTRPDLTDQPLPDADHTWYTDGSSLLQEGQRKAGAAVTTETEVIWAKALPAGTSAQRAELIALTQALKMAEGKKLNVYTDSRYAFATAHIHGEIYRRRGWLTSEGKEIKNKDEILALLKALFLPKRLSIIHCPGHQKGHSAEARGNRMADQAARKAAITETPDTSTLLIENSSPSGGSKRTADGSEFEAGKRTADGSEFEKRTADGSEFESPKKKAKVE

SEQ ID NO: 2637 - protein, 2116 aa, synthetic construct
MPAAKRVKLDGGDKKYSIGLDIGTNSVGWAVITDEYKVPSKKFKVLGNTDRHSIKKNLIGALLFDSGETAEATRLKRTARRRYTRRKNRICYLQEIFSNEMAKVDDSFFHRLEESFLVEEDKKHERHPIFGNIVDEVAYHEKYPTIYHLRKKLVDSTDKADLRLIYLALAHMIKFRGHFLIEGDLNPDNSDVDKLFIQLVQTYNQLFEENPINASGVDAKAILSARLSKSRRLENLIAQLPGEKKNGLFGNLIALSLGLTPNFKSNFDLAEDAKLQLSKDTYDDDLDNLLAQIGDQYADLFLAAKNLSDAILLSDILRVNTEITKAPLSASMIKRYDEHHQDLTLLKALVRQQLPEKYKEIFFDQSKNGYAGYIDGGASQEEFYKFIKPILEKMDGTEELLVKLNREDLLRKQRTFDNGSIPHQIHLGELHAILRRQEDFYPFLKDNREKIEKILTFRIPYYVGPLARGNSRFAWMTRKSEETITPWNFEEVVDKGASAQSFIERMTNFDKNLPNEKVLPKHSLLYEYFTVYNELTKVKYVTEGMRKPAFLSGEQKKAIVDLLFKTNRKVTVKQLKEDYFKKIECFDSVEISGVEDRFNASLGTYHDLLKIIKDKDFLDNEENEDILEDIVLTLTLFEDREMIEERLKTYAHLFDDKVMKQLKRRRYTGWGRLSRKLINGIRDKQSGKTILDFLKSDGFANRNFMQLIHDDSLTFKEDIQKAQVSGQGDSLHEHIANLAGSPAIKKGILQTVKVVDELVKVMGRHKPENIVIEMARENQTTQKGQKNSRERMKRIEEGIKELGSQILKEHPVENTQLQNEKLYLYYLQNGRDMYVDQELDINRLSDYDVDHIVPQSFLKDDSIDNKVLTRSDKARGKSDNVPSEEVVKKMKNYWRQLLNAKLITQRKFDNLTKAERGGLSELDKAGFIKRQLVETRQITKHVAQILDSRMNTKYDENDKLIREVKVITLKSKLVSDFRKDFQFYKVREINNYHHAHDAYLNAVVGTALIKKYPKLESEFVYGDYKVYDVRKMIAKSEQEIGKATAKYFFYSNIMNFFKTEITLANGEIRKRPLIETNGETGEIVWDKGRDFATVRKVLSMPQVNIVKKTEVQTGGFSKESILPKRNSDKLIARKKDWDPKKYGGFDSPTVAYSVLVVAKVEKGKSKKLKSVKELLGITIMERSSFEKNPIDFLEAKGYKEVKKDLIIKLPKYSLFELENGRKRMLASAGELQKGNELALPSKYVNFLYLASHYEKLKGSPEDNEQKQLFVEQHKHYLDEIIEQISEFSKRVILADANLDKVLSAYNKHRDKPIREQAENIIHLFTLTNLGAPAAFKYFDTTIDRKRYTSTKEVLDATLIHQSITGLYETRIDLSQLGGDGGEAAAKGGSGGGGGTLNIEDEYRLHETSKEPDVSLGSTWLSDFPQAWAETGGMGLAVRQAPLIIPLKATSTPVSIKQYPMSQEARLGIKPHIQRLLDQGILVPCQSPWNTPLLPVKKPGTNDYRPVQDLREVNKRVEDIHPTVPNPYNLLSGLPPSHQWYTVLDLKDAFFCLRLHPTSQPLFAFEWRDPEMGISGQLTWTRLPQGFKNSPTLFNEALHRDLADFRIQHPDLILLQYVDDLLLAATSELDCQQGTRALLQTLGNLGYRASAKKAQICQKQVKYLGYLLKEGQRWLTEARKETVMGQPTPKTPRQLREFLGKAGFCRLFIPGFAEMAAPLYPLTKPGTLFNWGPDQQKAYQEIKQALLTAPALGLPDLTKPFELFVDEKQGYAKGVLTQKLGPWRRPVAYLSKKLDPVAAGWPPCLRMVAAIAVLTKDAGKLTMGQPLVILAPHAVEALVKQPPDRWLSNARMTHYQALLLDTDRVQFGPVVALNPATLLPLPEEGLQHNCLDILAEAHGTRPDLTDQPLPDADHTWYTDGSSLLQEGQRKAGAAVTTETEVIWAKALPAGTSAQRAELIALTQALKMAEGKKLNVYTDSRYAFATAHIHGEIYRRRGWLTSEGKEIKNKDEILALLKALFLPKRLSIIHCPGHQKGHSAEARGNRMADQAARKAAITETPDTSTLLIENSSPSGGSKRTADGSEFEAGKRTADGSEFEKRTADGSEFESPKKKAKVE

SEQ ID NO: 2638 - protein, 2116 aa, synthetic construct
MPAAKRVKLDGGDKKYSIGLDIGTNSVGWAVITDEYKVPSKKFKVLGNTDRHSIKKNLIGALLFDSGETAEATRLKRTARRRYTRRKNRICYLQEIFSNEMAKVDDSFFHRLEESFLVEEDKKHERHPIFGNIVDEVAYHEKYPTIYHLRKKLVDSTDKADLRLIYLALAHMIKFRGHFLIEGDLNPDNSDVDKLFIQLVQTYNQLFEENPINASGVDAKAILSARLSKSRRLENLIAQLPGEKKNGLFGNLIALSLGLTPNFKSNFDLAEDAKLQLSKDTYDDDLDNLLAQIGDQYADLFLAAKNLSDAILLSDILRVNTEITKAPLSASMIKRYDEHHQDLTLLKALVRQQLPEKYKEIFFDQSKNGYAGYIDGGASQEEFYKFIKPILEKMDGTEELLVKLNREDLLRKQRTFDNGSIPHQIHLGELHAILRRQEDFYPFLKDNREKIEKILTFRIPYYVGPLARGNSRFAWMTRKSEETITPWNFEEVVDKGASAQSFIERMTNFDKNLPNEKVLPKHSLLYEYFTVYNELTKVKYVTEGMRKPAFLSGEQKKAIVDLLFKTNRKVTVKQLKEDYFKKIECFDSVEISGVEDRFNASLGTYHDLLKIIKDKDFLDNEENEDILEDIVLTLTLFEDREMIEERLKTYAHLFDDKVMKQLKRRRYTGWGRLSRKLINGIRDKQSGKTILDFLKSDGFANRNFMQLIHDDSLTFKEDIQKAQVSGQGDSLHEHIANLAGSPAIKKGILQTVKVVDELVKVMGRHKPENIVIEMARENQTTQKGQKNSRERMKRIEEGIKELGSQILKEHPVENTQLQNEKLYLYYLQNGRDMYVDQELDINRLSDYDVDHIVPQSFLKDDSIDNKVLTRSDKARGKSDNVPSEEVVKKMKNYWRQLLNAKLITQRKFDNLTKAERGGLSELDKAGFIKRQLVETRQITKHVAQILDSRMNTKYDENDKLIREVKVITLKSKLVSDFRKDFQFYKVREINNYHHAHDAYLNAVVGTALIKKYPKLESEFVYGDYKVYDVRKMIAKSEQEIGKATAKYFFYSNIMNFFKTEITLANGEIRKRPLIETNGETGEIVWDKGRDFATVRKVLSMPQVNIVKKTEVQTGGFSKESILPKRNSDKLIARKKDWDPKKYGGFDSPTVAYSVLVVAKVEKGKSKKLKSVKELLGITIMERSSFEKNPIDFLEAKGYKEVKKDLIIKLPKYSLFELENGRKRMLASAGELQKGNELALPSKYVNFLYLASHYEKLKGSPEDNEQKQLFVEQHKHYLDEIIEQISEFSKRVILADANLDKVLSAYNKHRDKPIREQAENIIHLFTLTNLGAPAAFKYFDTTIDRKRYTSTKEVLDATLIHQSITGLYETRIDLSQLGGDGGGGGEAAAKGGSGGTLNIEDEYRLHETSKEPDVSLGSTWLSDFPQAWAETGGMGLAVRQAPLIIPLKATSTPVSIKQYPMSQEARLGIKPHIQRLLDQGILVPCQSPWNTPLLPVKKPGTNDYRPVQDLREVNKRVEDIHPTVPNPYNLLSGLPPSHQWYTVLDLKDAFFCLRLHPTSQPLFAFEWRDPEMGISGQLTWTRLPQGFKNSPTLFNEALHRDLADFRIQHPDLILLQYVDDLLLAATSELDCQQGTRALLQTLGNLGYRASAKKAQICQKQVKYLGYLLKEGQRWLTEARKETVMGQPTPKTPRQLREFLGKAGFCRLFIPGFAEMAAPLYPLTKPGTLFNWGPDQQKAYQEIKQALLTAPALGLPDLTKPFELFVDEKQGYAKGVLTQKLGPWRRPVAYLSKKLDPVAAGWPPCLRMVAAIAVLTKDAGKLTMGQPLVILAPHAVEALVKQPPDRWLSNARMTHYQALLLDTDRVQFGPVVALNPATLLPLPEEGLQHNCLDILAEAHGTRPDLTDQPLPDADHTWYTDGSSLLQEGQRKAGAAVTTETEVIWAKALPAGTSAQRAELIALTQALKMAEGKKLNVYTDSRYAFATAHIHGEIYRRRGWLTSEGKEIKNKDEILALLKALFLPKRLSIIHCPGHQKGHSAEARGNRMADQAARKAAITETPDTSTLLIENSSPSGGSKRTADGSEFEAGKRTADGSEFEKRTADGSEFESPKKKAKVE

SEQ ID NO: 2639 - protein, 2115 aa, synthetic construct
MPAAKRVKLDGGDKKYSIGLDIGTNSVGWAVITDEYKVPSKKFKVLGNTDRHSIKKNLIGALLFDSGETAEATRLKRTARRRYTRRKNRICYLQEIFSNEMAKVDDSFFHRLEESFLVEEDKKHERHPIFGNIVDEVAYHEKYPTIYHLRKKLVDSTDKADLRLIYLALAHMIKFRGHFLIEGDLNPDNSDVDKLFIQLVQTYNQLFEENPINASGVDAKAILSARLSKSRRLENLIAQLPGEKKNGLFGNLIALSLGLTPNFKSNFDLAEDAKLQLSKDTYDDDLDNLLAQIGDQYADLFLAAKNLSDAILLSDILRVNTEITKAPLSASMIKRYDEHHQDLTLLKALVRQQLPEKYKEIFFDQSKNGYAGYIDGGASQEEFYKFIKPILEKMDGTEELLVKLNREDLLRKQRTFDNGSIPHQIHLGELHAILRRQEDFYPFLKDNREKIEKILTFRIPYYVGPLARGNSRFAWMTRKSEETITPWNFEEVVDKGASAQSFIERMTNFDKNLPNEKVLPKHSLLYEYFTVYNELTKVKYVTEGMRKPAFLSGEQKKAIVDLLFKTNRKVTVKQLKEDYFKKIECFDSVEISGVEDRFNASLGTYHDLLKIIKDKDFLDNEENEDILEDIVLTLTLFEDREMIEERLKTYAHLFDDKVMKQLKRRRYTGWGRLSRKLINGIRDKQSGKTILDFLKSDGFANRNFMQLIHDDSLTFKEDIQKAQVSGQGDSLHEHIANLAGSPAIKKGILQTVKVVDELVKVMGRHKPENIVIEMARENQTTQKGQKNSRERMKRIEEGIKELGSQILKEHPVENTQLQNEKLYLYYLQNGRDMYVDQELDINRLSDYDVDHIVPQSFLKDDSIDNKVLTRSDKARGKSDNVPSEEVVKKMKNYWRQLLNAKLITQRKFDNLTKAERGGLSELDKAGFIKRQLVETRQITKHVAQILDSRMNTKYDENDKLIREVKVITLKSKLVSDFRKDFQFYKVREINNYHHAHDAYLNAVVGTALIKKYPKLESEFVYGDYKVYDVRKMIAKSEQEIGKATAKYFFYSNIMNFFKTEITLANGEIRKRPLIETNGETGEIVWDKGRDFATVRKVLSMPQVNIVKKTEVQTGGFSKESILPKRNSDKLIARKKDWDPKKYGGFDSPTVAYSVLVVAKVEKGKSKKLKSVKELLGITIMERSSFEKNPIDFLEAKGYKEVKKDLIIKLPKYSLFELENGRKRMLASAGELQKGNELALPSKYVNFLYLASHYEKLKGSPEDNEQKQLFVEQHKHYLDEIIEQISEFSKRVILADANLDKVLSAYNKHRDKPIREQAENIIHLFTLTNLGAPAAFKYFDTTIDRKRYTSTKEVLDATLIHQSITGLYETRIDLSQLGGDGGGGGGSGGGGSGGTLNIEDEYRLHETSKEPDVSLGSTWLSDFPQAWAETGGMGLAVRQAPLIIPLKATSTPVSIKQYPMSQEARLGIKPHIQRLLDQGILVPCQSPWNTPLLPVKKPGTNDYRPVQDLREVNKRVEDIHPTVPNPYNLLSGLPPSHQWYTVLDLKDAFFCLRLHPTSQPLFAFEWRDPEMGISGQLTWTRLPQGFKNSPTLFNEALHRDLADFRIQHPDLILLQYVDDLLLAATSELDCQQGTRALLQTLGNLGYRASAKKAQICQKQVKYLGYLLKEGQRWLTEARKETVMGQPTPKTPRQLREFLGKAGFCRLFIPGFAEMAAPLYPLTKPGTLFNWGPDQQKAYQEIKQALLTAPALGLPDLTKPFELFVDEKQGYAKGVLTQKLGPWRRPVAYLSKKLDPVAAGWPPCLRMVAAIAVLTKDAGKLTMGQPLVILAPHAVEALVKQPPDRWLSNARMTHYQALLLDTDRVQFGPVVALNPATLLPLPEEGLQHNCLDILAEAHGTRPDLTDQPLPDADHTWYTDGSSLLQEGQRKAGAAVTTETEVIWAKALPAGTSAQRAELIALTQALKMAEGKKLNVYTDSRYAFATAHIHGEIYRRRGWLTSEGKEIKNKDEILALLKALFLPKRLSIIHCPGHQKGHSAEARGNRMADQAARKAAITETPDTSTLLIENSSPSGGSKRTADGSEFEAGKRTADGSEFEKRTADGSEFESPKKKAKVE

SEQ ID NO: 2640 - protein, 2116 aa, synthetic construct
MPAAKRVKLDGGDKKYSIGLDIGTNSVGWAVITDEYKVPSKKFKVLGNTDRHSIKKNLIGALLFDSGETAEATRLKRTARRRYTRRKNRICYLQEIFSNEMAKVDDSFFHRLEESFLVEEDKKHERHPIFGNIVDEVAYHEKYPTIYHLRKKLVDSTDKADLRLIYLALAHMIKFRGHFLIEGDLNPDNSDVDKLFIQLVQTYNQLFEENPINASGVDAKAILSARLSKSRRLENLIAQLPGEKKNGLFGNLIALSLGLTPNFKSNFDLAEDAKLQLSKDTYDDDLDNLLAQIGDQYADLFLAAKNLSDAILLSDILRVNTEITKAPLSASMIKRYDEHHQDLTLLKALVRQQLPEKYKEIFFDQSKNGYAGYIDGGASQEEFYKFIKPILEKMDGTEELLVKLNREDLLRKQRTFDNGSIPHQIHLGELHAILRRQEDFYPFLKDNREKIEKILTFRIPYYVGPLARGNSRFAWMTRKSEETITPWNFEEVVDKGASAQSFIERMTNFDKNLPNEKVLPKHSLLYEYFTVYNELTKVKYVTEGMRKPAFLSGEQKKAIVDLLFKTNRKVTVKQLKEDYFKKIECFDSVEISGVEDRFNASLGTYHDLLKIIKDKDFLDNEENEDILEDIVLTLTLFEDREMIEERLKTYAHLFDDKVMKQLKRRRYTGWGRLSRKLINGIRDKQSGKTILDFLKSDGFANRNFMQLIHDDSLTFKEDIQKAQVSGQGDSLHEHIANLAGSPAIKKGILQTVKVVDELVKVMGRHKPENIVIEMARENQTTQKGQKNSRERMKRIEEGIKELGSQILKEHPVENTQLQNEKLYLYYLQNGRDMYVDQELDINRLSDYDVDHIVPQSFLKDDSIDNKVLTRSDKARGKSDNVPSEEVVKKMKNYWRQLLNAKLITQRKFDNLTKAERGGLSELDKAGFIKRQLVETRQITKHVAQILDSRMNTKYDENDKLIREVKVITLKSKLVSDFRKDFQFYKVREINNYHHAHDAYLNAVVGTALIKKYPKLESEFVYGDYKVYDVRKMIAKSEQEIGKATAKYFFYSNIMNFFKTEITLANGEIRKRPLIETNGETGEIVWDKGRDFATVRKVLSMPQVNIVKKTEVQTGGFSKESILPKRNSDKLIARKKDWDPKKYGGFDSPTVAYSVLVVAKVEKGKSKKLKSVKELLGITIMERSSFEKNPIDFLEAKGYKEVKKDLIIKLPKYSLFELENGRKRMLASAGELQKGNELALPSKYVNFLYLASHYEKLKGSPEDNEQKQLFVEQHKHYLDEIIEQISEFSKRVILADANLDKVLSAYNKHRDKPIREQAENIIHLFTLTNLGAPAAFKYFDTTIDRKRYTSTKEVLDATLIHQSITGLYETRIDLSQLGGDGGPAPGGSEAAAKGGTLNIEDEYRLHETSKEPDVSLGSTWLSDFPQAWAETGGMGLAVRQAPLIIPLKATSTPVSIKQYPMSQEARLGIKPHIQRLLDQGILVPCQSPWNTPLLPVKKPGTNDYRPVQDLREVNKRVEDIHPTVPNPYNLLSGLPPSHQWYTVLDLKDAFFCLRLHPTSQPLFAFEWRDPEMGISGQLTWTRLPQGFKNSPTLFNEALHRDLADFRIQHPDLILLQYVDDLLLAATSELDCQQGTRALLQTLGNLGYRASAKKAQICQKQVKYLGYLLKEGQRWLTEARKETVMGQPTPKTPRQLREFLGKAGFCRLFIPGFAEMAAPLYPLTKPGTLFNWGPDQQKAYQEIKQALLTAPALGLPDLTKPFELFVDEKQGYAKGVLTQKLGPWRRPVAYLSKKLDPVAAGWPPCLRMVAAIAVLTKDAGKLTMGQPLVILAPHAVEALVKQPPDRWLSNARMTHYQALLLDTDRVQFGPVVALNPATLLPLPEEGLQHNCLDILAEAHGTRPDLTDQPLPDADHTWYTDGSSLLQEGQRKAGAAVTTETEVIWAKALPAGTSAQRAELIALTQALKMAEGKKLNVYTDSRYAFATAHIHGEIYRRRGWLTSEGKEIKNKDEILALLKALFLPKRLSIIHCPGHQKGHSAEARGNRMADQAARKAAITETPDTSTLLIENSSPSGGSKRTADGSEFEAGKRTADGSEFEKRTADGSEFESPKKKAKVE

SEQ ID NO: 2641 - protein, 2116 aa, synthetic construct
MPAAKRVKLDGGDKKYSIGLDIGTNSVGWAVITDEYKVPSKKFKVLGNTDRHSIKKNLIGALLFDSGETAEATRLKRTARRRYTRRKNRICYLQEIFSNEMAKVDDSFFHRLEESFLVEEDKKHERHPIFGNIVDEVAYHEKYPTIYHLRKKLVDSTDKADLRLIYLALAHMIKFRGHFLIEGDLNPDNSDVDKLFIQLVQTYNQLFEENPINASGVDAKAILSARLSKSRRLENLIAQLPGEKKNGLFGNLIALSLGLTPNFKSNFDLAEDAKLQLSKDTYDDDLDNLLAQIGDQYADLFLAAKNLSDAILLSDILRVNTEITKAPLSASMIKRYDEHHQDLTLLKALVRQQLPEKYKEIFFDQSKNGYAGYIDGGASQEEFYKFIKPILEKMDGTEELLVKLNREDLLRKQRTFDNGSIPHQIHLGELHAILRRQEDFYPFLKDNREKIEKILTFRIPYYVGPLARGNSRFAWMTRKSEETITPWNFEEVVDKGASAQSFIERMTNFDKNLPNEKVLPKHSLLYEYFTVYNELTKVKYVTEGMRKPAFLSGEQKKAIVDLLFKTNRKVTVKQLKEDYFKKIECFDSVEISGVEDRFNASLGTYHDLLKIIKDKDFLDNEENEDILEDIVLTLTLFEDREMIEERLKTYAHLFDDKVMKQLKRRRYTGWGRLSRKLINGIRDKQSGKTILDFLKSDGFANRNFMQLIHDDSLTFKEDIQKAQVSGQGDSLHEHIANLAGSPAIKKGILQTVKVVDELVKVMGRHKPENIVIEMARENQTTQKGQKNSRERMKRIEEGIKELGSQILKEHPVENTQLQNEKLYLYYLQNGRDMYVDQELDINRLSDYDVDHIVPQSFLKDDSIDNKVLTRSDKARGKSDNVPSEEVVKKMKNYWRQLLNAKLITQRKFDNLTKAERGGLSELDKAGFIKRQLVETRQITKHVAQILDSRMNTKYDENDKLIREVKVITLKSKLVSDFRKDFQFYKVREINNYHHAHDAYLNAVVGTALIKKYPKLESEFVYGDYKVYDVRKMIAKSEQEIGKATAKYFFYSNIMNFFKTEITLANGEIRKRPLIETNGETGEIVWDKGRDFATVRKVLSMPQVNIVKKTEVQTGGFSKESILPKRNSDKLIARKKDWDPKKYGGFDSPTVAYSVLVVAKVEKGKSKKLKSVKELLGITIMERSSFEKNPIDFLEAKGYKEVKKDLIIKLPKYSLFELENGRKRMLASAGELQKGNELALPSKYVNFLYLASHYEKLKGSPEDNEQKQLFVEQHKHYLDEIIEQISEFSKRVILADANLDKVLSAYNKHRDKPIREQAENIIHLFTLTNLGAPAAFKYFDTTIDRKRYTSTKEVLDATLIHQSITGLYETRIDLSQLGGDGGGSSEAAAKPAPGGTLNIEDEYRLHETSKEPDVSLGSTWLSDFPQAWAETGGMGLAVRQAPLIIPLKATSTPVSIKQYPMSQEARLGIKPHIQRLLDQGILVPCQSPWNTPLLPVKKPGTNDYRPVQDLREVNKRVEDIHPTVPNPYNLLSGLPPSHQWYTVLDLKDAFFCLRLHPTSQPLFAFEWRDPEMGISGQLTWTRLPQGFKNSPTLFNEALHRDLADFRIQHPDLILLQYVDDLLLAATSELDCQQGTRALLQTLGNLGYRASAKKAQICQKQVKYLGYLLKEGQRWLTEARKETVMGQPTPKTPRQLREFLGKAGFCRLFIPGFAEMAAPLYPLTKPGTLFNWGPDQQKAYQEIKQALLTAPALGLPDLTKPFELFVDEKQGYAKGVLTQKLGPWRRPVAYLSKKLDPVAAGWPPCLRMVAAIAVLTKDAGKLTMGQPLVILAPHAVEALVKQPPDRWLSNARMTHYQALLLDTDRVQFGPVVALNPATLLPLPEEGLQHNCLDILAEAHGTRPDLTDQPLPDADHTWYTDGSSLLQEGQRKAGAAVTTETEVIWAKALPAGTSAQRAELIALTQALKMAEGKKLNVYTDSRYAFATAHIHGEIYRRRGWLTSEGKEIKNKDEILALLKALFLPKRLSIIHCPGHQKGHSAEARGNRMADQAARKAAITETPDTSTLLIENSSPSGGSKRTADGSEFEAGKRTADGSEFEKRTADGSEFESPKKKAKVE

SEQ ID NO: 2642 - protein, 2111 aa, synthetic construct
MPAAKRVKLDGGDKKYSIGLDIGTNSVGWAVITDEYKVPSKKFKVLGNTDRHSIKKNLIGALLFDSGETAEATRLKRTARRRYTRRKNRICYLQEIFSNEMAKVDDSFFHRLEESFLVEEDKKHERHPIFGNIVDEVAYHEKYPTIYHLRKKLVDSTDKADLRLIYLALAHMIKFRGHFLIEGDLNPDNSDVDKLFIQLVQTYNQLFEENPINASGVDAKAILSARLSKSRRLENLIAQLPGEKKNGLFGNLIALSLGLTPNFKSNFDLAEDAKLQLSKDTYDDDLDNLLAQIGDQYADLFLAAKNLSDAILLSDILRVNTEITKAPLSASMIKRYDEHHQDLTLLKALVRQQLPEKYKEIFFDQSKNGYAGYIDGGASQEEFYKFIKPILEKMDGTEELLVKLNREDLLRKQRTFDNGSIPHQIHLGELHAILRRQEDFYPFLKDNREKIEKILTFRIPYYVGPLARGNSRFAWMTRKSEETITPWNFEEVVDKGASAQSFIERMTNFDKNLPNEKVLPKHSLLYEYFTVYNELTKVKYVTEGMRKPAFLSGEQKKAIVDLLFKTNRKVTVKQLKEDYFKKIECFDSVEISGVEDRFNASLGTYHDLLKIIKDKDFLDNEENEDILEDIVLTLTLFEDREMIEERLKTYAHLFDDKVMKQLKRRRYTGWGRLSRKLINGIRDKQSGKTILDFLKSDGFANRNFMQLIHDDSLTFKEDIQKAQVSGQGDSLHEHIANLAGSPAIKKGILQTVKVVDELVKVMGRHKPENIVIEMARENQTTQKGQKNSRERMKRIEEGIKELGSQILKEHPVENTQLQNEKLYLYYLQNGRDMYVDQELDINRLSDYDVDHIVPQSFLKDDSIDNKVLTRSDKARGKSDNVPSEEVVKKMKNYWRQLLNAKLITQRKFDNLTKAERGGLSELDKAGFIKRQLVETRQITKHVAQILDSRMNTKYDENDKLIREVKVITLKSKLVSDFRKDFQFYKVREINNYHHAHDAYLNAVVGTALIKKYPKLESEFVYGDYKVYDVRKMIAKSEQEIGKATAKYFFYSNIMNFFKTEITLANGEIRKRPLIETNGETGEIVWDKGRDFATVRKVLSMPQVNIVKKTEVQTGGFSKESILPKRNSDKLIARKKDWDPKKYGGFDSPTVAYSVLVVAKVEKGKSKKLKSVKELLGITIMERSSFEKNPIDFLEAKGYKEVKKDLIIKLPKYSLFELENGRKRMLASAGELQKGNELALPSKYVNFLYLASHYEKLKGSPEDNEQKQLFVEQHKHYLDEIIEQISEFSKRVILADANLDKVLSAYNKHRDKPIREQAENIIHLFTLTNLGAPAAFKYFDTTIDRKRYTSTKEVLDATLIHQSITGLYETRIDLSQLGGDGGGGGGGGGGTLNIEDEYRLHETSKEPDVSLGSTWLSDFPQAWAETGGMGLAVRQAPLIIPLKATSTPVSIKQYPMSQEARLGIKPHIQRLLDQGILVPCQSPWNTPLLPVKKPGTNDYRPVQDLREVNKRVEDIHPTVPNPYNLLSGLPPSHQWYTVLDLKDAFFCLRLHPTSQPLFAFEWRDPEMGISGQLTWTRLPQGFKNSPTLFNEALHRDLADFRIQHPDLILLQYVDDLLLAATSELDCQQGTRALLQTLGNLGYRASAKKAQICQKQVKYLGYLLKEGQRWLTEARKETVMGQPTPKTPRQLREFLGKAGFCRLFIPGFAEMAAPLYPLTKPGTLFNWGPDQQKAYQEIKQALLTAPALGLPDLTKPFELFVDEKQGYAKGVLTQKLGPWRRPVAYLSKKLDPVAAGWPPCLRMVAAIAVLTKDAGKLTMGQPLVILAPHAVEALVKQPPDRWLSNARMTHYQALLLDTDRVQFGPVVALNPATLLPLPEEGLQHNCLDILAEAHGTRPDLTDQPLPDADHTWYTDGSSLLQEGQRKAGAAVTTETEVIWAKALPAGTSAQRAELIALTQALKMAEGKKLNVYTDSRYAFATAHIHGEIYRRRGWLTSEGKEIKNKDEILALLKALFLPKRLSIIHCPGHQKGHSAEARGNRMADQAARKAAITETPDTSTLLIENSSPSGGSKRTADGSEFEAGKRTADGSEFEKRTADGSEFESPKKKAKVE

SEQ ID NO: 2643 - protein, 2111 aa, synthetic construct
MPAAKRVKLDGGDKKYSIGLDIGTNSVGWAVITDEYKVPSKKFKVLGNTDRHSIKKNLIGALLFDSGETAEATRLKRTARRRYTRRKNRICYLQEIFSNEMAKVDDSFFHRLEESFLVEEDKKHERHPIFGNIVDEVAYHEKYPTIYHLRKKLVDSTDKADLRLIYLALAHMIKFRGHFLIEGDLNPDNSDVDKLFIQLVQTYNQLFEENPINASGVDAKAILSARLSKSRRLENLIAQLPGEKKNGLFGNLIALSLGLTPNFKSNFDLAEDAKLQLSKDTYDDDLDNLLAQIGDQYADLFLAAKNLSDAILLSDILRVNTEITKAPLSASMIKRYDEHHQDLTLLKALVRQQLPEKYKEIFFDQSKNGYAGYIDGGASQEEFYKFIKPILEKMDGTEELLVKLNREDLLRKQRTFDNGSIPHQIHLGELHAILRRQEDFYPFLKDNREKIEKILTFRIPYYVGPLARGNSRFAWMTRKSEETITPWNFEEVVDKGASAQSFIERMTNFDKNLPNEKVLPKHSLLYEYFTVYNELTKVKYVTEGMRKPAFLSGEQKKAIVDLLFKTNRKVTVKQLKEDYFKKIECFDSVEISGVEDRFNASLGTYHDLLKIIKDKDFLDNEENEDILEDIVLTLTLFEDREMIEERLKTYAHLFDDKVMKQLKRRRYTGWGRLSRKLINGIRDKQSGKTILDFLKSDGFANRNFMQLIHDDSLTFKEDIQKAQVSGQGDSLHEHIANLAGSPAIKKGILQTVKVVDELVKVMGRHKPENIVIEMARENQTTQKGQKNSRERMKRIEEGIKELGSQILKEHPVENTQLQNEKLYLYYLQNGRDMYVDQELDINRLSDYDVDHIVPQSFLKDDSIDNKVLTRSDKARGKSDNVPSEEVVKKMKNYWRQLLNAKLITQRKFDNLTKAERGGLSELDKAGFIKRQLVETRQITKHVAQILDSRMNTKYDENDKLIREVKVITLKSKLVSDFRKDFQFYKVREINNYHHAHDAYLNAVVGTALIKKYPKLESEFVYGDYKVYDVRKMIAKSEQEIGKATAKYFFYSNIMNFFKTEITLANGEIRKRPLIETNGETGEIVWDKGRDFATVRKVLSMPQVNIVKKTEVQTGGFSKESILPKRNSDKLIARKKDWDPKKYGGFDSPTVAYSVLVVAKVEKGKSKKLKSVKELLGITIMERSSFEKNPIDFLEAKGYKEVKKDLIIKLPKYSLFELENGRKRMLASAGELQKGNELALPSKYVNFLYLASHYEKLKGSPEDNEQKQLFVEQHKHYLDEIIEQISEFSKRVILADANLDKVLSAYNKHRDKPIREQAENIIHLFTLTNLGAPAAFKYFDTTIDRKRYTSTKEVLDATLIHQSITGLYETRIDLSQLGGDGGPAPGGSGGTLNIEDEYRLHETSKEPDVSLGSTWLSDFPQAWAETGGMGLAVRQAPLIIPLKATSTPVSIKQYPMSQEARLGIKPHIQRLLDQGILVPCQSPWNTPLLPVKKPGTNDYRPVQDLREVNKRVEDIHPTVPNPYNLLSGLPPSHQWYTVLDLKDAFFCLRLHPTSQPLFAFEWRDPEMGISGQLTWTRLPQGFKNSPTLFNEALHRDLADFRIQHPDLILLQYVDDLLLAATSELDCQQGTRALLQTLGNLGYRASAKKAQICQKQVKYLGYLLKEGQRWLTEARKETVMGQPTPKTPRQLREFLGKAGFCRLFIPGFAEMAAPLYPLTKPGTLFNWGPDQQKAYQEIKQALLTAPALGLPDLTKPFELFVDEKQGYAKGVLTQKLGPWRRPVAYLSKKLDPVAAGWPPCLRMVAAIAVLTKDAGKLTMGQPLVILAPHAVEALVKQPPDRWLSNARMTHYQALLLDTDRVQFGPVVALNPATLLPLPEEGLQHNCLDILAEAHGTRPDLTDQPLPDADHTWYTDGSSLLQEGQRKAGAAVTTETEVIWAKALPAGTSAQRAELIALTQALKMAEGKKLNVYTDSRYAFATAHIHGEIYRRRGWLTSEGKEIKNKDEILALLKALFLPKRLSIIHCPGHQKGHSAEARGNRMADQAARKAAITETPDTSTLLIENSSPSGGSKRTADGSEFEAGKRTADGSEFEKRTADGSEFESPKKKAKVE

SEQ ID NO: 2644 - protein, 2135 aa, synthetic construct
MPAAKRVKLDGGDKKYSIGLDIGTNSVGWAVITDEYKVPSKKFKVLGNTDRHSIKKNLIGALLFDSGETAEATRLKRTARRRYTRRKNRICYLQEIFSNEMAKVDDSFFHRLEESFLVEEDKKHERHPIFGNIVDEVAYHEKYPTIYHLRKKLVDSTDKADLRLIYLALAHMIKFRGHFLIEGDLNPDNSDVDKLFIQLVQTYNQLFEENPINASGVDAKAILSARLSKSRRLENLIAQLPGEKKNGLFGNLIALSLGLTPNFKSNFDLAEDAKLQLSKDTYDDDLDNLLAQIGDQYADLFLAAKNLSDAILLSDILRVNTEITKAPLSASMIKRYDEHHQDLTLLKALVRQQLPEKYKEIFFDQSKNGYAGYIDGGASQEEFYKFIKPILEKMDGTEELLVKLNREDLLRKQRTFDNGSIPHQIHLGELHAILRRQEDFYPFLKDNREKIEKILTFRIPYYVGPLARGNSRFAWMTRKSEETITPWNFEEVVDKGASAQSFIERMTNFDKNLPNEKVLPKHSLLYEYFTVYNELTKVKYVTEGMRKPAFLSGEQKKAIVDLLFKTNRKVTVKQLKEDYFKKIECFDSVEISGVEDRFNASLGTYHDLLKIIKDKDFLDNEENEDILEDIVLTLTLFEDREMIEERLKTYAHLFDDKVMKQLKRRRYTGWGRLSRKLINGIRDKQSGKTILDFLKSDGFANRNFMQLIHDDSLTFKEDIQKAQVSGQGDSLHEHIANLAGSPAIKKGILQTVKVVDELVKVMGRHKPENIVIEMARENQTTQKGQKNSRERMKRIEEGIKELGSQILKEHPVENTQLQNEKLYLYYLQNGRDMYVDQELDINRLSDYDVDHIVPQSFLKDDSIDNKVLTRSDKARGKSDNVPSEEVVKKMKNYWRQLLNAKLITQRKFDNLTKAERGGLSELDKAGFIKRQLVETRQITKHVAQILDSRMNTKYDENDKLIREVKVITLKSKLVSDFRKDFQFYKVREINNYHHAHDAYLNAVVGTALIKKYPKLESEFVYGDYKVYDVRKMIAKSEQEIGKATAKYFFYSNIMNFFKTEITLANGEIRKRPLIETNGETGEIVWDKGRDFATVRKVLSMPQVNIVKKTEVQTGGFSKESILPKRNSDKLIARKKDWDPKKYGGFDSPTVAYSVLVVAKVEKGKSKKLKSVKELLGITIMERSSFEKNPIDFLEAKGYKEVKKDLIIKLPKYSLFELENGRKRMLASAGELQKGNELALPSKYVNFLYLASHYEKLKGSPEDNEQKQLFVEQHKHYLDEIIEQISEFSKRVILADANLDKVLSAYNKHRDKPIREQAENIIHLFTLTNLGAPAAFKYFDTTIDRKRYTSTKEVLDATLIHQSITGLYETRIDLSQLGGDGGGGGGSGGGGSGGGGSGGGGSGGGGSGGGGSGGTLNIEDEYRLHETSKEPDVSLGSTWLSDFPQAWAETGGMGLAVRQAPLIIPLKATSTPVSIKQYPMSQEARLGIKPHIQRLLDQGILVPCQSPWNTPLLPVKKPGTNDYRPVQDLREVNKRVEDIHPTVPNPYNLLSGLPPSHQWYTVLDLKDAFFCLRLHPTSQPLFAFEWRDPEMGISGQLTWTRLPQGFKNSPTLFNEALHRDLADFRIQHPDLILLQYVDDLLLAATSELDCQQGTRALLQTLGNLGYRASAKKAQICQKQVKYLGYLLKEGQRWLTEARKETVMGQPTPKTPRQLREFLGKAGFCRLFIPGFAEMAAPLYPLTKPGTLFNWGPDQQKAYQEIKQALLTAPALGLPDLTKPFELFVDEKQGYAKGVLTQKLGPWRRPVAYLSKKLDPVAAGWPPCLRMVAAIAVLTKDAGKLTMGQPLVILAPHAVEALVKQPPDRWLSNARMTHYQALLLDTDRVQFGPVVALNPATLLPLPEEGLQHNCLDILAEAHGTRPDLTDQPLPDADHTWYTDGSSLLQEGQRKAGAAVTTETEVIWAKALPAGTSAQRAELIALTQALKMAEGKKLNVYTDSRYAFATAHIHGEIYRRRGWLTSEGKEIKNKDEILALLKALFLPKRLSIIHCPGHQKGHSAEARGNRMADQAARKAAITETPDTSTLLIENSSPSGGSKRTADGSEFEAGKRTADGSEFEKRTADGSEFESPKKKAKVE

SEQ ID NO: 2645 - protein, 2116 aa, synthetic construct
MPAAKRVKLDGGDKKYSIGLDIGTNSVGWAVITDEYKVPSKKFKVLGNTDRHSIKKNLIGALLFDSGETAEATRLKRTARRRYTRRKNRICYLQEIFSNEMAKVDDSFFHRLEESFLVEEDKKHERHPIFGNIVDEVAYHEKYPTIYHLRKKLVDSTDKADLRLIYLALAHMIKFRGHFLIEGDLNPDNSDVDKLFIQLVQTYNQLFEENPINASGVDAKAILSARLSKSRRLENLIAQLPGEKKNGLFGNLIALSLGLTPNFKSNFDLAEDAKLQLSKDTYDDDLDNLLAQIGDQYADLFLAAKNLSDAILLSDILRVNTEITKAPLSASMIKRYDEHHQDLTLLKALVRQQLPEKYKEIFFDQSKNGYAGYIDGGASQEEFYKFIKPILEKMDGTEELLVKLNREDLLRKQRTFDNGSIPHQIHLGELHAILRRQEDFYPFLKDNREKIEKILTFRIPYYVGPLARGNSRFAWMTRKSEETITPWNFEEVVDKGASAQSFIERMTNFDKNLPNEKVLPKHSLLYEYFTVYNELTKVKYVTEGMRKPAFLSGEQKKAIVDLLFKTNRKVTVKQLKEDYFKKIECFDSVEISGVEDRFNASLGTYHDLLKIIKDKDFLDNEENEDILEDIVLTLTLFEDREMIEERLKTYAHLFDDKVMKQLKRRRYTGWGRLSRKLINGIRDKQSGKTILDFLKSDGFANRNFMQLIHDDSLTFKEDIQKAQVSGQGDSLHEHIANLAGSPAIKKGILQTVKVVDELVKVMGRHKPENIVIEMARENQTTQKGQKNSRERMKRIEEGIKELGSQILKEHPVENTQLQNEKLYLYYLQNGRDMYVDQELDINRLSDYDVDHIVPQSFLKDDSIDNKVLTRSDKARGKSDNVPSEEVVKKMKNYWRQLLNAKLITQRKFDNLTKAERGGLSELDKAGFIKRQLVETRQITKHVAQILDSRMNTKYDENDKLIREVKVITLKSKLVSDFRKDFQFYKVREINNYHHAHDAYLNAVVGTALIKKYPKLESEFVYGDYKVYDVRKMIAKSEQEIGKATAKYFFYSNIMNFFKTEITLANGEIRKRPLIETNGETGEIVWDKGRDFATVRKVLSMPQVNIVKKTEVQTGGFSKESILPKRNSDKLIARKKDWDPKKYGGFDSPTVAYSVLVVAKVEKGKSKKLKSVKELLGITIMERSSFEKNPIDFLEAKGYKEVKKDLIIKLPKYSLFELENGRKRMLASAGELQKGNELALPSKYVNFLYLASHYEKLKGSPEDNEQKQLFVEQHKHYLDEIIEQISEFSKRVILADANLDKVLSAYNKHRDKPIREQAENIIHLFTLTNLGAPAAFKYFDTTIDRKRYTSTKEVLDATLIHQSITGLYETRIDLSQLGGDGGPAPEAAAKGSSGGTLNIEDEYRLHETSKEPDVSLGSTWLSDFPQAWAETGGMGLAVRQAPLIIPLKATSTPVSIKQYPMSQEARLGIKPHIQRLLDQGILVPCQSPWNTPLLPVKKPGTNDYRPVQDLREVNKRVEDIHPTVPNPYNLLSGLPPSHQWYTVLDLKDAFFCLRLHPTSQPLFAFEWRDPEMGISGQLTWTRLPQGFKNSPTLFNEALHRDLADFRIQHPDLILLQYVDDLLLAATSELDCQQGTRALLQTLGNLGYRASAKKAQICQKQVKYLGYLLKEGQRWLTEARKETVMGQPTPKTPRQLREFLGKAGFCRLFIPGFAEMAAPLYPLTKPGTLFNWGPDQQKAYQEIKQALLTAPALGLPDLTKPFELFVDEKQGYAKGVLTQKLGPWRRPVAYLSKKLDPVAAGWPPCLRMVAAIAVLTKDAGKLTMGQPLVILAPHAVEALVKQPPDRWLSNARMTHYQALLLDTDRVQFGPVVALNPATLLPLPEEGLQHNCLDILAEAHGTRPDLTDQPLPDADHTWYTDGSSLLQEGQRKAGAAVTTETEVIWAKALPAGTSAQRAELIALTQALKMAEGKKLNVYTDSRYAFATAHIHGEIYRRRGWLTSEGKEIKNKDEILALLKALFLPKRLSIIHCPGHQKGHSAEARGNRMADQAARKAAITETPDTSTLLIENSSPSGGSKRTADGSEFEAGKRTADGSEFEKRTADGSEFESPKKKAKVE

SEQ ID NO: 2646 - protein, 2108 aa, synthetic construct
MPAAKRVKLDGGDKKYSIGLDIGTNSVGWAVITDEYKVPSKKFKVLGNTDRHSIKKNLIGALLFDSGETAEATRLKRTARRRYTRRKNRICYLQEIFSNEMAKVDDSFFHRLEESFLVEEDKKHERHPIFGNIVDEVAYHEKYPTIYHLRKKLVDSTDKADLRLIYLALAHMIKFRGHFLIEGDLNPDNSDVDKLFIQLVQTYNQLFEENPINASGVDAKAILSARLSKSRRLENLIAQLPGEKKNGLFGNLIALSLGLTPNFKSNFDLAEDAKLQLSKDTYDDDLDNLLAQIGDQYADLFLAAKNLSDAILLSDILRVNTEITKAPLSASMIKRYDEHHQDLTLLKALVRQQLPEKYKEIFFDQSKNGYAGYIDGGASQEEFYKFIKPILEKMDGTEELLVKLNREDLLRKQRTFDNGSIPHQIHLGELHAILRRQEDFYPFLKDNREKIEKILTFRIPYYVGPLARGNSRFAWMTRKSEETITPWNFEEVVDKGASAQSFIERMTNFDKNLPNEKVLPKHSLLYEYFTVYNELTKVKYVTEGMRKPAFLSGEQKKAIVDLLFKTNRKVTVKQLKEDYFKKIECFDSVEISGVEDRFNASLGTYHDLLKIIKDKDFLDNEENEDILEDIVLTLTLFEDREMIEERLKTYAHLFDDKVMKQLKRRRYTGWGRLSRKLINGIRDKQSGKTILDFLKSDGFANRNFMQLIHDDSLTFKEDIQKAQVSGQGDSLHEHIANLAGSPAIKKGILQTVKVVDELVKVMGRHKPENIVIEMARENQTTQKGQKNSRERMKRIEEGIKELGSQILKEHPVENTQLQNEKLYLYYLQNGRDMYVDQELDINRLSDYDVDHIVPQSFLKDDSIDNKVLTRSDKARGKSDNVPSEEVVKKMKNYWRQLLNAKLITQRKFDNLTKAERGGLSELDKAGFIKRQLVETRQITKHVAQILDSRMNTKYDENDKLIREVKVITLKSKLVSDFRKDFQFYKVREINNYHHAHDAYLNAVVGTALIKKYPKLESEFVYGDYKVYDVRKMIAKSEQEIGKATAKYFFYSNIMNFFKTEITLANGEIRKRPLIETNGETGEIVWDKGRDFATVRKVLSMPQVNIVKKTEVQTGGFSKESILPKRNSDKLIARKKDWDPKKYGGFDSPTVAYSVLVVAKVEKGKSKKLKSVKELLGITIMERSSFEKNPIDFLEAKGYKEVKKDLIIKLPKYSLFELENGRKRMLASAGELQKGNELALPSKYVNFLYLASHYEKLKGSPEDNEQKQLFVEQHKHYLDEIIEQISEFSKRVILADANLDKVLSAYNKHRDKPIREQAENIIHLFTLTNLGAPAAFKYFDTTIDRKRYTSTKEVLDATLIHQSITGLYETRIDLSQLGGDGGGGGGGTLNIEDEYRLHETSKEPDVSLGSTWLSDFPQAWAETGGMGLAVRQAPLIIPLKATSTPVSIKQYPMSQEARLGIKPHIQRLLDQGILVPCQSPWNTPLLPVKKPGTNDYRPVQDLREVNKRVEDIHPTVPNPYNLLSGLPPSHQWYTVLDLKDAFFCLRLHPTSQPLFAFEWRDPEMGISGQLTWTRLPQGFKNSPTLFNEALHRDLADFRIQHPDLILLQYVDDLLLAATSELDCQQGTRALLQTLGNLGYRASAKKAQICQKQVKYLGYLLKEGQRWLTEARKETVMGQPTPKTPRQLREFLGKAGFCRLFIPGFAEMAAPLYPLTKPGTLFNWGPDQQKAYQEIKQALLTAPALGLPDLTKPFELFVDEKQGYAKGVLTQKLGPWRRPVAYLSKKLDPVAAGWPPCLRMVAAIAVLTKDAGKLTMGQPLVILAPHAVEALVKQPPDRWLSNARMTHYQALLLDTDRVQFGPVVALNPATLLPLPEEGLQHNCLDILAEAHGTRPDLTDQPLPDADHTWYTDGSSLLQEGQRKAGAAVTTETEVIWAKALPAGTSAQRAELIALTQALKMAEGKKLNVYTDSRYAFATAHIHGEIYRRRGWLTSEGKEIKNKDEILALLKALFLPKRLSIIHCPGHQKGHSAEARGNRMADQAARKAAITETPDTSTLLIENSSPSGGSKRTADGSEFEAGKRTADGSEFEKRTADGSEFESPKKKAKVE

SEQ ID NO: 2647 - protein, 2115 aa, synthetic construct
MPAAKRVKLDGGDKKYSIGLDIGTNSVGWAVITDEYKVPSKKFKVLGNTDRHSIKKNLIGALLFDSGETAEATRLKRTARRRYTRRKNRICYLQEIFSNEMAKVDDSFFHRLEESFLVEEDKKHERHPIFGNIVDEVAYHEKYPTIYHLRKKLVDSTDKADLRLIYLALAHMIKFRGHFLIEGDLNPDNSDVDKLFIQLVQTYNQLFEENPINASGVDAKAILSARLSKSRRLENLIAQLPGEKKNGLFGNLIALSLGLTPNFKSNFDLAEDAKLQLSKDTYDDDLDNLLAQIGDQYADLFLAAKNLSDAILLSDILRVNTEITKAPLSASMIKRYDEHHQDLTLLKALVRQQLPEKYKEIFFDQSKNGYAGYIDGGASQEEFYKFIKPILEKMDGTEELLVKLNREDLLRKQRTFDNGSIPHQIHLGELHAILRRQEDFYPFLKDNREKIEKILTFRIPYYVGPLARGNSRFAWMTRKSEETITPWNFEEVVDKGASAQSFIERMTNFDKNLPNEKVLPKHSLLYEYFTVYNELTKVKYVTEGMRKPAFLSGEQKKAIVDLLFKTNRKVTVKQLKEDYFKKIECFDSVEISGVEDRFNASLGTYHDLLKIIKDKDFLDNEENEDILEDIVLTLTLFEDREMIEERLKTYAHLFDDKVMKQLKRRRYTGWGRLSRKLINGIRDKQSGKTILDFLKSDGFANRNFMQLIHDDSLTFKEDIQKAQVSGQGDSLHEHIANLAGSPAIKKGILQTVKVVDELVKVMGRHKPENIVIEMARENQTTQKGQKNSRERMKRIEEGIKELGSQILKEHPVENTQLQNEKLYLYYLQNGRDMYVDQELDINRLSDYDVDHIVPQSFLKDDSIDNKVLTRSDKARGKSDNVPSEEVVKKMKNYWRQLLNAKLITQRKFDNLTKAERGGLSELDKAGFIKRQLVETRQITKHVAQILDSRMNTKYDENDKLIREVKVITLKSKLVSDFRKDFQFYKVREINNYHHAHDAYLNAVVGTALIKKYPKLESEFVYGDYKVYDVRKMIAKSEQEIGKATAKYFFYSNIMNFFKTEITLANGEIRKRPLIETNGETGEIVWDKGRDFATVRKVLSMPQVNIVKKTEVQTGGFSKESILPKRNSDKLIARKKDWDPKKYGGFDSPTVAYSVLVVAKVEKGKSKKLKSVKELLGITIMERSSFEKNPIDFLEAKGYKEVKKDLIIKLPKYSLFELENGRKRMLASAGELQKGNELALPSKYVNFLYLASHYEKLKGSPEDNEQKQLFVEQHKHYLDEIIEQISEFSKRVILADANLDKVLSAYNKHRDKPIREQAENIIHLFTLTNLGAPAAFKYFDTTIDRKRYTSTKEVLDATLIHQSITGLYETRIDLSQLGGDGGEAAAKEAAAKGGTLNIEDEYRLHETSKEPDVSLGSTWLSDFPQAWAETGGMGLAVRQAPLIIPLKATSTPVSIKQYPMSQEARLGIKPHIQRLLDQGILVPCQSPWNTPLLPVKKPGTNDYRPVQDLREVNKRVEDIHPTVPNPYNLLSGLPPSHQWYTVLDLKDAFFCLRLHPTSQPLFAFEWRDPEMGISGQLTWTRLPQGFKNSPTLFNEALHRDLADFRIQHPDLILLQYVDDLLLAATSELDCQQGTRALLQTLGNLGYRASAKKAQICQKQVKYLGYLLKEGQRWLTEARKETVMGQPTPKTPRQLREFLGKAGFCRLFIPGFAEMAAPLYPLTKPGTLFNWGPDQQKAYQEIKQALLTAPALGLPDLTKPFELFVDEKQGYAKGVLTQKLGPWRRPVAYLSKKLDPVAAGWPPCLRMVAAIAVLTKDAGKLTMGQPLVILAPHAVEALVKQPPDRWLSNARMTHYQALLLDTDRVQFGPVVALNPATLLPLPEEGLQHNCLDILAEAHGTRPDLTDQPLPDADHTWYTDGSSLLQEGQRKAGAAVTTETEVIWAKALPAGTSAQRAELIALTQALKMAEGKKLNVYTDSRYAFATAHIHGEIYRRRGWLTSEGKEIKNKDEILALLKALFLPKRLSIIHCPGHQKGHSAEARGNRMADQAARKAAITETPDTSTLLIENSSPSGGSKRTADGSEFEAGKRTADGSEFEKRTADGSEFESPKKKAKVE

SEQ ID NO: 2648 - protein, 2116 aa, synthetic construct
MPAAKRVKLDGGDKKYSIGLDIGTNSVGWAVITDEYKVPSKKFKVLGNTDRHSIKKNLIGALLFDSGETAEATRLKRTARRRYTRRKNRICYLQEIFSNEMAKVDDSFFHRLEESFLVEEDKKHERHPIFGNIVDEVAYHEKYPTIYHLRKKLVDSTDKADLRLIYLALAHMIKFRGHFLIEGDLNPDNSDVDKLFIQLVQTYNQLFEENPINASGVDAKAILSARLSKSRRLENLIAQLPGEKKNGLFGNLIALSLGLTPNFKSNFDLAEDAKLQLSKDTYDDDLDNLLAQIGDQYADLFLAAKNLSDAILLSDILRVNTEITKAPLSASMIKRYDEHHQDLTLLKALVRQQLPEKYKEIFFDQSKNGYAGYIDGGASQEEFYKFIKPILEKMDGTEELLVKLNREDLLRKQRTFDNGSIPHQIHLGELHAILRRQEDFYPFLKDNREKIEKILTFRIPYYVGPLARGNSRFAWMTRKSEETITPWNFEEVVDKGASAQSFIERMTNFDKNLPNEKVLPKHSLLYEYFTVYNELTKVKYVTEGMRKPAFLSGEQKKAIVDLLFKTNRKVTVKQLKEDYFKKIECFDSVEISGVEDRFNASLGTYHDLLKIIKDKDFLDNEENEDILEDIVLTLTLFEDREMIEERLKTYAHLFDDKVMKQLKRRRYTGWGRLSRKLINGIRDKQSGKTILDFLKSDGFANRNFMQLIHDDSLTFKEDIQKAQVSGQGDSLHEHIANLAGSPAIKKGILQTVKVVDELVKVMGRHKPENIVIEMARENQTTQKGQKNSRERMKRIEEGIKELGSQILKEHPVENTQLQNEKLYLYYLQNGRDMYVDQELDINRLSDYDVDHIVPQSFLKDDSIDNKVLTRSDKARGKSDNVPSEEVVKKMKNYWRQLLNAKLITQRKFDNLTKAERGGLSELDKAGFIKRQLVETRQITKHVAQILDSRMNTKYDENDKLIREVKVITLKSKLVSDFRKDFQFYKVREINNYHHAHDAYLNAVVGTALIKKYPKLESEFVYGDYKVYDVRKMIAKSEQEIGKATAKYFFYSNIMNFFKTEITLANGEIRKRPLIETNGETGEIVWDKGRDFATVRKVLSMPQVNIVKKTEVQTGGFSKESILPKRNSDKLIARKKDWDPKKYGGFDSPTVAYSVLVVAKVEKGKSKKLKSVKELLGITIMERSSFEKNPIDFLEAKGYKEVKKDLIIKLPKYSLFELENGRKRMLASAGELQKGNELALPSKYVNFLYLASHYEKLKGSPEDNEQKQLFVEQHKHYLDEIIEQISEFSKRVILADANLDKVLSAYNKHRDKPIREQAENIIHLFTLTNLGAPAAFKYFDTTIDRKRYTSTKEVLDATLIHQSITGLYETRIDLSQLGGDGGGSSPAPEAAAKGGTLNIEDEYRLHETSKEPDVSLGSTWLSDFPQAWAETGGMGLAVRQAPLIIPLKATSTPVSIKQYPMSQEARLGIKPHIQRLLDQGILVPCQSPWNTPLLPVKKPGTNDYRPVQDLREVNKRVEDIHPTVPNPYNLLSGLPPSHQWYTVLDLKDAFFCLRLHPTSQPLFAFEWRDPEMGISGQLTWTRLPQGFKNSPTLFNEALHRDLADFRIQHPDLILLQYVDDLLLAATSELDCQQGTRALLQTLGNLGYRASAKKAQICQKQVKYLGYLLKEGQRWLTEARKETVMGQPTPKTPRQLREFLGKAGFCRLFIPGFAEMAAPLYPLTKPGTLFNWGPDQQKAYQEIKQALLTAPALGLPDLTKPFELFVDEKQGYAKGVLTQKLGPWRRPVAYLSKKLDPVAAGWPPCLRMVAAIAVLTKDAGKLTMGQPLVILAPHAVEALVKQPPDRWLSNARMTHYQALLLDTDRVQFGPVVALNPATLLPLPEEGLQHNCLDILAEAHGTRPDLTDQPLPDADHTWYTDGSSLLQEGQRKAGAAVTTETEVIWAKALPAGTSAQRAELIALTQALKMAEGKKLNVYTDSRYAFATAHIHGEIYRRRGWLTSEGKEIKNKDEILALLKALFLPKRLSIIHCPGHQKGHSAEARGNRMADQAARKAAITETPDTSTLLIENSSPSGGSKRTADGSEFEAGKRTADGSEFEKRTADGSEFESPKKKAKVE

SEQ ID NO: 2649 - protein, 2114 aa, synthetic construct
MPAAKRVKLDGGDKKYSIGLDIGTNSVGWAVITDEYKVPSKKFKVLGNTDRHSIKKNLIGALLFDSGETAEATRLKRTARRRYTRRKNRICYLQEIFSNEMAKVDDSFFHRLEESFLVEEDKKHERHPIFGNIVDEVAYHEKYPTIYHLRKKLVDSTDKADLRLIYLALAHMIKFRGHFLIEGDLNPDNSDVDKLFIQLVQTYNQLFEENPINASGVDAKAILSARLSKSRRLENLIAQLPGEKKNGLFGNLIALSLGLTPNFKSNFDLAEDAKLQLSKDTYDDDLDNLLAQIGDQYADLFLAAKNLSDAILLSDILRVNTEITKAPLSASMIKRYDEHHQDLTLLKALVRQQLPEKYKEIFFDQSKNGYAGYIDGGASQEEFYKFIKPILEKMDGTEELLVKLNREDLLRKQRTFDNGSIPHQIHLGELHAILRRQEDFYPFLKDNREKIEKILTFRIPYYVGPLARGNSRFAWMTRKSEETITPWNFEEVVDKGASAQSFIERMTNFDKNLPNEKVLPKHSLLYEYFTVYNELTKVKYVTEGMRKPAFLSGEQKKAIVDLLFKTNRKVTVKQLKEDYFKKIECFDSVEISGVEDRFNASLGTYHDLLKIIKDKDFLDNEENEDILEDIVLTLTLFEDREMIEERLKTYAHLFDDKVMKQLKRRRYTGWGRLSRKLINGIRDKQSGKTILDFLKSDGFANRNFMQLIHDDSLTFKEDIQKAQVSGQGDSLHEHIANLAGSPAIKKGILQTVKVVDELVKVMGRHKPENIVIEMARENQTTQKGQKNSRERMKRIEEGIKELGSQILKEHPVENTQLQNEKLYLYYLQNGRDMYVDQELDINRLSDYDVDHIVPQSFLKDDSIDNKVLTRSDKARGKSDNVPSEEVVKKMKNYWRQLLNAKLITQRKFDNLTKAERGGLSELDKAGFIKRQLVETRQITKHVAQILDSRMNTKYDENDKLIREVKVITLKSKLVSDFRKDFQFYKVREINNYHHAHDAYLNAVVGTALIKKYPKLESEFVYGDYKVYDVRKMIAKSEQEIGKATAKYFFYSNIMNFFKTEITLANGEIRKRPLIETNGETGEIVWDKGRDFATVRKVLSMPQVNIVKKTEVQTGGFSKESILPKRNSDKLIARKKDWDPKKYGGFDSPTVAYSVLVVAKVEKGKSKKLKSVKELLGITIMERSSFEKNPIDFLEAKGYKEVKKDLIIKLPKYSLFELENGRKRMLASAGELQKGNELALPSKYVNFLYLASHYEKLKGSPEDNEQKQLFVEQHKHYLDEIIEQISEFSKRVILADANLDKVLSAYNKHRDKPIREQAENIIHLFTLTNLGAPAAFKYFDTTIDRKRYTSTKEVLDATLIHQSITGLYETRIDLSQLGGDGGPAPGGSGGGGGTLNIEDEYRLHETSKEPDVSLGSTWLSDFPQAWAETGGMGLAVRQAPLIIPLKATSTPVSIKQYPMSQEARLGIKPHIQRLLDQGILVPCQSPWNTPLLPVKKPGTNDYRPVQDLREVNKRVEDIHPTVPNPYNLLSGLPPSHQWYTVLDLKDAFFCLRLHPTSQPLFAFEWRDPEMGISGQLTWTRLPQGFKNSPTLFNEALHRDLADFRIQHPDLILLQYVDDLLLAATSELDCQQGTRALLQTLGNLGYRASAKKAQICQKQVKYLGYLLKEGQRWLTEARKETVMGQPTPKTPRQLREFLGKAGFCRLFIPGFAEMAAPLYPLTKPGTLFNWGPDQQKAYQEIKQALLTAPALGLPDLTKPFELFVDEKQGYAKGVLTQKLGPWRRPVAYLSKKLDPVAAGWPPCLRMVAAIAVLTKDAGKLTMGQPLVILAPHAVEALVKQPPDRWLSNARMTHYQALLLDTDRVQFGPVVALNPATLLPLPEEGLQHNCLDILAEAHGTRPDLTDQPLPDADHTWYTDGSSLLQEGQRKAGAAVTTETEVIWAKALPAGTSAQRAELIALTQALKMAEGKKLNVYTDSRYAFATAHIHGEIYRRRGWLTSEGKEIKNKDEILALLKALFLPKRLSIIHCPGHQKGHSAEARGNRMADQAARKAAITETPDTSTLLIENSSPSGGSKRTADGSEFEAGKRTADGSEFEKRTADGSEFESPKKKAKVE

SEQ ID NO: 2650 - protein, 2114 aa, synthetic construct
MPAAKRVKLDGGDKKYSIGLDIGTNSVGWAVITDEYKVPSKKFKVLGNTDRHSIKKNLIGALLFDSGETAEATRLKRTARRRYTRRKNRICYLQEIFSNEMAKVDDSFFHRLEESFLVEEDKKHERHPIFGNIVDEVAYHEKYPTIYHLRKKLVDSTDKADLRLIYLALAHMIKFRGHFLIEGDLNPDNSDVDKLFIQLVQTYNQLFEENPINASGVDAKAILSARLSKSRRLENLIAQLPGEKKNGLFGNLIALSLGLTPNFKSNFDLAEDAKLQLSKDTYDDDLDNLLAQIGDQYADLFLAAKNLSDAILLSDILRVNTEITKAPLSASMIKRYDEHHQDLTLLKALVRQQLPEKYKEIFFDQSKNGYAGYIDGGASQEEFYKFIKPILEKMDGTEELLVKLNREDLLRKQRTFDNGSIPHQIHLGELHAILRRQEDFYPFLKDNREKIEKILTFRIPYYVGPLARGNSRFAWMTRKSEETITPWNFEEVVDKGASAQSFIERMTNFDKNLPNEKVLPKHSLLYEYFTVYNELTKVKYVTEGMRKPAFLSGEQKKAIVDLLFKTNRKVTVKQLKEDYFKKIECFDSVEISGVEDRFNASLGTYHDLLKIIKDKDFLDNEENEDILEDIVLTLTLFEDREMIEERLKTYAHLFDDKVMKQLKRRRYTGWGRLSRKLINGIRDKQSGKTILDFLKSDGFANRNFMQLIHDDSLTFKEDIQKAQVSGQGDSLHEHIANLAGSPAIKKGILQTVKVVDELVKVMGRHKPENIVIEMARENQTTQKGQKNSRERMKRIEEGIKELGSQILKEHPVENTQLQNEKLYLYYLQNGRDMYVDQELDINRLSDYDVDHIVPQSFLKDDSIDNKVLTRSDKARGKSDNVPSEEVVKKMKNYWRQLLNAKLITQRKFDNLTKAERGGLSELDKAGFIKRQLVETRQITKHVAQILDSRMNTKYDENDKLIREVKVITLKSKLVSDFRKDFQFYKVREINNYHHAHDAYLNAVVGTALIKKYPKLESEFVYGDYKVYDVRKMIAKSEQEIGKATAKYFFYSNIMNFFKTEITLANGEIRKRPLIETNGETGEIVWDKGRDFATVRKVLSMPQVNIVKKTEVQTGGFSKESILPKRNSDKLIARKKDWDPKKYGGFDSPTVAYSVLVVAKVEKGKSKKLKSVKELLGITIMERSSFEKNPIDFLEAKGYKEVKKDLIIKLPKYSLFELENGRKRMLASAGELQKGNELALPSKYVNFLYLASHYEKLKGSPEDNEQKQLFVEQHKHYLDEIIEQISEFSKRVILADANLDKVLSAYNKHRDKPIREQAENIIHLFTLTNLGAPAAFKYFDTTIDRKRYTSTKEVLDATLIHQSITGLYETRIDLSQLGGDGGPAPGGGGGSGGTLNIEDEYRLHETSKEPDVSLGSTWLSDFPQAWAETGGMGLAVRQAPLIIPLKATSTPVSIKQYPMSQEARLGIKPHIQRLLDQGILVPCQSPWNTPLLPVKKPGTNDYRPVQDLREVNKRVEDIHPTVPNPYNLLSGLPPSHQWYTVLDLKDAFFCLRLHPTSQPLFAFEWRDPEMGISGQLTWTRLPQGFKNSPTLFNEALHRDLADFRIQHPDLILLQYVDDLLLAATSELDCQQGTRALLQTLGNLGYRASAKKAQICQKQVKYLGYLLKEGQRWLTEARKETVMGQPTPKTPRQLREFLGKAGFCRLFIPGFAEMAAPLYPLTKPGTLFNWGPDQQKAYQEIKQALLTAPALGLPDLTKPFELFVDEKQGYAKGVLTQKLGPWRRPVAYLSKKLDPVAAGWPPCLRMVAAIAVLTKDAGKLTMGQPLVILAPHAVEALVKQPPDRWLSNARMTHYQALLLDTDRVQFGPVVALNPATLLPLPEEGLQHNCLDILAEAHGTRPDLTDQPLPDADHTWYTDGSSLLQEGQRKAGAAVTTETEVIWAKALPAGTSAQRAELIALTQALKMAEGKKLNVYTDSRYAFATAHIHGEIYRRRGWLTSEGKEIKNKDEILALLKALFLPKRLSIIHCPGHQKGHSAEARGNRMADQAARKAAITETPDTSTLLIENSSPSGGSKRTADGSEFEAGKRTADGSEFEKRTADGSEFESPKKKAKVE

SEQ ID NO: 2651 - protein, 2116 aa, synthetic construct
MPAAKRVKLDGGDKKYSIGLDIGTNSVGWAVITDEYKVPSKKFKVLGNTDRHSIKKNLIGALLFDSGETAEATRLKRTARRRYTRRKNRICYLQEIFSNEMAKVDDSFFHRLEESFLVEEDKKHERHPIFGNIVDEVAYHEKYPTIYHLRKKLVDSTDKADLRLIYLALAHMIKFRGHFLIEGDLNPDNSDVDKLFIQLVQTYNQLFEENPINASGVDAKAILSARLSKSRRLENLIAQLPGEKKNGLFGNLIALSLGLTPNFKSNFDLAEDAKLQLSKDTYDDDLDNLLAQIGDQYADLFLAAKNLSDAILLSDILRVNTEITKAPLSASMIKRYDEHHQDLTLLKALVRQQLPEKYKEIFFDQSKNGYAGYIDGGASQEEFYKFIKPILEKMDGTEELLVKLNREDLLRKQRTFDNGSIPHQIHLGELHAILRRQEDFYPFLKDNREKIEKILTFRIPYYVGPLARGNSRFAWMTRKSEETITPWNFEEVVDKGASAQSFIERMTNFDKNLPNEKVLPKHSLLYEYFTVYNELTKVKYVTEGMRKPAFLSGEQKKAIVDLLFKTNRKVTVKQLKEDYFKKIECFDSVEISGVEDRFNASLGTYHDLLKIIKDKDFLDNEENEDILEDIVLTLTLFEDREMIEERLKTYAHLFDDKVMKQLKRRRYTGWGRLSRKLINGIRDKQSGKTILDFLKSDGFANRNFMQLIHDDSLTFKEDIQKAQVSGQGDSLHEHIANLAGSPAIKKGILQTVKVVDELVKVMGRHKPENIVIEMARENQTTQKGQKNSRERMKRIEEGIKELGSQILKEHPVENTQLQNEKLYLYYLQNGRDMYVDQELDINRLSDYDVDHIVPQSFLKDDSIDNKVLTRSDKARGKSDNVPSEEVVKKMKNYWRQLLNAKLITQRKFDNLTKAERGGLSELDKAGFIKRQLVETRQITKHVAQILDSRMNTKYDENDKLIREVKVITLKSKLVSDFRKDFQFYKVREINNYHHAHDAYLNAVVGTALIKKYPKLESEFVYGDYKVYDVRKMIAKSEQEIGKATAKYFFYSNIMNFFKTEITLANGEIRKRPLIETNGETGEIVWDKGRDFATVRKVLSMPQVNIVKKTEVQTGGFSKESILPKRNSDKLIARKKDWDPKKYGGFDSPTVAYSVLVVAKVEKGKSKKLKSVKELLGITIMERSSFEKNPIDFLEAKGYKEVKKDLIIKLPKYSLFELENGRKRMLASAGELQKGNELALPSKYVNFLYLASHYEKLKGSPEDNEQKQLFVEQHKHYLDEIIEQISEFSKRVILADANLDKVLSAYNKHRDKPIREQAENIIHLFTLTNLGAPAAFKYFDTTIDRKRYTSTKEVLDATLIHQSITGLYETRIDLSQLGGDGGPAPGSSEAAAKGGTLNIEDEYRLHETSKEPDVSLGSTWLSDFPQAWAETGGMGLAVRQAPLIIPLKATSTPVSIKQYPMSQEARLGIKPHIQRLLDQGILVPCQSPWNTPLLPVKKPGTNDYRPVQDLREVNKRVEDIHPTVPNPYNLLSGLPPSHQWYTVLDLKDAFFCLRLHPTSQPLFAFEWRDPEMGISGQLTWTRLPQGFKNSPTLFNEALHRDLADFRIQHPDLILLQYVDDLLLAATSELDCQQGTRALLQTLGNLGYRASAKKAQICQKQVKYLGYLLKEGQRWLTEARKETVMGQPTPKTPRQLREFLGKAGFCRLFIPGFAEMAAPLYPLTKPGTLFNWGPDQQKAYQEIKQALLTAPALGLPDLTKPFELFVDEKQGYAKGVLTQKLGPWRRPVAYLSKKLDPVAAGWPPCLRMVAAIAVLTKDAGKLTMGQPLVILAPHAVEALVKQPPDRWLSNARMTHYQALLLDTDRVQFGPVVALNPATLLPLPEEGLQHNCLDILAEAHGTRPDLTDQPLPDADHTWYTDGSSLLQEGQRKAGAAVTTETEVIWAKALPAGTSAQRAELIALTQALKMAEGKKLNVYTDSRYAFATAHIHGEIYRRRGWLTSEGKEIKNKDEILALLKALFLPKRLSIIHCPGHQKGHSAEARGNRMADQAARKAAITETPDTSTLLIENSSPSGGSKRTADGSEFEAGKRTADGSEFEKRTADGSEFESPKKKAKVE

SEQ ID NO: 2652 - protein, 2116 aa, synthetic construct
MPAAKRVKLDGGDKKYSIGLDIGTNSVGWAVITDEYKVPSKKFKVLGNTDRHSIKKNLIGALLFDSGETAEATRLKRTARRRYTRRKNRICYLQEIFSNEMAKVDDSFFHRLEESFLVEEDKKHERHPIFGNIVDEVAYHEKYPTIYHLRKKLVDSTDKADLRLIYLALAHMIKFRGHFLIEGDLNPDNSDVDKLFIQLVQTYNQLFEENPINASGVDAKAILSARLSKSRRLENLIAQLPGEKKNGLFGNLIALSLGLTPNFKSNFDLAEDAKLQLSKDTYDDDLDNLLAQIGDQYADLFLAAKNLSDAILLSDILRVNTEITKAPLSASMIKRYDEHHQDLTLLKALVRQQLPEKYKEIFFDQSKNGYAGYIDGGASQEEFYKFIKPILEKMDGTEELLVKLNREDLLRKQRTFDNGSIPHQIHLGELHAILRRQEDFYPFLKDNREKIEKILTFRIPYYVGPLARGNSRFAWMTRKSEETITPWNFEEVVDKGASAQSFIERMTNFDKNLPNEKVLPKHSLLYEYFTVYNELTKVKYVTEGMRKPAFLSGEQKKAIVDLLFKTNRKVTVKQLKEDYFKKIECFDSVEISGVEDRFNASLGTYHDLLKIIKDKDFLDNEENEDILEDIVLTLTLFEDREMIEERLKTYAHLFDDKVMKQLKRRRYTGWGRLSRKLINGIRDKQSGKTILDFLKSDGFANRNFMQLIHDDSLTFKEDIQKAQVSGQGDSLHEHIANLAGSPAIKKGILQTVKVVDELVKVMGRHKPENIVIEMARENQTTQKGQKNSRERMKRIEEGIKELGSQILKEHPVENTQLQNEKLYLYYLQNGRDMYVDQELDINRLSDYDVDHIVPQSFLKDDSIDNKVLTRSDKARGKSDNVPSEEVVKKMKNYWRQLLNAKLITQRKFDNLTKAERGGLSELDKAGFIKRQLVETRQITKHVAQILDSRMNTKYDENDKLIREVKVITLKSKLVSDFRKDFQFYKVREINNYHHAHDAYLNAVVGTALIKKYPKLESEFVYGDYKVYDVRKMIAKSEQEIGKATAKYFFYSNIMNFFKTEITLANGEIRKRPLIETNGETGEIVWDKGRDFATVRKVLSMPQVNIVKKTEVQTGGFSKESILPKRNSDKLIARKKDWDPKKYGGFDSPTVAYSVLVVAKVEKGKSKKLKSVKELLGITIMERSSFEKNPIDFLEAKGYKEVKKDLIIKLPKYSLFELENGRKRMLASAGELQKGNELALPSKYVNFLYLASHYEKLKGSPEDNEQKQLFVEQHKHYLDEIIEQISEFSKRVILADANLDKVLSAYNKHRDKPIREQAENIIHLFTLTNLGAPAAFKYFDTTIDRKRYTSTKEVLDATLIHQSITGLYETRIDLSQLGGDGGGSSGGGEAAAKGGTLNIEDEYRLHETSKEPDVSLGSTWLSDFPQAWAETGGMGLAVRQAPLIIPLKATSTPVSIKQYPMSQEARLGIKPHIQRLLDQGILVPCQSPWNTPLLPVKKPGTNDYRPVQDLREVNKRVEDIHPTVPNPYNLLSGLPPSHQWYTVLDLKDAFFCLRLHPTSQPLFAFEWRDPEMGISGQLTWTRLPQGFKNSPTLFNEALHRDLADFRIQHPDLILLQYVDDLLLAATSELDCQQGTRALLQTLGNLGYRASAKKAQICQKQVKYLGYLLKEGQRWLTEARKETVMGQPTPKTPRQLREFLGKAGFCRLFIPGFAEMAAPLYPLTKPGTLFNWGPDQQKAYQEIKQALLTAPALGLPDLTKPFELFVDEKQGYAKGVLTQKLGPWRRPVAYLSKKLDPVAAGWPPCLRMVAAIAVLTKDAGKLTMGQPLVILAPHAVEALVKQPPDRWLSNARMTHYQALLLDTDRVQFGPVVALNPATLLPLPEEGLQHNCLDILAEAHGTRPDLTDQPLPDADHTWYTDGSSLLQEGQRKAGAAVTTETEVIWAKALPAGTSAQRAELIALTQALKMAEGKKLNVYTDSRYAFATAHIHGEIYRRRGWLTSEGKEIKNKDEILALLKALFLPKRLSIIHCPGHQKGHSAEARGNRMADQAARKAAITETPDTSTLLIENSSPSGGSKRTADGSEFEAGKRTADGSEFEKRTADGSEFESPKKKAKVE

SEQ ID NO: 2653 - protein, 2111 aa, synthetic construct
MPAAKRVKLDGGDKKYSIGLDIGTNSVGWAVITDEYKVPSKKFKVLGNTDRHSIKKNLIGALLFDSGETAEATRLKRTARRRYTRRKNRICYLQEIFSNEMAKVDDSFFHRLEESFLVEEDKKHERHPIFGNIVDEVAYHEKYPTIYHLRKKLVDSTDKADLRLIYLALAHMIKFRGHFLIEGDLNPDNSDVDKLFIQLVQTYNQLFEENPINASGVDAKAILSARLSKSRRLENLIAQLPGEKKNGLFGNLIALSLGLTPNFKSNFDLAEDAKLQLSKDTYDDDLDNLLAQIGDQYADLFLAAKNLSDAILLSDILRVNTEITKAPLSASMIKRYDEHHQDLTLLKALVRQQLPEKYKEIFFDQSKNGYAGYIDGGASQEEFYKFIKPILEKMDGTEELLVKLNREDLLRKQRTFDNGSIPHQIHLGELHAILRRQEDFYPFLKDNREKIEKILTFRIPYYVGPLARGNSRFAWMTRKSEETITPWNFEEVVDKGASAQSFIERMTNFDKNLPNEKVLPKHSLLYEYFTVYNELTKVKYVTEGMRKPAFLSGEQKKAIVDLLFKTNRKVTVKQLKEDYFKKIECFDSVEISGVEDRFNASLGTYHDLLKIIKDKDFLDNEENEDILEDIVLTLTLFEDREMIEERLKTYAHLFDDKVMKQLKRRRYTGWGRLSRKLINGIRDKQSGKTILDFLKSDGFANRNFMQLIHDDSLTFKEDIQKAQVSGQGDSLHEHIANLAGSPAIKKGILQTVKVVDELVKVMGRHKPENIVIEMARENQTTQKGQKNSRERMKRIEEGIKELGSQILKEHPVENTQLQNEKLYLYYLQNGRDMYVDQELDINRLSDYDVDHIVPQSFLKDDSIDNKVLTRSDKARGKSDNVPSEEVVKKMKNYWRQLLNAKLITQRKFDNLTKAERGGLSELDKAGFIKRQLVETRQITKHVAQILDSRMNTKYDENDKLIREVKVITLKSKLVSDFRKDFQFYKVREINNYHHAHDAYLNAVVGTALIKKYPKLESEFVYGDYKVYDVRKMIAKSEQEIGKATAKYFFYSNIMNFFKTEITLANGEIRKRPLIETNGETGEIVWDKGRDFATVRKVLSMPQVNIVKKTEVQTGGFSKESILPKRNSDKLIARKKDWDPKKYGGFDSPTVAYSVLVVAKVEKGKSKKLKSVKELLGITIMERSSFEKNPIDFLEAKGYKEVKKDLIIKLPKYSLFELENGRKRMLASAGELQKGNELALPSKYVNFLYLASHYEKLKGSPEDNEQKQLFVEQHKHYLDEIIEQISEFSKRVILADANLDKVLSAYNKHRDKPIREQAENIIHLFTLTNLGAPAAFKYFDTTIDRKRYTSTKEVLDATLIHQSITGLYETRIDLSQLGGDGGGGSGGGGGTLNIEDEYRLHETSKEPDVSLGSTWLSDFPQAWAETGGMGLAVRQAPLIIPLKATSTPVSIKQYPMSQEARLGIKPHIQRLLDQGILVPCQSPWNTPLLPVKKPGTNDYRPVQDLREVNKRVEDIHPTVPNPYNLLSGLPPSHQWYTVLDLKDAFFCLRLHPTSQPLFAFEWRDPEMGISGQLTWTRLPQGFKNSPTLFNEALHRDLADFRIQHPDLILLQYVDDLLLAATSELDCQQGTRALLQTLGNLGYRASAKKAQICQKQVKYLGYLLKEGQRWLTEARKETVMGQPTPKTPRQLREFLGKAGFCRLFIPGFAEMAAPLYPLTKPGTLFNWGPDQQKAYQEIKQALLTAPALGLPDLTKPFELFVDEKQGYAKGVLTQKLGPWRRPVAYLSKKLDPVAAGWPPCLRMVAAIAVLTKDAGKLTMGQPLVILAPHAVEALVKQPPDRWLSNARMTHYQALLLDTDRVQFGPVVALNPATLLPLPEEGLQHNCLDILAEAHGTRPDLTDQPLPDADHTWYTDGSSLLQEGQRKAGAAVTTETEVIWAKALPAGTSAQRAELIALTQALKMAEGKKLNVYTDSRYAFATAHIHGEIYRRRGWLTSEGKEIKNKDEILALLKALFLPKRLSIIHCPGHQKGHSAEARGNRMADQAARKAAITETPDTSTLLIENSSPSGGSKRTADGSEFEAGKRTADGSEFEKRTADGSEFESPKKKAKVE

SEQ ID NO: 2654 - protein, 2116 aa, synthetic construct
MPAAKRVKLDGGDKKYSIGLDIGTNSVGWAVITDEYKVPSKKFKVLGNTDRHSIKKNLIGALLFDSGETAEATRLKRTARRRYTRRKNRICYLQEIFSNEMAKVDDSFFHRLEESFLVEEDKKHERHPIFGNIVDEVAYHEKYPTIYHLRKKLVDSTDKADLRLIYLALAHMIKFRGHFLIEGDLNPDNSDVDKLFIQLVQTYNQLFEENPINASGVDAKAILSARLSKSRRLENLIAQLPGEKKNGLFGNLIALSLGLTPNFKSNFDLAEDAKLQLSKDTYDDDLDNLLAQIGDQYADLFLAAKNLSDAILLSDILRVNTEITKAPLSASMIKRYDEHHQDLTLLKALVRQQLPEKYKEIFFDQSKNGYAGYIDGGASQEEFYKFIKPILEKMDGTEELLVKLNREDLLRKQRTFDNGSIPHQIHLGELHAILRRQEDFYPFLKDNREKIEKILTFRIPYYVGPLARGNSRFAWMTRKSEETITPWNFEEVVDKGASAQSFIERMTNFDKNLPNEKVLPKHSLLYEYFTVYNELTKVKYVTEGMRKPAFLSGEQKKAIVDLLFKTNRKVTVKQLKEDYFKKIECFDSVEISGVEDRFNASLGTYHDLLKIIKDKDFLDNEENEDILEDIVLTLTLFEDREMIEERLKTYAHLFDDKVMKQLKRRRYTGWGRLSRKLINGIRDKQSGKTILDFLKSDGFANRNFMQLIHDDSLTFKEDIQKAQVSGQGDSLHEHIANLAGSPAIKKGILQTVKVVDELVKVMGRHKPENIVIEMARENQTTQKGQKNSRERMKRIEEGIKELGSQILKEHPVENTQLQNEKLYLYYLQNGRDMYVDQELDINRLSDYDVDHIVPQSFLKDDSIDNKVLTRSDKARGKSDNVPSEEVVKKMKNYWRQLLNAKLITQRKFDNLTKAERGGLSELDKAGFIKRQLVETRQITKHVAQILDSRMNTKYDENDKLIREVKVITLKSKLVSDFRKDFQFYKVREINNYHHAHDAYLNAVVGTALIKKYPKLESEFVYGDYKVYDVRKMIAKSEQEIGKATAKYFFYSNIMNFFKTEITLANGEIRKRPLIETNGETGEIVWDKGRDFATVRKVLSMPQVNIVKKTEVQTGGFSKESILPKRNSDKLIARKKDWDPKKYGGFDSPTVAYSVLVVAKVEKGKSKKLKSVKELLGITIMERSSFEKNPIDFLEAKGYKEVKKDLIIKLPKYSLFELENGRKRMLASAGELQKGNELALPSKYVNFLYLASHYEKLKGSPEDNEQKQLFVEQHKHYLDEIIEQISEFSKRVILADANLDKVLSAYNKHRDKPIREQAENIIHLFTLTNLGAPAAFKYFDTTIDRKRYTSTKEVLDATLIHQSITGLYETRIDLSQLGGDGGEAAAKGGSPAPGGTLNIEDEYRLHETSKEPDVSLGSTWLSDFPQAWAETGGMGLAVRQAPLIIPLKATSTPVSIKQYPMSQEARLGIKPHIQRLLDQGILVPCQSPWNTPLLPVKKPGTNDYRPVQDLREVNKRVEDIHPTVPNPYNLLSGLPPSHQWYTVLDLKDAFFCLRLHPTSQPLFAFEWRDPEMGISGQLTWTRLPQGFKNSPTLFNEALHRDLADFRIQHPDLILLQYVDDLLLAATSELDCQQGTRALLQTLGNLGYRASAKKAQICQKQVKYLGYLLKEGQRWLTEARKETVMGQPTPKTPRQLREFLGKAGFCRLFIPGFAEMAAPLYPLTKPGTLFNWGPDQQKAYQEIKQALLTAPALGLPDLTKPFELFVDEKQGYAKGVLTQKLGPWRRPVAYLSKKLDPVAAGWPPCLRMVAAIAVLTKDAGKLTMGQPLVILAPHAVEALVKQPPDRWLSNARMTHYQALLLDTDRVQFGPVVALNPATLLPLPEEGLQHNCLDILAEAHGTRPDLTDQPLPDADHTWYTDGSSLLQEGQRKAGAAVTTETEVIWAKALPAGTSAQRAELIALTQALKMAEGKKLNVYTDSRYAFATAHIHGEIYRRRGWLTSEGKEIKNKDEILALLKALFLPKRLSIIHCPGHQKGHSAEARGNRMADQAARKAAITETPDTSTLLIENSSPSGGSKRTADGSEFEAGKRTADGSEFEKRTADGSEFESPKKKAKVE

SEQ ID NO: 2655 - protein, 2108 aa, synthetic construct
MPAAKRVKLDGGDKKYSIGLDIGTNSVGWAVITDEYKVPSKKFKVLGNTDRHSIKKNLIGALLFDSGETAEATRLKRTARRRYTRRKNRICYLQEIFSNEMAKVDDSFFHRLEESFLVEEDKKHERHPIFGNIVDEVAYHEKYPTIYHLRKKLVDSTDKADLRLIYLALAHMIKFRGHFLIEGDLNPDNSDVDKLFIQLVQTYNQLFEENPINASGVDAKAILSARLSKSRRLENLIAQLPGEKKNGLFGNLIALSLGLTPNFKSNFDLAEDAKLQLSKDTYDDDLDNLLAQIGDQYADLFLAAKNLSDAILLSDILRVNTEITKAPLSASMIKRYDEHHQDLTLLKALVRQQLPEKYKEIFFDQSKNGYAGYIDGGASQEEFYKFIKPILEKMDGTEELLVKLNREDLLRKQRTFDNGSIPHQIHLGELHAILRRQEDFYPFLKDNREKIEKILTFRIPYYVGPLARGNSRFAWMTRKSEETITPWNFEEVVDKGASAQSFIERMTNFDKNLPNEKVLPKHSLLYEYFTVYNELTKVKYVTEGMRKPAFLSGEQKKAIVDLLFKTNRKVTVKQLKEDYFKKIECFDSVEISGVEDRFNASLGTYHDLLKIIKDKDFLDNEENEDILEDIVLTLTLFEDREMIEERLKTYAHLFDDKVMKQLKRRRYTGWGRLSRKLINGIRDKQSGKTILDFLKSDGFANRNFMQLIHDDSLTFKEDIQKAQVSGQGDSLHEHIANLAGSPAIKKGILQTVKVVDELVKVMGRHKPENIVIEMARENQTTQKGQKNSRERMKRIEEGIKELGSQILKEHPVENTQLQNEKLYLYYLQNGRDMYVDQELDINRLSDYDVDHIVPQSFLKDDSIDNKVLTRSDKARGKSDNVPSEEVVKKMKNYWRQLLNAKLITQRKFDNLTKAERGGLSELDKAGFIKRQLVETRQITKHVAQILDSRMNTKYDENDKLIREVKVITLKSKLVSDFRKDFQFYKVREINNYHHAHDAYLNAVVGTALIKKYPKLESEFVYGDYKVYDVRKMIAKSEQEIGKATAKYFFYSNIMNFFKTEITLANGEIRKRPLIETNGETGEIVWDKGRDFATVRKVLSMPQVNIVKKTEVQTGGFSKESILPKRNSDKLIARKKDWDPKKYGGFDSPTVAYSVLVVAKVEKGKSKKLKSVKELLGITIMERSSFEKNPIDFLEAKGYKEVKKDLIIKLPKYSLFELENGRKRMLASAGELQKGNELALPSKYVNFLYLASHYEKLKGSPEDNEQKQLFVEQHKHYLDEIIEQISEFSKRVILADANLDKVLSAYNKHRDKPIREQAENIIHLFTLTNLGAPAAFKYFDTTIDRKRYTSTKEVLDATLIHQSITGLYETRIDLSQLGGDGGGSSGGTLNIEDEYRLHETSKEPDVSLGSTWLSDFPQAWAETGGMGLAVRQAPLIIPLKATSTPVSIKQYPMSQEARLGIKPHIQRLLDQGILVPCQSPWNTPLLPVKKPGTNDYRPVQDLREVNKRVEDIHPTVPNPYNLLSGLPPSHQWYTVLDLKDAFFCLRLHPTSQPLFAFEWRDPEMGISGQLTWTRLPQGFKNSPTLFNEALHRDLADFRIQHPDLILLQYVDDLLLAATSELDCQQGTRALLQTLGNLGYRASAKKAQICQKQVKYLGYLLKEGQRWLTEARKETVMGQPTPKTPRQLREFLGKAGFCRLFIPGFAEMAAPLYPLTKPGTLFNWGPDQQKAYQEIKQALLTAPALGLPDLTKPFELFVDEKQGYAKGVLTQKLGPWRRPVAYLSKKLDPVAAGWPPCLRMVAAIAVLTKDAGKLTMGQPLVILAPHAVEALVKQPPDRWLSNARMTHYQALLLDTDRVQFGPVVALNPATLLPLPEEGLQHNCLDILAEAHGTRPDLTDQPLPDADHTWYTDGSSLLQEGQRKAGAAVTTETEVIWAKALPAGTSAQRAELIALTQALKMAEGKKLNVYTDSRYAFATAHIHGEIYRRRGWLTSEGKEIKNKDEILALLKALFLPKRLSIIHCPGHQKGHSAEARGNRMADQAARKAAITETPDTSTLLIENSSPSGGSKRTADGSEFEAGKRTADGSEFEKRTADGSEFESPKKKAKVE

SEQ ID NO: 2656 - protein, 2114 aa, synthetic construct
MPAAKRVKLDGGDKKYSIGLDIGTNSVGWAVITDEYKVPSKKFKVLGNTDRHSIKKNLIGALLFDSGETAEATRLKRTARRRYTRRKNRICYLQEIFSNEMAKVDDSFFHRLEESFLVEEDKKHERHPIFGNIVDEVAYHEKYPTIYHLRKKLVDSTDKADLRLIYLALAHMIKFRGHFLIEGDLNPDNSDVDKLFIQLVQTYNQLFEENPINASGVDAKAILSARLSKSRRLENLIAQLPGEKKNGLFGNLIALSLGLTPNFKSNFDLAEDAKLQLSKDTYDDDLDNLLAQIGDQYADLFLAAKNLSDAILLSDILRVNTEITKAPLSASMIKRYDEHHQDLTLLKALVRQQLPEKYKEIFFDQSKNGYAGYIDGGASQEEFYKFIKPILEKMDGTEELLVKLNREDLLRKQRTFDNGSIPHQIHLGELHAILRRQEDFYPFLKDNREKIEKILTFRIPYYVGPLARGNSRFAWMTRKSEETITPWNFEEVVDKGASAQSFIERMTNFDKNLPNEKVLPKHSLLYEYFTVYNELTKVKYVTEGMRKPAFLSGEQKKAIVDLLFKTNRKVTVKQLKEDYFKKIECFDSVEISGVEDRFNASLGTYHDLLKIIKDKDFLDNEENEDILEDIVLTLTLFEDREMIEERLKTYAHLFDDKVMKQLKRRRYTGWGRLSRKLINGIRDKQSGKTILDFLKSDGFANRNFMQLIHDDSLTFKEDIQKAQVSGQGDSLHEHIANLAGSPAIKKGILQTVKVVDELVKVMGRHKPENIVIEMARENQTTQKGQKNSRERMKRIEEGIKELGSQILKEHPVENTQLQNEKLYLYYLQNGRDMYVDQELDINRLSDYDVDHIVPQSFLKDDSIDNKVLTRSDKARGKSDNVPSEEVVKKMKNYWRQLLNAKLITQRKFDNLTKAERGGLSELDKAGFIKRQLVETRQITKHVAQILDSRMNTKYDENDKLIREVKVITLKSKLVSDFRKDFQFYKVREINNYHHAHDAYLNAVVGTALIKKYPKLESEFVYGDYKVYDVRKMIAKSEQEIGKATAKYFFYSNIMNFFKTEITLANGEIRKRPLIETNGETGEIVWDKGRDFATVRKVLSMPQVNIVKKTEVQTGGFSKESILPKRNSDKLIARKKDWDPKKYGGFDSPTVAYSVLVVAKVEKGKSKKLKSVKELLGITIMERSSFEKNPIDFLEAKGYKEVKKDLIIKLPKYSLFELENGRKRMLASAGELQKGNELALPSKYVNFLYLASHYEKLKGSPEDNEQKQLFVEQHKHYLDEIIEQISEFSKRVILADANLDKVLSAYNKHRDKPIREQAENIIHLFTLTNLGAPAAFKYFDTTIDRKRYTSTKEVLDATLIHQSITGLYETRIDLSQLGGDGGPAPAPAPAPGGTLNIEDEYRLHETSKEPDVSLGSTWLSDFPQAWAETGGMGLAVRQAPLIIPLKATSTPVSIKQYPMSQEARLGIKPHIQRLLDQGILVPCQSPWNTPLLPVKKPGTNDYRPVQDLREVNKRVEDIHPTVPNPYNLLSGLPPSHQWYTVLDLKDAFFCLRLHPTSQPLFAFEWRDPEMGISGQLTWTRLPQGFKNSPTLFNEALHRDLADFRIQHPDLILLQYVDDLLLAATSELDCQQGTRALLQTLGNLGYRASAKKAQICQKQVKYLGYLLKEGQRWLTEARKETVMGQPTPKTPRQLREFLGKAGFCRLFIPGFAEMAAPLYPLTKPGTLFNWGPDQQKAYQEIKQALLTAPALGLPDLTKPFELFVDEKQGYAKGVLTQKLGPWRRPVAYLSKKLDPVAAGWPPCLRMVAAIAVLTKDAGKLTMGQPLVILAPHAVEALVKQPPDRWLSNARMTHYQALLLDTDRVQFGPVVALNPATLLPLPEEGLQHNCLDILAEAHGTRPDLTDQPLPDADHTWYTDGSSLLQEGQRKAGAAVTTETEVIWAKALPAGTSAQRAELIALTQALKMAEGKKLNVYTDSRYAFATAHIHGEIYRRRGWLTSEGKEIKNKDEILALLKALFLPKRLSIIHCPGHQKGHSAEARGNRMADQAARKAAITETPDTSTLLIENSSPSGGSKRTADGSEFEAGKRTADGSEFEKRTADGSEFESPKKKAKVE

SEQ ID NO: 2657 - protein, 2113 aa, synthetic construct
MPAAKRVKLDGGDKKYSIGLDIGTNSVGWAVITDEYKVPSKKFKVLGNTDRHSIKKNLIGALLFDSGETAEATRLKRTARRRYTRRKNRICYLQEIFSNEMAKVDDSFFHRLEESFLVEEDKKHERHPIFGNIVDEVAYHEKYPTIYHLRKKLVDSTDKADLRLIYLALAHMIKFRGHFLIEGDLNPDNSDVDKLFIQLVQTYNQLFEENPINASGVDAKAILSARLSKSRRLENLIAQLPGEKKNGLFGNLIALSLGLTPNFKSNFDLAEDAKLQLSKDTYDDDLDNLLAQIGDQYADLFLAAKNLSDAILLSDILRVNTEITKAPLSASMIKRYDEHHQDLTLLKALVRQQLPEKYKEIFFDQSKNGYAGYIDGGASQEEFYKFIKPILEKMDGTEELLVKLNREDLLRKQRTFDNGSIPHQIHLGELHAILRRQEDFYPFLKDNREKIEKILTFRIPYYVGPLARGNSRFAWMTRKSEETITPWNFEEVVDKGASAQSFIERMTNFDKNLPNEKVLPKHSLLYEYFTVYNELTKVKYVTEGMRKPAFLSGEQKKAIVDLLFKTNRKVTVKQLKEDYFKKIECFDSVEISGVEDRFNASLGTYHDLLKIIKDKDFLDNEENEDILEDIVLTLTLFEDREMIEERLKTYAHLFDDKVMKQLKRRRYTGWGRLSRKLINGIRDKQSGKTILDFLKSDGFANRNFMQLIHDDSLTFKEDIQKAQVSGQGDSLHEHIANLAGSPAIKKGILQTVKVVDELVKVMGRHKPENIVIEMARENQTTQKGQKNSRERMKRIEEGIKELGSQILKEHPVENTQLQNEKLYLYYLQNGRDMYVDQELDINRLSDYDVDHIVPQSFLKDDSIDNKVLTRSDKARGKSDNVPSEEVVKKMKNYWRQLLNAKLITQRKFDNLTKAERGGLSELDKAGFIKRQLVETRQITKHVAQILDSRMNTKYDENDKLIREVKVITLKSKLVSDFRKDFQFYKVREINNYHHAHDAYLNAVVGTALIKKYPKLESEFVYGDYKVYDVRKMIAKSEQEIGKATAKYFFYSNIMNFFKTEITLANGEIRKRPLIETNGETGEIVWDKGRDFATVRKVLSMPQVNIVKKTEVQTGGFSKESILPKRNSDKLIARKKDWDPKKYGGFDSPTVAYSVLVVAKVEKGKSKKLKSVKELLGITIMERSSFEKNPIDFLEAKGYKEVKKDLIIKLPKYSLFELENGRKRMLASAGELQKGNELALPSKYVNFLYLASHYEKLKGSPEDNEQKQLFVEQHKHYLDEIIEQISEFSKRVILADANLDKVLSAYNKHRDKPIREQAENIIHLFTLTNLGAPAAFKYFDTTIDRKRYTSTKEVLDATLIHQSITGLYETRIDLSQLGGDGGEAAAKGGSGGTLNIEDEYRLHETSKEPDVSLGSTWLSDFPQAWAETGGMGLAVRQAPLIIPLKATSTPVSIKQYPMSQEARLGIKPHIQRLLDQGILVPCQSPWNTPLLPVKKPGTNDYRPVQDLREVNKRVEDIHPTVPNPYNLLSGLPPSHQWYTVLDLKDAFFCLRLHPTSQPLFAFEWRDPEMGISGQLTWTRLPQGFKNSPTLFNEALHRDLADFRIQHPDLILLQYVDDLLLAATSELDCQQGTRALLQTLGNLGYRASAKKAQICQKQVKYLGYLLKEGQRWLTEARKETVMGQPTPKTPRQLREFLGKAGFCRLFIPGFAEMAAPLYPLTKPGTLFNWGPDQQKAYQEIKQALLTAPALGLPDLTKPFELFVDEKQGYAKGVLTQKLGPWRRPVAYLSKKLDPVAAGWPPCLRMVAAIAVLTKDAGKLTMGQPLVILAPHAVEALVKQPPDRWLSNARMTHYQALLLDTDRVQFGPVVALNPATLLPLPEEGLQHNCLDILAEAHGTRPDLTDQPLPDADHTWYTDGSSLLQEGQRKAGAAVTTETEVIWAKALPAGTSAQRAELIALTQALKMAEGKKLNVYTDSRYAFATAHIHGEIYRRRGWLTSEGKEIKNKDEILALLKALFLPKRLSIIHCPGHQKGHSAEARGNRMADQAARKAAITETPDTSTLLIENSSPSGGSKRTADGSEFEAGKRTADGSEFEKRTADGSEFESPKKKAKVE

SEQ ID NO: 2658 - protein, 2116 aa, synthetic construct
MPAAKRVKLDGGDKKYSIGLDIGTNSVGWAVITDEYKVPSKKFKVLGNTDRHSIKKNLIGALLFDSGETAEATRLKRTARRRYTRRKNRICYLQEIFSNEMAKVDDSFFHRLEESFLVEEDKKHERHPIFGNIVDEVAYHEKYPTIYHLRKKLVDSTDKADLRLIYLALAHMIKFRGHFLIEGDLNPDNSDVDKLFIQLVQTYNQLFEENPINASGVDAKAILSARLSKSRRLENLIAQLPGEKKNGLFGNLIALSLGLTPNFKSNFDLAEDAKLQLSKDTYDDDLDNLLAQIGDQYADLFLAAKNLSDAILLSDILRVNTEITKAPLSASMIKRYDEHHQDLTLLKALVRQQLPEKYKEIFFDQSKNGYAGYIDGGASQEEFYKFIKPILEKMDGTEELLVKLNREDLLRKQRTFDNGSIPHQIHLGELHAILRRQEDFYPFLKDNREKIEKILTFRIPYYVGPLARGNSRFAWMTRKSEETITPWNFEEVVDKGASAQSFIERMTNFDKNLPNEKVLPKHSLLYEYFTVYNELTKVKYVTEGMRKPAFLSGEQKKAIVDLLFKTNRKVTVKQLKEDYFKKIECFDSVEISGVEDRFNASLGTYHDLLKIIKDKDFLDNEENEDILEDIVLTLTLFEDREMIEERLKTYAHLFDDKVMKQLKRRRYTGWGRLSRKLINGIRDKQSGKTILDFLKSDGFANRNFMQLIHDDSLTFKEDIQKAQVSGQGDSLHEHIANLAGSPAIKKGILQTVKVVDELVKVMGRHKPENIVIEMARENQTTQKGQKNSRERMKRIEEGIKELGSQILKEHPVENTQLQNEKLYLYYLQNGRDMYVDQELDINRLSDYDVDHIVPQSFLKDDSIDNKVLTRSDKARGKSDNVPSEEVVKKMKNYWRQLLNAKLITQRKFDNLTKAERGGLSELDKAGFIKRQLVETRQITKHVAQILDSRMNTKYDENDKLIREVKVITLKSKLVSDFRKDFQFYKVREINNYHHAHDAYLNAVVGTALIKKYPKLESEFVYGDYKVYDVRKMIAKSEQEIGKATAKYFFYSNIMNFFKTEITLANGEIRKRPLIETNGETGEIVWDKGRDFATVRKVLSMPQVNIVKKTEVQTGGFSKESILPKRNSDKLIARKKDWDPKKYGGFDSPTVAYSVLVVAKVEKGKSKKLKSVKELLGITIMERSSFEKNPIDFLEAKGYKEVKKDLIIKLPKYSLFELENGRKRMLASAGELQKGNELALPSKYVNFLYLASHYEKLKGSPEDNEQKQLFVEQHKHYLDEIIEQISEFSKRVILADANLDKVLSAYNKHRDKPIREQAENIIHLFTLTNLGAPAAFKYFDTTIDRKRYTSTKEVLDATLIHQSITGLYETRIDLSQLGGDGGEAAAKGSSPAPGGTLNIEDEYRLHETSKEPDVSLGSTWLSDFPQAWAETGGMGLAVRQAPLIIPLKATSTPVSIKQYPMSQEARLGIKPHIQRLLDQGILVPCQSPWNTPLLPVKKPGTNDYRPVQDLREVNKRVEDIHPTVPNPYNLLSGLPPSHQWYTVLDLKDAFFCLRLHPTSQPLFAFEWRDPEMGISGQLTWTRLPQGFKNSPTLFNEALHRDLADFRIQHPDLILLQYVDDLLLAATSELDCQQGTRALLQTLGNLGYRASAKKAQICQKQVKYLGYLLKEGQRWLTEARKETVMGQPTPKTPRQLREFLGKAGFCRLFIPGFAEMAAPLYPLTKPGTLFNWGPDQQKAYQEIKQALLTAPALGLPDLTKPFELFVDEKQGYAKGVLTQKLGPWRRPVAYLSKKLDPVAAGWPPCLRMVAAIAVLTKDAGKLTMGQPLVILAPHAVEALVKQPPDRWLSNARMTHYQALLLDTDRVQFGPVVALNPATLLPLPEEGLQHNCLDILAEAHGTRPDLTDQPLPDADHTWYTDGSSLLQEGQRKAGAAVTTETEVIWAKALPAGTSAQRAELIALTQALKMAEGKKLNVYTDSRYAFATAHIHGEIYRRRGWLTSEGKEIKNKDEILALLKALFLPKRLSIIHCPGHQKGHSAEARGNRMADQAARKAAITETPDTSTLLIENSSPSGGSKRTADGSEFEAGKRTADGSEFEKRTADGSEFESPKKKAKVE

SEQ ID NO: 2659 - protein, 2113 aa, synthetic construct
MPAAKRVKLDGGDKKYSIGLDIGTNSVGWAVITDEYKVPSKKFKVLGNTDRHSIKKNLIGALLFDSGETAEATRLKRTARRRYTRRKNRICYLQEIFSNEMAKVDDSFFHRLEESFLVEEDKKHERHPIFGNIVDEVAYHEKYPTIYHLRKKLVDSTDKADLRLIYLALAHMIKFRGHFLIEGDLNPDNSDVDKLFIQLVQTYNQLFEENPINASGVDAKAILSARLSKSRRLENLIAQLPGEKKNGLFGNLIALSLGLTPNFKSNFDLAEDAKLQLSKDTYDDDLDNLLAQIGDQYADLFLAAKNLSDAILLSDILRVNTEITKAPLSASMIKRYDEHHQDLTLLKALVRQQLPEKYKEIFFDQSKNGYAGYIDGGASQEEFYKFIKPILEKMDGTEELLVKLNREDLLRKQRTFDNGSIPHQIHLGELHAILRRQEDFYPFLKDNREKIEKILTFRIPYYVGPLARGNSRFAWMTRKSEETITPWNFEEVVDKGASAQSFIERMTNFDKNLPNEKVLPKHSLLYEYFTVYNELTKVKYVTEGMRKPAFLSGEQKKAIVDLLFKTNRKVTVKQLKEDYFKKIECFDSVEISGVEDRFNASLGTYHDLLKIIKDKDFLDNEENEDILEDIVLTLTLFEDREMIEERLKTYAHLFDDKVMKQLKRRRYTGWGRLSRKLINGIRDKQSGKTILDFLKSDGFANRNFMQLIHDDSLTFKEDIQKAQVSGQGDSLHEHIANLAGSPAIKKGILQTVKVVDELVKVMGRHKPENIVIEMARENQTTQKGQKNSRERMKRIEEGIKELGSQILKEHPVENTQLQNEKLYLYYLQNGRDMYVDQELDINRLSDYDVDHIVPQSFLKDDSIDNKVLTRSDKARGKSDNVPSEEVVKKMKNYWRQLLNAKLITQRKFDNLTKAERGGLSELDKAGFIKRQLVETRQITKHVAQILDSRMNTKYDENDKLIREVKVITLKSKLVSDFRKDFQFYKVREINNYHHAHDAYLNAVVGTALIKKYPKLESEFVYGDYKVYDVRKMIAKSEQEIGKATAKYFFYSNIMNFFKTEITLANGEIRKRPLIETNGETGEIVWDKGRDFATVRKVLSMPQVNIVKKTEVQTGGFSKESILPKRNSDKLIARKKDWDPKKYGGFDSPTVAYSVLVVAKVEKGKSKKLKSVKELLGITIMERSSFEKNPIDFLEAKGYKEVKKDLIIKLPKYSLFELENGRKRMLASAGELQKGNELALPSKYVNFLYLASHYEKLKGSPEDNEQKQLFVEQHKHYLDEIIEQISEFSKRVILADANLDKVLSAYNKHRDKPIREQAENIIHLFTLTNLGAPAAFKYFDTTIDRKRYTSTKEVLDATLIHQSITGLYETRIDLSQLGGDGGEAAAKGGGGGTLNIEDEYRLHETSKEPDVSLGSTWLSDFPQAWAETGGMGLAVRQAPLIIPLKATSTPVSIKQYPMSQEARLGIKPHIQRLLDQGILVPCQSPWNTPLLPVKKPGTNDYRPVQDLREVNKRVEDIHPTVPNPYNLLSGLPPSHQWYTVLDLKDAFFCLRLHPTSQPLFAFEWRDPEMGISGQLTWTRLPQGFKNSPTLFNEALHRDLADFRIQHPDLILLQYVDDLLLAATSELDCQQGTRALLQTLGNLGYRASAKKAQICQKQVKYLGYLLKEGQRWLTEARKETVMGQPTPKTPRQLREFLGKAGFCRLFIPGFAEMAAPLYPLTKPGTLFNWGPDQQKAYQEIKQALLTAPALGLPDLTKPFELFVDEKQGYAKGVLTQKLGPWRRPVAYLSKKLDPVAAGWPPCLRMVAAIAVLTKDAGKLTMGQPLVILAPHAVEALVKQPPDRWLSNARMTHYQALLLDTDRVQFGPVVALNPATLLPLPEEGLQHNCLDILAEAHGTRPDLTDQPLPDADHTWYTDGSSLLQEGQRKAGAAVTTETEVIWAKALPAGTSAQRAELIALTQALKMAEGKKLNVYTDSRYAFATAHIHGEIYRRRGWLTSEGKEIKNKDEILALLKALFLPKRLSIIHCPGHQKGHSAEARGNRMADQAARKAAITETPDTSTLLIENSSPSGGSKRTADGSEFEAGKRTADGSEFEKRTADGSEFESPKKKAKVE

SEQ ID NO: 2660 - protein, 2116 aa, synthetic construct
MPAAKRVKLDGGDKKYSIGLDIGTNSVGWAVITDEYKVPSKKFKVLGNTDRHSIKKNLIGALLFDSGETAEATRLKRTARRRYTRRKNRICYLQEIFSNEMAKVDDSFFHRLEESFLVEEDKKHERHPIFGNIVDEVAYHEKYPTIYHLRKKLVDSTDKADLRLIYLALAHMIKFRGHFLIEGDLNPDNSDVDKLFIQLVQTYNQLFEENPINASGVDAKAILSARLSKSRRLENLIAQLPGEKKNGLFGNLIALSLGLTPNFKSNFDLAEDAKLQLSKDTYDDDLDNLLAQIGDQYADLFLAAKNLSDAILLSDILRVNTEITKAPLSASMIKRYDEHHQDLTLLKALVRQQLPEKYKEIFFDQSKNGYAGYIDGGASQEEFYKFIKPILEKMDGTEELLVKLNREDLLRKQRTFDNGSIPHQIHLGELHAILRRQEDFYPFLKDNREKIEKILTFRIPYYVGPLARGNSRFAWMTRKSEETITPWNFEEVVDKGASAQSFIERMTNFDKNLPNEKVLPKHSLLYEYFTVYNELTKVKYVTEGMRKPAFLSGEQKKAIVDLLFKTNRKVTVKQLKEDYFKKIECFDSVEISGVEDRFNASLGTYHDLLKIIKDKDFLDNEENEDILEDIVLTLTLFEDREMIEERLKTYAHLFDDKVMKQLKRRRYTGWGRLSRKLINGIRDKQSGKTILDFLKSDGFANRNFMQLIHDDSLTFKEDIQKAQVSGQGDSLHEHIANLAGSPAIKKGILQTVKVVDELVKVMGRHKPENIVIEMARENQTTQKGQKNSRERMKRIEEGIKELGSQILKEHPVENTQLQNEKLYLYYLQNGRDMYVDQELDINRLSDYDVDHIVPQSFLKDDSIDNKVLTRSDKARGKSDNVPSEEVVKKMKNYWRQLLNAKLITQRKFDNLTKAERGGLSELDKAGFIKRQLVETRQITKHVAQILDSRMNTKYDENDKLIREVKVITLKSKLVSDFRKDFQFYKVREINNYHHAHDAYLNAVVGTALIKKYPKLESEFVYGDYKVYDVRKMIAKSEQEIGKATAKYFFYSNIMNFFKTEITLANGEIRKRPLIETNGETGEIVWDKGRDFATVRKVLSMPQVNIVKKTEVQTGGFSKESILPKRNSDKLIARKKDWDPKKYGGFDSPTVAYSVLVVAKVEKGKSKKLKSVKELLGITIMERSSFEKNPIDFLEAKGYKEVKKDLIIKLPKYSLFELENGRKRMLASAGELQKGNELALPSKYVNFLYLASHYEKLKGSPEDNEQKQLFVEQHKHYLDEIIEQISEFSKRVILADANLDKVLSAYNKHRDKPIREQAENIIHLFTLTNLGAPAAFKYFDTTIDRKRYTSTKEVLDATLIHQSITGLYETRIDLSQLGGDGGGGSGSSEAAAKGGTLNIEDEYRLHETSKEPDVSLGSTWLSDFPQAWAETGGMGLAVRQAPLIIPLKATSTPVSIKQYPMSQEARLGIKPHIQRLLDQGILVPCQSPWNTPLLPVKKPGTNDYRPVQDLREVNKRVEDIHPTVPNPYNLLSGLPPSHQWYTVLDLKDAFFCLRLHPTSQPLFAFEWRDPEMGISGQLTWTRLPQGFKNSPTLFNEALHRDLADFRIQHPDLILLQYVDDLLLAATSELDCQQGTRALLQTLGNLGYRASAKKAQICQKQVKYLGYLLKEGQRWLTEARKETVMGQPTPKTPRQLREFLGKAGFCRLFIPGFAEMAAPLYPLTKPGTLFNWGPDQQKAYQEIKQALLTAPALGLPDLTKPFELFVDEKQGYAKGVLTQKLGPWRRPVAYLSKKLDPVAAGWPPCLRMVAAIAVLTKDAGKLTMGQPLVILAPHAVEALVKQPPDRWLSNARMTHYQALLLDTDRVQFGPVVALNPATLLPLPEEGLQHNCLDILAEAHGTRPDLTDQPLPDADHTWYTDGSSLLQEGQRKAGAAVTTETEVIWAKALPAGTSAQRAELIALTQALKMAEGKKLNVYTDSRYAFATAHIHGEIYRRRGWLTSEGKEIKNKDEILALLKALFLPKRLSIIHCPGHQKGHSAEARGNRMADQAARKAAITETPDTSTLLIENSSPSGGSKRTADGSEFEAGKRTADGSEFEKRTADGSEFESPKKKAKVE

SEQ ID NO: 2661 - protein, 2116 aa, synthetic construct
MPAAKRVKLDGGDKKYSIGLDIGTNSVGWAVITDEYKVPSKKFKVLGNTDRHSIKKNLIGALLFDSGETAEATRLKRTARRRYTRRKNRICYLQEIFSNEMAKVDDSFFHRLEESFLVEEDKKHERHPIFGNIVDEVAYHEKYPTIYHLRKKLVDSTDKADLRLIYLALAHMIKFRGHFLIEGDLNPDNSDVDKLFIQLVQTYNQLFEENPINASGVDAKAILSARLSKSRRLENLIAQLPGEKKNGLFGNLIALSLGLTPNFKSNFDLAEDAKLQLSKDTYDDDLDNLLAQIGDQYADLFLAAKNLSDAILLSDILRVNTEITKAPLSASMIKRYDEHHQDLTLLKALVRQQLPEKYKEIFFDQSKNGYAGYIDGGASQEEFYKFIKPILEKMDGTEELLVKLNREDLLRKQRTFDNGSIPHQIHLGELHAILRRQEDFYPFLKDNREKIEKILTFRIPYYVGPLARGNSRFAWMTRKSEETITPWNFEEVVDKGASAQSFIERMTNFDKNLPNEKVLPKHSLLYEYFTVYNELTKVKYVTEGMRKPAFLSGEQKKAIVDLLFKTNRKVTVKQLKEDYFKKIECFDSVEISGVEDRFNASLGTYHDLLKIIKDKDFLDNEENEDILEDIVLTLTLFEDREMIEERLKTYAHLFDDKVMKQLKRRRYTGWGRLSRKLINGIRDKQSGKTILDFLKSDGFANRNFMQLIHDDSLTFKEDIQKAQVSGQGDSLHEHIANLAGSPAIKKGILQTVKVVDELVKVMGRHKPENIVIEMARENQTTQKGQKNSRERMKRIEEGIKELGSQILKEHPVENTQLQNEKLYLYYLQNGRDMYVDQELDINRLSDYDVDHIVPQSFLKDDSIDNKVLTRSDKARGKSDNVPSEEVVKKMKNYWRQLLNAKLITQRKFDNLTKAERGGLSELDKAGFIKRQLVETRQITKHVAQILDSRMNTKYDENDKLIREVKVITLKSKLVSDFRKDFQFYKVREINNYHHAHDAYLNAVVGTALIKKYPKLESEFVYGDYKVYDVRKMIAKSEQEIGKATAKYFFYSNIMNFFKTEITLANGEIRKRPLIETNGETGEIVWDKGRDFATVRKVLSMPQVNIVKKTEVQTGGFSKESILPKRNSDKLIARKKDWDPKKYGGFDSPTVAYSVLVVAKVEKGKSKKLKSVKELLGITIMERSSFEKNPIDFLEAKGYKEVKKDLIIKLPKYSLFELENGRKRMLASAGELQKGNELALPSKYVNFLYLASHYEKLKGSPEDNEQKQLFVEQHKHYLDEIIEQISEFSKRVILADANLDKVLSAYNKHRDKPIREQAENIIHLFTLTNLGAPAAFKYFDTTIDRKRYTSTKEVLDATLIHQSITGLYETRIDLSQLGGDGGGSSGGSEAAAKGGTLNIEDEYRLHETSKEPDVSLGSTWLSDFPQAWAETGGMGLAVRQAPLIIPLKATSTPVSIKQYPMSQEARLGIKPHIQRLLDQGILVPCQSPWNTPLLPVKKPGTNDYRPVQDLREVNKRVEDIHPTVPNPYNLLSGLPPSHQWYTVLDLKDAFFCLRLHPTSQPLFAFEWRDPEMGISGQLTWTRLPQGFKNSPTLFNEALHRDLADFRIQHPDLILLQYVDDLLLAATSELDCQQGTRALLQTLGNLGYRASAKKAQICQKQVKYLGYLLKEGQRWLTEARKETVMGQPTPKTPRQLREFLGKAGFCRLFIPGFAEMAAPLYPLTKPGTLFNWGPDQQKAYQEIKQALLTAPALGLPDLTKPFELFVDEKQGYAKGVLTQKLGPWRRPVAYLSKKLDPVAAGWPPCLRMVAAIAVLTKDAGKLTMGQPLVILAPHAVEALVKQPPDRWLSNARMTHYQALLLDTDRVQFGPVVALNPATLLPLPEEGLQHNCLDILAEAHGTRPDLTDQPLPDADHTWYTDGSSLLQEGQRKAGAAVTTETEVIWAKALPAGTSAQRAELIALTQALKMAEGKKLNVYTDSRYAFATAHIHGEIYRRRGWLTSEGKEIKNKDEILALLKALFLPKRLSIIHCPGHQKGHSAEARGNRMADQAARKAAITETPDTSTLLIENSSPSGGSKRTADGSEFEAGKRTADGSEFEKRTADGSEFESPKKKAKVE

SEQ ID NO: 2662 - protein, 2120 aa, synthetic construct
MPAAKRVKLDGGDKKYSIGLDIGTNSVGWAVITDEYKVPSKKFKVLGNTDRHSIKKNLIGALLFDSGETAEATRLKRTARRRYTRRKNRICYLQEIFSNEMAKVDDSFFHRLEESFLVEEDKKHERHPIFGNIVDEVAYHEKYPTIYHLRKKLVDSTDKADLRLIYLALAHMIKFRGHFLIEGDLNPDNSDVDKLFIQLVQTYNQLFEENPINASGVDAKAILSARLSKSRRLENLIAQLPGEKKNGLFGNLIALSLGLTPNFKSNFDLAEDAKLQLSKDTYDDDLDNLLAQIGDQYADLFLAAKNLSDAILLSDILRVNTEITKAPLSASMIKRYDEHHQDLTLLKALVRQQLPEKYKEIFFDQSKNGYAGYIDGGASQEEFYKFIKPILEKMDGTEELLVKLNREDLLRKQRTFDNGSIPHQIHLGELHAILRRQEDFYPFLKDNREKIEKILTFRIPYYVGPLARGNSRFAWMTRKSEETITPWNFEEVVDKGASAQSFIERMTNFDKNLPNEKVLPKHSLLYEYFTVYNELTKVKYVTEGMRKPAFLSGEQKKAIVDLLFKTNRKVTVKQLKEDYFKKIECFDSVEISGVEDRFNASLGTYHDLLKIIKDKDFLDNEENEDILEDIVLTLTLFEDREMIEERLKTYAHLFDDKVMKQLKRRRYTGWGRLSRKLINGIRDKQSGKTILDFLKSDGFANRNFMQLIHDDSLTFKEDIQKAQVSGQGDSLHEHIANLAGSPAIKKGILQTVKVVDELVKVMGRHKPENIVIEMARENQTTQKGQKNSRERMKRIEEGIKELGSQILKEHPVENTQLQNEKLYLYYLQNGRDMYVDQELDINRLSDYDVDHIVPQSFLKDDSIDNKVLTRSDKARGKSDNVPSEEVVKKMKNYWRQLLNAKLITQRKFDNLTKAERGGLSELDKAGFIKRQLVETRQITKHVAQILDSRMNTKYDENDKLIREVKVITLKSKLVSDFRKDFQFYKVREINNYHHAHDAYLNAVVGTALIKKYPKLESEFVYGDYKVYDVRKMIAKSEQEIGKATAKYFFYSNIMNFFKTEITLANGEIRKRPLIETNGETGEIVWDKGRDFATVRKVLSMPQVNIVKKTEVQTGGFSKESILPKRNSDKLIARKKDWDPKKYGGFDSPTVAYSVLVVAKVEKGKSKKLKSVKELLGITIMERSSFEKNPIDFLEAKGYKEVKKDLIIKLPKYSLFELENGRKRMLASAGELQKGNELALPSKYVNFLYLASHYEKLKGSPEDNEQKQLFVEQHKHYLDEIIEQISEFSKRVILADANLDKVLSAYNKHRDKPIREQAENIIHLFTLTNLGAPAAFKYFDTTIDRKRYTSTKEVLDATLIHQSITGLYETRIDLSQLGGDGGGGGGSGGGGSGGGGSGGTLNIEDEYRLHETSKEPDVSLGSTWLSDFPQAWAETGGMGLAVRQAPLIIPLKATSTPVSIKQYPMSQEARLGIKPHIQRLLDQGILVPCQSPWNTPLLPVKKPGTNDYRPVQDLREVNKRVEDIHPTVPNPYNLLSGLPPSHQWYTVLDLKDAFFCLRLHPTSQPLFAFEWRDPEMGISGQLTWTRLPQGFKNSPTLFNEALHRDLADFRIQHPDLILLQYVDDLLLAATSELDCQQGTRALLQTLGNLGYRASAKKAQICQKQVKYLGYLLKEGQRWLTEARKETVMGQPTPKTPRQLREFLGKAGFCRLFIPGFAEMAAPLYPLTKPGTLFNWGPDQQKAYQEIKQALLTAPALGLPDLTKPFELFVDEKQGYAKGVLTQKLGPWRRPVAYLSKKLDPVAAGWPPCLRMVAAIAVLTKDAGKLTMGQPLVILAPHAVEALVKQPPDRWLSNARMTHYQALLLDTDRVQFGPVVALNPATLLPLPEEGLQHNCLDILAEAHGTRPDLTDQPLPDADHTWYTDGSSLLQEGQRKAGAAVTTETEVIWAKALPAGTSAQRAELIALTQALKMAEGKKLNVYTDSRYAFATAHIHGEIYRRRGWLTSEGKEIKNKDEILALLKALFLPKRLSIIHCPGHQKGHSAEARGNRMADQAARKAAITETPDTSTLLIENSSPSGGSKRTADGSEFEAGKRTADGSEFEKRTADGSEFESPKKKAKVE

SEQ ID NO: 2663 - protein, 2121 aa, synthetic construct
MPAAKRVKLDGGDKKYSIGLDIGTNSVGWAVITDEYKVPSKKFKVLGNTDRHSIKKNLIGALLFDSGETAEATRLKRTARRRYTRRKNRICYLQEIFSNEMAKVDDSFFHRLEESFLVEEDKKHERHPIFGNIVDEVAYHEKYPTIYHLRKKLVDSTDKADLRLIYLALAHMIKFRGHFLIEGDLNPDNSDVDKLFIQLVQTYNQLFEENPINASGVDAKAILSARLSKSRRLENLIAQLPGEKKNGLFGNLIALSLGLTPNFKSNFDLAEDAKLQLSKDTYDDDLDNLLAQIGDQYADLFLAAKNLSDAILLSDILRVNTEITKAPLSASMIKRYDEHHQDLTLLKALVRQQLPEKYKEIFFDQSKNGYAGYIDGGASQEEFYKFIKPILEKMDGTEELLVKLNREDLLRKQRTFDNGSIPHQIHLGELHAILRRQEDFYPFLKDNREKIEKILTFRIPYYVGPLARGNSRFAWMTRKSEETITPWNFEEVVDKGASAQSFIERMTNFDKNLPNEKVLPKHSLLYEYFTVYNELTKVKYVTEGMRKPAFLSGEQKKAIVDLLFKTNRKVTVKQLKEDYFKKIECFDSVEISGVEDRFNASLGTYHDLLKIIKDKDFLDNEENEDILEDIVLTLTLFEDREMIEERLKTYAHLFDDKVMKQLKRRRYTGWGRLSRKLINGIRDKQSGKTILDFLKSDGFANRNFMQLIHDDSLTFKEDIQKAQVSGQGDSLHEHIANLAGSPAIKKGILQTVKVVDELVKVMGRHKPENIVIEMARENQTTQKGQKNSRERMKRIEEGIKELGSQILKEHPVENTQLQNEKLYLYYLQNGRDMYVDQELDINRLSDYDVDHIVPQSFLKDDSIDNKVLTRSDKARGKSDNVPSEEVVKKMKNYWRQLLNAKLITQRKFDNLTKAERGGLSELDKAGFIKRQLVETRQITKHVAQILDSRMNTKYDENDKLIREVKVITLKSKLVSDFRKDFQFYKVREINNYHHAHDAYLNAVVGTALIKKYPKLESEFVYGDYKVYDVRKMIAKSEQEIGKATAKYFFYSNIMNFFKTEITLANGEIRKRPLIETNGETGEIVWDKGRDFATVRKVLSMPQVNIVKKTEVQTGGFSKESILPKRNSDKLIARKKDWDPKKYGGFDSPTVAYSVLVVAKVEKGKSKKLKSVKELLGITIMERSSFEKNPIDFLEAKGYKEVKKDLIIKLPKYSLFELENGRKRMLASAGELQKGNELALPSKYVNFLYLASHYEKLKGSPEDNEQKQLFVEQHKHYLDEIIEQISEFSKRVILADANLDKVLSAYNKHRDKPIREQAENIIHLFTLTNLGAPAAFKYFDTTIDRKRYTSTKEVLDATLIHQSITGLYETRIDLSQLGGDGGSGSETPGTSESATPESGGTLNIEDEYRLHETSKEPDVSLGSTWLSDFPQAWAETGGMGLAVRQAPLIIPLKATSTPVSIKQYPMSQEARLGIKPHIQRLLDQGILVPCQSPWNTPLLPVKKPGTNDYRPVQDLREVNKRVEDIHPTVPNPYNLLSGLPPSHQWYTVLDLKDAFFCLRLHPTSQPLFAFEWRDPEMGISGQLTWTRLPQGFKNSPTLFNEALHRDLADFRIQHPDLILLQYVDDLLLAATSELDCQQGTRALLQTLGNLGYRASAKKAQICQKQVKYLGYLLKEGQRWLTEARKETVMGQPTPKTPRQLREFLGKAGFCRLFIPGFAEMAAPLYPLTKPGTLFNWGPDQQKAYQEIKQALLTAPALGLPDLTKPFELFVDEKQGYAKGVLTQKLGPWRRPVAYLSKKLDPVAAGWPPCLRMVAAIAVLTKDAGKLTMGQPLVILAPHAVEALVKQPPDRWLSNARMTHYQALLLDTDRVQFGPVVALNPATLLPLPEEGLQHNCLDILAEAHGTRPDLTDQPLPDADHTWYTDGSSLLQEGQRKAGAAVTTETEVIWAKALPAGTSAQRAELIALTQALKMAEGKKLNVYTDSRYAFATAHIHGEIYRRRGWLTSEGKEIKNKDEILALLKALFLPKRLSIIHCPGHQKGHSAEARGNRMADQAARKAAITETPDTSTLLIENSSPSGGSKRTADGSEFEAGKRTADGSEFEKRTADGSEFESPKKKAKVE

SEQ ID NO: 2664 - protein, 2114 aa, synthetic construct
MPAAKRVKLDGGDKKYSIGLDIGTNSVGWAVITDEYKVPSKKFKVLGNTDRHSIKKNLIGALLFDSGETAEATRLKRTARRRYTRRKNRICYLQEIFSNEMAKVDDSFFHRLEESFLVEEDKKHERHPIFGNIVDEVAYHEKYPTIYHLRKKLVDSTDKADLRLIYLALAHMIKFRGHFLIEGDLNPDNSDVDKLFIQLVQTYNQLFEENPINASGVDAKAILSARLSKSRRLENLIAQLPGEKKNGLFGNLIALSLGLTPNFKSNFDLAEDAKLQLSKDTYDDDLDNLLAQIGDQYADLFLAAKNLSDAILLSDILRVNTEITKAPLSASMIKRYDEHHQDLTLLKALVRQQLPEKYKEIFFDQSKNGYAGYIDGGASQEEFYKFIKPILEKMDGTEELLVKLNREDLLRKQRTFDNGSIPHQIHLGELHAILRRQEDFYPFLKDNREKIEKILTFRIPYYVGPLARGNSRFAWMTRKSEETITPWNFEEVVDKGASAQSFIERMTNFDKNLPNEKVLPKHSLLYEYFTVYNELTKVKYVTEGMRKPAFLSGEQKKAIVDLLFKTNRKVTVKQLKEDYFKKIECFDSVEISGVEDRFNASLGTYHDLLKIIKDKDFLDNEENEDILEDIVLTLTLFEDREMIEERLKTYAHLFDDKVMKQLKRRRYTGWGRLSRKLINGIRDKQSGKTILDFLKSDGFANRNFMQLIHDDSLTFKEDIQKAQVSGQGDSLHEHIANLAGSPAIKKGILQTVKVVDELVKVMGRHKPENIVIEMARENQTTQKGQKNSRERMKRIEEGIKELGSQILKEHPVENTQLQNEKLYLYYLQNGRDMYVDQELDINRLSDYDVDHIVPQSFLKDDSIDNKVLTRSDKARGKSDNVPSEEVVKKMKNYWRQLLNAKLITQRKFDNLTKAERGGLSELDKAGFIKRQLVETRQITKHVAQILDSRMNTKYDENDKLIREVKVITLKSKLVSDFRKDFQFYKVREINNYHHAHDAYLNAVVGTALIKKYPKLESEFVYGDYKVYDVRKMIAKSEQEIGKATAKYFFYSNIMNFFKTEITLANGEIRKRPLIETNGETGEIVWDKGRDFATVRKVLSMPQVNIVKKTEVQTGGFSKESILPKRNSDKLIARKKDWDPKKYGGFDSPTVAYSVLVVAKVEKGKSKKLKSVKELLGITIMERSSFEKNPIDFLEAKGYKEVKKDLIIKLPKYSLFELENGRKRMLASAGELQKGNELALPSKYVNFLYLASHYEKLKGSPEDNEQKQLFVEQHKHYLDEIIEQISEFSKRVILADANLDKVLSAYNKHRDKPIREQAENIIHLFTLTNLGAPAAFKYFDTTIDRKRYTSTKEVLDATLIHQSITGLYETRIDLSQLGGDGGGGGGSSPAPGGTLNIEDEYRLHETSKEPDVSLGSTWLSDFPQAWAETGGMGLAVRQAPLIIPLKATSTPVSIKQYPMSQEARLGIKPHIQRLLDQGILVPCQSPWNTPLLPVKKPGTNDYRPVQDLREVNKRVEDIHPTVPNPYNLLSGLPPSHQWYTVLDLKDAFFCLRLHPTSQPLFAFEWRDPEMGISGQLTWTRLPQGFKNSPTLFNEALHRDLADFRIQHPDLILLQYVDDLLLAATSELDCQQGTRALLQTLGNLGYRASAKKAQICQKQVKYLGYLLKEGQRWLTEARKETVMGQPTPKTPRQLREFLGKAGFCRLFIPGFAEMAAPLYPLTKPGTLFNWGPDQQKAYQEIKQALLTAPALGLPDLTKPFELFVDEKQGYAKGVLTQKLGPWRRPVAYLSKKLDPVAAGWPPCLRMVAAIAVLTKDAGKLTMGQPLVILAPHAVEALVKQPPDRWLSNARMTHYQALLLDTDRVQFGPVVALNPATLLPLPEEGLQHNCLDILAEAHGTRPDLTDQPLPDADHTWYTDGSSLLQEGQRKAGAAVTTETEVIWAKALPAGTSAQRAELIALTQALKMAEGKKLNVYTDSRYAFATAHIHGEIYRRRGWLTSEGKEIKNKDEILALLKALFLPKRLSIIHCPGHQKGHSAEARGNRMADQAARKAAITETPDTSTLLIENSSPSGGSKRTADGSEFEAGKRTADGSEFEKRTADGSEFESPKKKAKVE

SEQ ID NO: 2665 - protein, 2117 aa, synthetic construct
MPAAKRVKLDGGDKKYSIGLDIGTNSVGWAVITDEYKVPSKKFKVLGNTDRHSIKKNLIGALLFDSGETAEATRLKRTARRRYTRRKNRICYLQEIFSNEMAKVDDSFFHRLEESFLVEEDKKHERHPIFGNIVDEVAYHEKYPTIYHLRKKLVDSTDKADLRLIYLALAHMIKFRGHFLIEGDLNPDNSDVDKLFIQLVQTYNQLFEENPINASGVDAKAILSARLSKSRRLENLIAQLPGEKKNGLFGNLIALSLGLTPNFKSNFDLAEDAKLQLSKDTYDDDLDNLLAQIGDQYADLFLAAKNLSDAILLSDILRVNTEITKAPLSASMIKRYDEHHQDLTLLKALVRQQLPEKYKEIFFDQSKNGYAGYIDGGASQEEFYKFIKPILEKMDGTEELLVKLNREDLLRKQRTFDNGSIPHQIHLGELHAILRRQEDFYPFLKDNREKIEKILTFRIPYYVGPLARGNSRFAWMTRKSEETITPWNFEEVVDKGASAQSFIERMTNFDKNLPNEKVLPKHSLLYEYFTVYNELTKVKYVTEGMRKPAFLSGEQKKAIVDLLFKTNRKVTVKQLKEDYFKKIECFDSVEISGVEDRFNASLGTYHDLLKIIKDKDFLDNEENEDILEDIVLTLTLFEDREMIEERLKTYAHLFDDKVMKQLKRRRYTGWGRLSRKLINGIRDKQSGKTILDFLKSDGFANRNFMQLIHDDSLTFKEDIQKAQVSGQGDSLHEHIANLAGSPAIKKGILQTVKVVDELVKVMGRHKPENIVIEMARENQTTQKGQKNSRERMKRIEEGIKELGSQILKEHPVENTQLQNEKLYLYYLQNGRDMYVDQELDINRLSDYDVDHIVPQSFLKDDSIDNKVLTRSDKARGKSDNVPSEEVVKKMKNYWRQLLNAKLITQRKFDNLTKAERGGLSELDKAGFIKRQLVETRQITKHVAQILDSRMNTKYDENDKLIREVKVITLKSKLVSDFRKDFQFYKVREINNYHHAHDAYLNAVVGTALIKKYPKLESEFVYGDYKVYDVRKMIAKSEQEIGKATAKYFFYSNIMNFFKTEITLANGEIRKRPLIETNGETGEIVWDKGRDFATVRKVLSMPQVNIVKKTEVQTGGFSKESILPKRNSDKLIARKKDWDPKKYGGFDSPTVAYSVLVVAKVEKGKSKKLKSVKELLGITIMERSSFEKNPIDFLEAKGYKEVKKDLIIKLPKYSLFELENGRKRMLASAGELQKGNELALPSKYVNFLYLASHYEKLKGSPEDNEQKQLFVEQHKHYLDEIIEQISEFSKRVILADANLDKVLSAYNKHRDKPIREQAENIIHLFTLTNLGAPAAFKYFDTTIDRKRYTSTKEVLDATLIHQSITGLYETRIDLSQLGGDGGGSSGSSGSSGSSGGTLNIEDEYRLHETSKEPDVSLGSTWLSDFPQAWAETGGMGLAVRQAPLIIPLKATSTPVSIKQYPMSQEARLGIKPHIQRLLDQGILVPCQSPWNTPLLPVKKPGTNDYRPVQDLREVNKRVEDIHPTVPNPYNLLSGLPPSHQWYTVLDLKDAFFCLRLHPTSQPLFAFEWRDPEMGISGQLTWTRLPQGFKNSPTLFNEALHRDLADFRIQHPDLILLQYVDDLLLAATSELDCQQGTRALLQTLGNLGYRASAKKAQICQKQVKYLGYLLKEGQRWLTEARKETVMGQPTPKTPRQLREFLGKAGFCRLFIPGFAEMAAPLYPLTKPGTLFNWGPDQQKAYQEIKQALLTAPALGLPDLTKPFELFVDEKQGYAKGVLTQKLGPWRRPVAYLSKKLDPVAAGWPPCLRMVAAIAVLTKDAGKLTMGQPLVILAPHAVEALVKQPPDRWLSNARMTHYQALLLDTDRVQFGPVVALNPATLLPLPEEGLQHNCLDILAEAHGTRPDLTDQPLPDADHTWYTDGSSLLQEGQRKAGAAVTTETEVIWAKALPAGTSAQRAELIALTQALKMAEGKKLNVYTDSRYAFATAHIHGEIYRRRGWLTSEGKEIKNKDEILALLKALFLPKRLSIIHCPGHQKGHSAEARGNRMADQAARKAAITETPDTSTLLIENSSPSGGSKRTADGSEFEAGKRTADGSEFEKRTADGSEFESPKKKAKVE

SEQ ID NO: 2666 - protein, 2116 aa, synthetic construct
MPAAKRVKLDGGDKKYSIGLDIGTNSVGWAVITDEYKVPSKKFKVLGNTDRHSIKKNLIGALLFDSGETAEATRLKRTARRRYTRRKNRICYLQEIFSNEMAKVDDSFFHRLEESFLVEEDKKHERHPIFGNIVDEVAYHEKYPTIYHLRKKLVDSTDKADLRLIYLALAHMIKFRGHFLIEGDLNPDNSDVDKLFIQLVQTYNQLFEENPINASGVDAKAILSARLSKSRRLENLIAQLPGEKKNGLFGNLIALSLGLTPNFKSNFDLAEDAKLQLSKDTYDDDLDNLLAQIGDQYADLFLAAKNLSDAILLSDILRVNTEITKAPLSASMIKRYDEHHQDLTLLKALVRQQLPEKYKEIFFDQSKNGYAGYIDGGASQEEFYKFIKPILEKMDGTEELLVKLNREDLLRKQRTFDNGSIPHQIHLGELHAILRRQEDFYPFLKDNREKIEKILTFRIPYYVGPLARGNSRFAWMTRKSEETITPWNFEEVVDKGASAQSFIERMTNFDKNLPNEKVLPKHSLLYEYFTVYNELTKVKYVTEGMRKPAFLSGEQKKAIVDLLFKTNRKVTVKQLKEDYFKKIECFDSVEISGVEDRFNASLGTYHDLLKIIKDKDFLDNEENEDILEDIVLTLTLFEDREMIEERLKTYAHLFDDKVMKQLKRRRYTGWGRLSRKLINGIRDKQSGKTILDFLKSDGFANRNFMQLIHDDSLTFKEDIQKAQVSGQGDSLHEHIANLAGSPAIKKGILQTVKVVDELVKVMGRHKPENIVIEMARENQTTQKGQKNSRERMKRIEEGIKELGSQILKEHPVENTQLQNEKLYLYYLQNGRDMYVDQELDINRLSDYDVDHIVPQSFLKDDSIDNKVLTRSDKARGKSDNVPSEEVVKKMKNYWRQLLNAKLITQRKFDNLTKAERGGLSELDKAGFIKRQLVETRQITKHVAQILDSRMNTKYDENDKLIREVKVITLKSKLVSDFRKDFQFYKVREINNYHHAHDAYLNAVVGTALIKKYPKLESEFVYGDYKVYDVRKMIAKSEQEIGKATAKYFFYSNIMNFFKTEITLANGEIRKRPLIETNGETGEIVWDKGRDFATVRKVLSMPQVNIVKKTEVQTGGFSKESILPKRNSDKLIARKKDWDPKKYGGFDSPTVAYSVLVVAKVEKGKSKKLKSVKELLGITIMERSSFEKNPIDFLEAKGYKEVKKDLIIKLPKYSLFELENGRKRMLASAGELQKGNELALPSKYVNFLYLASHYEKLKGSPEDNEQKQLFVEQHKHYLDEIIEQISEFSKRVILADANLDKVLSAYNKHRDKPIREQAENIIHLFTLTNLGAPAAFKYFDTTIDRKRYTSTKEVLDATLIHQSITGLYETRIDLSQLGGDGGEAAAKGGSGSSGGTLNIEDEYRLHETSKEPDVSLGSTWLSDFPQAWAETGGMGLAVRQAPLIIPLKATSTPVSIKQYPMSQEARLGIKPHIQRLLDQGILVPCQSPWNTPLLPVKKPGTNDYRPVQDLREVNKRVEDIHPTVPNPYNLLSGLPPSHQWYTVLDLKDAFFCLRLHPTSQPLFAFEWRDPEMGISGQLTWTRLPQGFKNSPTLFNEALHRDLADFRIQHPDLILLQYVDDLLLAATSELDCQQGTRALLQTLGNLGYRASAKKAQICQKQVKYLGYLLKEGQRWLTEARKETVMGQPTPKTPRQLREFLGKAGFCRLFIPGFAEMAAPLYPLTKPGTLFNWGPDQQKAYQEIKQALLTAPALGLPDLTKPFELFVDEKQGYAKGVLTQKLGPWRRPVAYLSKKLDPVAAGWPPCLRMVAAIAVLTKDAGKLTMGQPLVILAPHAVEALVKQPPDRWLSNARMTHYQALLLDTDRVQFGPVVALNPATLLPLPEEGLQHNCLDILAEAHGTRPDLTDQPLPDADHTWYTDGSSLLQEGQRKAGAAVTTETEVIWAKALPAGTSAQRAELIALTQALKMAEGKKLNVYTDSRYAFATAHIHGEIYRRRGWLTSEGKEIKNKDEILALLKALFLPKRLSIIHCPGHQKGHSAEARGNRMADQAARKAAITETPDTSTLLIENSSPSGGSKRTADGSEFEAGKRTADGSEFEKRTADGSEFESPKKKAKVE

SEQ ID NO: 2667 - protein, 2114 aa, synthetic construct
MPAAKRVKLDGGDKKYSIGLDIGTNSVGWAVITDEYKVPSKKFKVLGNTDRHSIKKNLIGALLFDSGETAEATRLKRTARRRYTRRKNRICYLQEIFSNEMAKVDDSFFHRLEESFLVEEDKKHERHPIFGNIVDEVAYHEKYPTIYHLRKKLVDSTDKADLRLIYLALAHMIKFRGHFLIEGDLNPDNSDVDKLFIQLVQTYNQLFEENPINASGVDAKAILSARLSKSRRLENLIAQLPGEKKNGLFGNLIALSLGLTPNFKSNFDLAEDAKLQLSKDTYDDDLDNLLAQIGDQYADLFLAAKNLSDAILLSDILRVNTEITKAPLSASMIKRYDEHHQDLTLLKALVRQQLPEKYKEIFFDQSKNGYAGYIDGGASQEEFYKFIKPILEKMDGTEELLVKLNREDLLRKQRTFDNGSIPHQIHLGELHAILRRQEDFYPFLKDNREKIEKILTFRIPYYVGPLARGNSRFAWMTRKSEETITPWNFEEVVDKGASAQSFIERMTNFDKNLPNEKVLPKHSLLYEYFTVYNELTKVKYVTEGMRKPAFLSGEQKKAIVDLLFKTNRKVTVKQLKEDYFKKIECFDSVEISGVEDRFNASLGTYHDLLKIIKDKDFLDNEENEDILEDIVLTLTLFEDREMIEERLKTYAHLFDDKVMKQLKRRRYTGWGRLSRKLINGIRDKQSGKTILDFLKSDGFANRNFMQLIHDDSLTFKEDIQKAQVSGQGDSLHEHIANLAGSPAIKKGILQTVKVVDELVKVMGRHKPENIVIEMARENQTTQKGQKNSRERMKRIEEGIKELGSQILKEHPVENTQLQNEKLYLYYLQNGRDMYVDQELDINRLSDYDVDHIVPQSFLKDDSIDNKVLTRSDKARGKSDNVPSEEVVKKMKNYWRQLLNAKLITQRKFDNLTKAERGGLSELDKAGFIKRQLVETRQITKHVAQILDSRMNTKYDENDKLIREVKVITLKSKLVSDFRKDFQFYKVREINNYHHAHDAYLNAVVGTALIKKYPKLESEFVYGDYKVYDVRKMIAKSEQEIGKATAKYFFYSNIMNFFKTEITLANGEIRKRPLIETNGETGEIVWDKGRDFATVRKVLSMPQVNIVKKTEVQTGGFSKESILPKRNSDKLIARKKDWDPKKYGGFDSPTVAYSVLVVAKVEKGKSKKLKSVKELLGITIMERSSFEKNPIDFLEAKGYKEVKKDLIIKLPKYSLFELENGRKRMLASAGELQKGNELALPSKYVNFLYLASHYEKLKGSPEDNEQKQLFVEQHKHYLDEIIEQISEFSKRVILADANLDKVLSAYNKHRDKPIREQAENIIHLFTLTNLGAPAAFKYFDTTIDRKRYTSTKEVLDATLIHQSITGLYETRIDLSQLGGDGGGGSPAPGGGGGTLNIEDEYRLHETSKEPDVSLGSTWLSDFPQAWAETGGMGLAVRQAPLIIPLKATSTPVSIKQYPMSQEARLGIKPHIQRLLDQGILVPCQSPWNTPLLPVKKPGTNDYRPVQDLREVNKRVEDIHPTVPNPYNLLSGLPPSHQWYTVLDLKDAFFCLRLHPTSQPLFAFEWRDPEMGISGQLTWTRLPQGFKNSPTLFNEALHRDLADFRIQHPDLILLQYVDDLLLAATSELDCQQGTRALLQTLGNLGYRASAKKAQICQKQVKYLGYLLKEGQRWLTEARKETVMGQPTPKTPRQLREFLGKAGFCRLFIPGFAEMAAPLYPLTKPGTLFNWGPDQQKAYQEIKQALLTAPALGLPDLTKPFELFVDEKQGYAKGVLTQKLGPWRRPVAYLSKKLDPVAAGWPPCLRMVAAIAVLTKDAGKLTMGQPLVILAPHAVEALVKQPPDRWLSNARMTHYQALLLDTDRVQFGPVVALNPATLLPLPEEGLQHNCLDILAEAHGTRPDLTDQPLPDADHTWYTDGSSLLQEGQRKAGAAVTTETEVIWAKALPAGTSAQRAELIALTQALKMAEGKKLNVYTDSRYAFATAHIHGEIYRRRGWLTSEGKEIKNKDEILALLKALFLPKRLSIIHCPGHQKGHSAEARGNRMADQAARKAAITETPDTSTLLIENSSPSGGSKRTADGSEFEAGKRTADGSEFEKRTADGSEFESPKKKAKVE

SEQ ID NO: 2668 - protein, 2116 aa, synthetic construct
MPAAKRVKLDGGDKKYSIGLDIGTNSVGWAVITDEYKVPSKKFKVLGNTDRHSIKKNLIGALLFDSGETAEATRLKRTARRRYTRRKNRICYLQEIFSNEMAKVDDSFFHRLEESFLVEEDKKHERHPIFGNIVDEVAYHEKYPTIYHLRKKLVDSTDKADLRLIYLALAHMIKFRGHFLIEGDLNPDNSDVDKLFIQLVQTYNQLFEENPINASGVDAKAILSARLSKSRRLENLIAQLPGEKKNGLFGNLIALSLGLTPNFKSNFDLAEDAKLQLSKDTYDDDLDNLLAQIGDQYADLFLAAKNLSDAILLSDILRVNTEITKAPLSASMIKRYDEHHQDLTLLKALVRQQLPEKYKEIFFDQSKNGYAGYIDGGASQEEFYKFIKPILEKMDGTEELLVKLNREDLLRKQRTFDNGSIPHQIHLGELHAILRRQEDFYPFLKDNREKIEKILTFRIPYYVGPLARGNSRFAWMTRKSEETITPWNFEEVVDKGASAQSFIERMTNFDKNLPNEKVLPKHSLLYEYFTVYNELTKVKYVTEGMRKPAFLSGEQKKAIVDLLFKTNRKVTVKQLKEDYFKKIECFDSVEISGVEDRFNASLGTYHDLLKIIKDKDFLDNEENEDILEDIVLTLTLFEDREMIEERLKTYAHLFDDKVMKQLKRRRYTGWGRLSRKLINGIRDKQSGKTILDFLKSDGFANRNFMQLIHDDSLTFKEDIQKAQVSGQGDSLHEHIANLAGSPAIKKGILQTVKVVDELVKVMGRHKPENIVIEMARENQTTQKGQKNSRERMKRIEEGIKELGSQILKEHPVENTQLQNEKLYLYYLQNGRDMYVDQELDINRLSDYDVDHIVPQSFLKDDSIDNKVLTRSDKARGKSDNVPSEEVVKKMKNYWRQLLNAKLITQRKFDNLTKAERGGLSELDKAGFIKRQLVETRQITKHVAQILDSRMNTKYDENDKLIREVKVITLKSKLVSDFRKDFQFYKVREINNYHHAHDAYLNAVVGTALIKKYPKLESEFVYGDYKVYDVRKMIAKSEQEIGKATAKYFFYSNIMNFFKTEITLANGEIRKRPLIETNGETGEIVWDKGRDFATVRKVLSMPQVNIVKKTEVQTGGFSKESILPKRNSDKLIARKKDWDPKKYGGFDSPTVAYSVLVVAKVEKGKSKKLKSVKELLGITIMERSSFEKNPIDFLEAKGYKEVKKDLIIKLPKYSLFELENGRKRMLASAGELQKGNELALPSKYVNFLYLASHYEKLKGSPEDNEQKQLFVEQHKHYLDEIIEQISEFSKRVILADANLDKVLSAYNKHRDKPIREQAENIIHLFTLTNLGAPAAFKYFDTTIDRKRYTSTKEVLDATLIHQSITGLYETRIDLSQLGGDGGPAPEAAAKGGGGGTLNIEDEYRLHETSKEPDVSLGSTWLSDFPQAWAETGGMGLAVRQAPLIIPLKATSTPVSIKQYPMSQEARLGIKPHIQRLLDQGILVPCQSPWNTPLLPVKKPGTNDYRPVQDLREVNKRVEDIHPTVPNPYNLLSGLPPSHQWYTVLDLKDAFFCLRLHPTSQPLFAFEWRDPEMGISGQLTWTRLPQGFKNSPTLFNEALHRDLADFRIQHPDLILLQYVDDLLLAATSELDCQQGTRALLQTLGNLGYRASAKKAQICQKQVKYLGYLLKEGQRWLTEARKETVMGQPTPKTPRQLREFLGKAGFCRLFIPGFAEMAAPLYPLTKPGTLFNWGPDQQKAYQEIKQALLTAPALGLPDLTKPFELFVDEKQGYAKGVLTQKLGPWRRPVAYLSKKLDPVAAGWPPCLRMVAAIAVLTKDAGKLTMGQPLVILAPHAVEALVKQPPDRWLSNARMTHYQALLLDTDRVQFGPVVALNPATLLPLPEEGLQHNCLDILAEAHGTRPDLTDQPLPDADHTWYTDGSSLLQEGQRKAGAAVTTETEVIWAKALPAGTSAQRAELIALTQALKMAEGKKLNVYTDSRYAFATAHIHGEIYRRRGWLTSEGKEIKNKDEILALLKALFLPKRLSIIHCPGHQKGHSAEARGNRMADQAARKAAITETPDTSTLLIENSSPSGGSKRTADGSEFEAGKRTADGSEFEKRTADGSEFESPKKKAKVE

SEQ ID NO: 2669 - protein, 2120 aa, synthetic construct
MPAAKRVKLDGGDKKYSIGLDIGTNSVGWAVITDEYKVPSKKFKVLGNTDRHSIKKNLIGALLFDSGETAEATRLKRTARRRYTRRKNRICYLQEIFSNEMAKVDDSFFHRLEESFLVEEDKKHERHPIFGNIVDEVAYHEKYPTIYHLRKKLVDSTDKADLRLIYLALAHMIKFRGHFLIEGDLNPDNSDVDKLFIQLVQTYNQLFEENPINASGVDAKAILSARLSKSRRLENLIAQLPGEKKNGLFGNLIALSLGLTPNFKSNFDLAEDAKLQLSKDTYDDDLDNLLAQIGDQYADLFLAAKNLSDAILLSDILRVNTEITKAPLSASMIKRYDEHHQDLTLLKALVRQQLPEKYKEIFFDQSKNGYAGYIDGGASQEEFYKFIKPILEKMDGTEELLVKLNREDLLRKQRTFDNGSIPHQIHLGELHAILRRQEDFYPFLKDNREKIEKILTFRIPYYVGPLARGNSRFAWMTRKSEETITPWNFEEVVDKGASAQSFIERMTNFDKNLPNEKVLPKHSLLYEYFTVYNELTKVKYVTEGMRKPAFLSGEQKKAIVDLLFKTNRKVTVKQLKEDYFKKIECFDSVEISGVEDRFNASLGTYHDLLKIIKDKDFLDNEENEDILEDIVLTLTLFEDREMIEERLKTYAHLFDDKVMKQLKRRRYTGWGRLSRKLINGIRDKQSGKTILDFLKSDGFANRNFMQLIHDDSLTFKEDIQKAQVSGQGDSLHEHIANLAGSPAIKKGILQTVKVVDELVKVMGRHKPENIVIEMARENQTTQKGQKNSRERMKRIEEGIKELGSQILKEHPVENTQLQNEKLYLYYLQNGRDMYVDQELDINRLSDYDVDHIVPQSFLKDDSIDNKVLTRSDKARGKSDNVPSEEVVKKMKNYWRQLLNAKLITQRKFDNLTKAERGGLSELDKAGFIKRQLVETRQITKHVAQILDSRMNTKYDENDKLIREVKVITLKSKLVSDFRKDFQFYKVREINNYHHAHDAYLNAVVGTALIKKYPKLESEFVYGDYKVYDVRKMIAKSEQEIGKATAKYFFYSNIMNFFKTEITLANGEIRKRPLIETNGETGEIVWDKGRDFATVRKVLSMPQVNIVKKTEVQTGGFSKESILPKRNSDKLIARKKDWDPKKYGGFDSPTVAYSVLVVAKVEKGKSKKLKSVKELLGITIMERSSFEKNPIDFLEAKGYKEVKKDLIIKLPKYSLFELENGRKRMLASAGELQKGNELALPSKYVNFLYLASHYEKLKGSPEDNEQKQLFVEQHKHYLDEIIEQISEFSKRVILADANLDKVLSAYNKHRDKPIREQAENIIHLFTLTNLGAPAAFKYFDTTIDRKRYTSTKEVLDATLIHQSITGLYETRIDLSQLGGDGGGSSGSSGSSGSSGSSGGTLNIEDEYRLHETSKEPDVSLGSTWLSDFPQAWAETGGMGLAVRQAPLIIPLKATSTPVSIKQYPMSQEARLGIKPHIQRLLDQGILVPCQSPWNTPLLPVKKPGTNDYRPVQDLREVNKRVEDIHPTVPNPYNLLSGLPPSHQWYTVLDLKDAFFCLRLHPTSQPLFAFEWRDPEMGISGQLTWTRLPQGFKNSPTLFNEALHRDLADFRIQHPDLILLQYVDDLLLAATSELDCQQGTRALLQTLGNLGYRASAKKAQICQKQVKYLGYLLKEGQRWLTEARKETVMGQPTPKTPRQLREFLGKAGFCRLFIPGFAEMAAPLYPLTKPGTLFNWGPDQQKAYQEIKQALLTAPALGLPDLTKPFELFVDEKQGYAKGVLTQKLGPWRRPVAYLSKKLDPVAAGWPPCLRMVAAIAVLTKDAGKLTMGQPLVILAPHAVEALVKQPPDRWLSNARMTHYQALLLDTDRVQFGPVVALNPATLLPLPEEGLQHNCLDILAEAHGTRPDLTDQPLPDADHTWYTDGSSLLQEGQRKAGAAVTTETEVIWAKALPAGTSAQRAELIALTQALKMAEGKKLNVYTDSRYAFATAHIHGEIYRRRGWLTSEGKEIKNKDEILALLKALFLPKRLSIIHCPGHQKGHSAEARGNRMADQAARKAAITETPDTSTLLIENSSPSGGSKRTADGSEFEAGKRTADGSEFEKRTADGSEFESPKKKAKVE

SEQ ID NO: 2670 - protein, 2114 aa, synthetic construct
MPAAKRVKLDGGDKKYSIGLDIGTNSVGWAVITDEYKVPSKKFKVLGNTDRHSIKKNLIGALLFDSGETAEATRLKRTARRRYTRRKNRICYLQEIFSNEMAKVDDSFFHRLEESFLVEEDKKHERHPIFGNIVDEVAYHEKYPTIYHLRKKLVDSTDKADLRLIYLALAHMIKFRGHFLIEGDLNPDNSDVDKLFIQLVQTYNQLFEENPINASGVDAKAILSARLSKSRRLENLIAQLPGEKKNGLFGNLIALSLGLTPNFKSNFDLAEDAKLQLSKDTYDDDLDNLLAQIGDQYADLFLAAKNLSDAILLSDILRVNTEITKAPLSASMIKRYDEHHQDLTLLKALVRQQLPEKYKEIFFDQSKNGYAGYIDGGASQEEFYKFIKPILEKMDGTEELLVKLNREDLLRKQRTFDNGSIPHQIHLGELHAILRRQEDFYPFLKDNREKIEKILTFRIPYYVGPLARGNSRFAWMTRKSEETITPWNFEEVVDKGASAQSFIERMTNFDKNLPNEKVLPKHSLLYEYFTVYNELTKVKYVTEGMRKPAFLSGEQKKAIVDLLFKTNRKVTVKQLKEDYFKKIECFDSVEISGVEDRFNASLGTYHDLLKIIKDKDFLDNEENEDILEDIVLTLTLFEDREMIEERLKTYAHLFDDKVMKQLKRRRYTGWGRLSRKLINGIRDKQSGKTILDFLKSDGFANRNFMQLIHDDSLTFKEDIQKAQVSGQGDSLHEHIANLAGSPAIKKGILQTVKVVDELVKVMGRHKPENIVIEMARENQTTQKGQKNSRERMKRIEEGIKELGSQILKEHPVENTQLQNEKLYLYYLQNGRDMYVDQELDINRLSDYDVDHIVPQSFLKDDSIDNKVLTRSDKARGKSDNVPSEEVVKKMKNYWRQLLNAKLITQRKFDNLTKAERGGLSELDKAGFIKRQLVETRQITKHVAQILDSRMNTKYDENDKLIREVKVITLKSKLVSDFRKDFQFYKVREINNYHHAHDAYLNAVVGTALIKKYPKLESEFVYGDYKVYDVRKMIAKSEQEIGKATAKYFFYSNIMNFFKTEITLANGEIRKRPLIETNGETGEIVWDKGRDFATVRKVLSMPQVNIVKKTEVQTGGFSKESILPKRNSDKLIARKKDWDPKKYGGFDSPTVAYSVLVVAKVEKGKSKKLKSVKELLGITIMERSSFEKNPIDFLEAKGYKEVKKDLIIKLPKYSLFELENGRKRMLASAGELQKGNELALPSKYVNFLYLASHYEKLKGSPEDNEQKQLFVEQHKHYLDEIIEQISEFSKRVILADANLDKVLSAYNKHRDKPIREQAENIIHLFTLTNLGAPAAFKYFDTTIDRKRYTSTKEVLDATLIHQSITGLYETRIDLSQLGGDGGGGGGGSGSSGGTLNIEDEYRLHETSKEPDVSLGSTWLSDFPQAWAETGGMGLAVRQAPLIIPLKATSTPVSIKQYPMSQEARLGIKPHIQRLLDQGILVPCQSPWNTPLLPVKKPGTNDYRPVQDLREVNKRVEDIHPTVPNPYNLLSGLPPSHQWYTVLDLKDAFFCLRLHPTSQPLFAFEWRDPEMGISGQLTWTRLPQGFKNSPTLFNEALHRDLADFRIQHPDLILLQYVDDLLLAATSELDCQQGTRALLQTLGNLGYRASAKKAQICQKQVKYLGYLLKEGQRWLTEARKETVMGQPTPKTPRQLREFLGKAGFCRLFIPGFAEMAAPLYPLTKPGTLFNWGPDQQKAYQEIKQALLTAPALGLPDLTKPFELFVDEKQGYAKGVLTQKLGPWRRPVAYLSKKLDPVAAGWPPCLRMVAAIAVLTKDAGKLTMGQPLVILAPHAVEALVKQPPDRWLSNARMTHYQALLLDTDRVQFGPVVALNPATLLPLPEEGLQHNCLDILAEAHGTRPDLTDQPLPDADHTWYTDGSSLLQEGQRKAGAAVTTETEVIWAKALPAGTSAQRAELIALTQALKMAEGKKLNVYTDSRYAFATAHIHGEIYRRRGWLTSEGKEIKNKDEILALLKALFLPKRLSIIHCPGHQKGHSAEARGNRMADQAARKAAITETPDTSTLLIENSSPSGGSKRTADGSEFEAGKRTADGSEFEKRTADGSEFESPKKKAKVE

SEQ ID NO: 2671 - protein, 2111 aa, synthetic construct
MPAAKRVKLDGGDKKYSIGLDIGTNSVGWAVITDEYKVPSKKFKVLGNTDRHSIKKNLIGALLFDSGETAEATRLKRTARRRYTRRKNRICYLQEIFSNEMAKVDDSFFHRLEESFLVEEDKKHERHPIFGNIVDEVAYHEKYPTIYHLRKKLVDSTDKADLRLIYLALAHMIKFRGHFLIEGDLNPDNSDVDKLFIQLVQTYNQLFEENPINASGVDAKAILSARLSKSRRLENLIAQLPGEKKNGLFGNLIALSLGLTPNFKSNFDLAEDAKLQLSKDTYDDDLDNLLAQIGDQYADLFLAAKNLSDAILLSDILRVNTEITKAPLSASMIKRYDEHHQDLTLLKALVRQQLPEKYKEIFFDQSKNGYAGYIDGGASQEEFYKFIKPILEKMDGTEELLVKLNREDLLRKQRTFDNGSIPHQIHLGELHAILRRQEDFYPFLKDNREKIEKILTFRIPYYVGPLARGNSRFAWMTRKSEETITPWNFEEVVDKGASAQSFIERMTNFDKNLPNEKVLPKHSLLYEYFTVYNELTKVKYVTEGMRKPAFLSGEQKKAIVDLLFKTNRKVTVKQLKEDYFKKIECFDSVEISGVEDRFNASLGTYHDLLKIIKDKDFLDNEENEDILEDIVLTLTLFEDREMIEERLKTYAHLFDDKVMKQLKRRRYTGWGRLSRKLINGIRDKQSGKTILDFLKSDGFANRNFMQLIHDDSLTFKEDIQKAQVSGQGDSLHEHIANLAGSPAIKKGILQTVKVVDELVKVMGRHKPENIVIEMARENQTTQKGQKNSRERMKRIEEGIKELGSQILKEHPVENTQLQNEKLYLYYLQNGRDMYVDQELDINRLSDYDVDHIVPQSFLKDDSIDNKVLTRSDKARGKSDNVPSEEVVKKMKNYWRQLLNAKLITQRKFDNLTKAERGGLSELDKAGFIKRQLVETRQITKHVAQILDSRMNTKYDENDKLIREVKVITLKSKLVSDFRKDFQFYKVREINNYHHAHDAYLNAVVGTALIKKYPKLESEFVYGDYKVYDVRKMIAKSEQEIGKATAKYFFYSNIMNFFKTEITLANGEIRKRPLIETNGETGEIVWDKGRDFATVRKVLSMPQVNIVKKTEVQTGGFSKESILPKRNSDKLIARKKDWDPKKYGGFDSPTVAYSVLVVAKVEKGKSKKLKSVKELLGITIMERSSFEKNPIDFLEAKGYKEVKKDLIIKLPKYSLFELENGRKRMLASAGELQKGNELALPSKYVNFLYLASHYEKLKGSPEDNEQKQLFVEQHKHYLDEIIEQISEFSKRVILADANLDKVLSAYNKHRDKPIREQAENIIHLFTLTNLGAPAAFKYFDTTIDRKRYTSTKEVLDATLIHQSITGLYETRIDLSQLGGDGGGGSPAPGGTLNIEDEYRLHETSKEPDVSLGSTWLSDFPQAWAETGGMGLAVRQAPLIIPLKATSTPVSIKQYPMSQEARLGIKPHIQRLLDQGILVPCQSPWNTPLLPVKKPGTNDYRPVQDLREVNKRVEDIHPTVPNPYNLLSGLPPSHQWYTVLDLKDAFFCLRLHPTSQPLFAFEWRDPEMGISGQLTWTRLPQGFKNSPTLFNEALHRDLADFRIQHPDLILLQYVDDLLLAATSELDCQQGTRALLQTLGNLGYRASAKKAQICQKQVKYLGYLLKEGQRWLTEARKETVMGQPTPKTPRQLREFLGKAGFCRLFIPGFAEMAAPLYPLTKPGTLFNWGPDQQKAYQEIKQALLTAPALGLPDLTKPFELFVDEKQGYAKGVLTQKLGPWRRPVAYLSKKLDPVAAGWPPCLRMVAAIAVLTKDAGKLTMGQPLVILAPHAVEALVKQPPDRWLSNARMTHYQALLLDTDRVQFGPVVALNPATLLPLPEEGLQHNCLDILAEAHGTRPDLTDQPLPDADHTWYTDGSSLLQEGQRKAGAAVTTETEVIWAKALPAGTSAQRAELIALTQALKMAEGKKLNVYTDSRYAFATAHIHGEIYRRRGWLTSEGKEIKNKDEILALLKALFLPKRLSIIHCPGHQKGHSAEARGNRMADQAARKAAITETPDTSTLLIENSSPSGGSKRTADGSEFEAGKRTADGSEFEKRTADGSEFESPKKKAKVE

SEQ ID NO: 2672 - protein, 2111 aa, synthetic construct
MPAAKRVKLDGGDKKYSIGLDIGTNSVGWAVITDEYKVPSKKFKVLGNTDRHSIKKNLIGALLFDSGETAEATRLKRTARRRYTRRKNRICYLQEIFSNEMAKVDDSFFHRLEESFLVEEDKKHERHPIFGNIVDEVAYHEKYPTIYHLRKKLVDSTDKADLRLIYLALAHMIKFRGHFLIEGDLNPDNSDVDKLFIQLVQTYNQLFEENPINASGVDAKAILSARLSKSRRLENLIAQLPGEKKNGLFGNLIALSLGLTPNFKSNFDLAEDAKLQLSKDTYDDDLDNLLAQIGDQYADLFLAAKNLSDAILLSDILRVNTEITKAPLSASMIKRYDEHHQDLTLLKALVRQQLPEKYKEIFFDQSKNGYAGYIDGGASQEEFYKFIKPILEKMDGTEELLVKLNREDLLRKQRTFDNGSIPHQIHLGELHAILRRQEDFYPFLKDNREKIEKILTFRIPYYVGPLARGNSRFAWMTRKSEETITPWNFEEVVDKGASAQSFIERMTNFDKNLPNEKVLPKHSLLYEYFTVYNELTKVKYVTEGMRKPAFLSGEQKKAIVDLLFKTNRKVTVKQLKEDYFKKIECFDSVEISGVEDRFNASLGTYHDLLKIIKDKDFLDNEENEDILEDIVLTLTLFEDREMIEERLKTYAHLFDDKVMKQLKRRRYTGWGRLSRKLINGIRDKQSGKTILDFLKSDGFANRNFMQLIHDDSLTFKEDIQKAQVSGQGDSLHEHIANLAGSPAIKKGILQTVKVVDELVKVMGRHKPENIVIEMARENQTTQKGQKNSRERMKRIEEGIKELGSQILKEHPVENTQLQNEKLYLYYLQNGRDMYVDQELDINRLSDYDVDHIVPQSFLKDDSIDNKVLTRSDKARGKSDNVPSEEVVKKMKNYWRQLLNAKLITQRKFDNLTKAERGGLSELDKAGFIKRQLVETRQITKHVAQILDSRMNTKYDENDKLIREVKVITLKSKLVSDFRKDFQFYKVREINNYHHAHDAYLNAVVGTALIKKYPKLESEFVYGDYKVYDVRKMIAKSEQEIGKATAKYFFYSNIMNFFKTEITLANGEIRKRPLIETNGETGEIVWDKGRDFATVRKVLSMPQVNIVKKTEVQTGGFSKESILPKRNSDKLIARKKDWDPKKYGGFDSPTVAYSVLVVAKVEKGKSKKLKSVKELLGITIMERSSFEKNPIDFLEAKGYKEVKKDLIIKLPKYSLFELENGRKRMLASAGELQKGNELALPSKYVNFLYLASHYEKLKGSPEDNEQKQLFVEQHKHYLDEIIEQISEFSKRVILADANLDKVLSAYNKHRDKPIREQAENIIHLFTLTNLGAPAAFKYFDTTIDRKRYTSTKEVLDATLIHQSITGLYETRIDLSQLGGDGGGGGPAPGGTLNIEDEYRLHETSKEPDVSLGSTWLSDFPQAWAETGGMGLAVRQAPLIIPLKATSTPVSIKQYPMSQEARLGIKPHIQRLLDQGILVPCQSPWNTPLLPVKKPGTNDYRPVQDLREVNKRVEDIHPTVPNPYNLLSGLPPSHQWYTVLDLKDAFFCLRLHPTSQPLFAFEWRDPEMGISGQLTWTRLPQGFKNSPTLFNEALHRDLADFRIQHPDLILLQYVDDLLLAATSELDCQQGTRALLQTLGNLGYRASAKKAQICQKQVKYLGYLLKEGQRWLTEARKETVMGQPTPKTPRQLREFLGKAGFCRLFIPGFAEMAAPLYPLTKPGTLFNWGPDQQKAYQEIKQALLTAPALGLPDLTKPFELFVDEKQGYAKGVLTQKLGPWRRPVAYLSKKLDPVAAGWPPCLRMVAAIAVLTKDAGKLTMGQPLVILAPHAVEALVKQPPDRWLSNARMTHYQALLLDTDRVQFGPVVALNPATLLPLPEEGLQHNCLDILAEAHGTRPDLTDQPLPDADHTWYTDGSSLLQEGQRKAGAAVTTETEVIWAKALPAGTSAQRAELIALTQALKMAEGKKLNVYTDSRYAFATAHIHGEIYRRRGWLTSEGKEIKNKDEILALLKALFLPKRLSIIHCPGHQKGHSAEARGNRMADQAARKAAITETPDTSTLLIENSSPSGGSKRTADGSEFEAGKRTADGSEFEKRTADGSEFESPKKKAKVE

SEQ ID NO: 2673 - protein, 2116 aa, synthetic construct
MPAAKRVKLDGGDKKYSIGLDIGTNSVGWAVITDEYKVPSKKFKVLGNTDRHSIKKNLIGALLFDSGETAEATRLKRTARRRYTRRKNRICYLQEIFSNEMAKVDDSFFHRLEESFLVEEDKKHERHPIFGNIVDEVAYHEKYPTIYHLRKKLVDSTDKADLRLIYLALAHMIKFRGHFLIEGDLNPDNSDVDKLFIQLVQTYNQLFEENPINASGVDAKAILSARLSKSRRLENLIAQLPGEKKNGLFGNLIALSLGLTPNFKSNFDLAEDAKLQLSKDTYDDDLDNLLAQIGDQYADLFLAAKNLSDAILLSDILRVNTEITKAPLSASMIKRYDEHHQDLTLLKALVRQQLPEKYKEIFFDQSKNGYAGYIDGGASQEEFYKFIKPILEKMDGTEELLVKLNREDLLRKQRTFDNGSIPHQIHLGELHAILRRQEDFYPFLKDNREKIEKILTFRIPYYVGPLARGNSRFAWMTRKSEETITPWNFEEVVDKGASAQSFIERMTNFDKNLPNEKVLPKHSLLYEYFTVYNELTKVKYVTEGMRKPAFLSGEQKKAIVDLLFKTNRKVTVKQLKEDYFKKIECFDSVEISGVEDRFNASLGTYHDLLKIIKDKDFLDNEENEDILEDIVLTLTLFEDREMIEERLKTYAHLFDDKVMKQLKRRRYTGWGRLSRKLINGIRDKQSGKTILDFLKSDGFANRNFMQLIHDDSLTFKEDIQKAQVSGQGDSLHEHIANLAGSPAIKKGILQTVKVVDELVKVMGRHKPENIVIEMARENQTTQKGQKNSRERMKRIEEGIKELGSQILKEHPVENTQLQNEKLYLYYLQNGRDMYVDQELDINRLSDYDVDHIVPQSFLKDDSIDNKVLTRSDKARGKSDNVPSEEVVKKMKNYWRQLLNAKLITQRKFDNLTKAERGGLSELDKAGFIKRQLVETRQITKHVAQILDSRMNTKYDENDKLIREVKVITLKSKLVSDFRKDFQFYKVREINNYHHAHDAYLNAVVGTALIKKYPKLESEFVYGDYKVYDVRKMIAKSEQEIGKATAKYFFYSNIMNFFKTEITLANGEIRKRPLIETNGETGEIVWDKGRDFATVRKVLSMPQVNIVKKTEVQTGGFSKESILPKRNSDKLIARKKDWDPKKYGGFDSPTVAYSVLVVAKVEKGKSKKLKSVKELLGITIMERSSFEKNPIDFLEAKGYKEVKKDLIIKLPKYSLFELENGRKRMLASAGELQKGNELALPSKYVNFLYLASHYEKLKGSPEDNEQKQLFVEQHKHYLDEIIEQISEFSKRVILADANLDKVLSAYNKHRDKPIREQAENIIHLFTLTNLGAPAAFKYFDTTIDRKRYTSTKEVLDATLIHQSITGLYETRIDLSQLGGDGGGGSEAAAKGSSGGTLNIEDEYRLHETSKEPDVSLGSTWLSDFPQAWAETGGMGLAVRQAPLIIPLKATSTPVSIKQYPMSQEARLGIKPHIQRLLDQGILVPCQSPWNTPLLPVKKPGTNDYRPVQDLREVNKRVEDIHPTVPNPYNLLSGLPPSHQWYTVLDLKDAFFCLRLHPTSQPLFAFEWRDPEMGISGQLTWTRLPQGFKNSPTLFNEALHRDLADFRIQHPDLILLQYVDDLLLAATSELDCQQGTRALLQTLGNLGYRASAKKAQICQKQVKYLGYLLKEGQRWLTEARKETVMGQPTPKTPRQLREFLGKAGFCRLFIPGFAEMAAPLYPLTKPGTLFNWGPDQQKAYQEIKQALLTAPALGLPDLTKPFELFVDEKQGYAKGVLTQKLGPWRRPVAYLSKKLDPVAAGWPPCLRMVAAIAVLTKDAGKLTMGQPLVILAPHAVEALVKQPPDRWLSNARMTHYQALLLDTDRVQFGPVVALNPATLLPLPEEGLQHNCLDILAEAHGTRPDLTDQPLPDADHTWYTDGSSLLQEGQRKAGAAVTTETEVIWAKALPAGTSAQRAELIALTQALKMAEGKKLNVYTDSRYAFATAHIHGEIYRRRGWLTSEGKEIKNKDEILALLKALFLPKRLSIIHCPGHQKGHSAEARGNRMADQAARKAAITETPDTSTLLIENSSPSGGSKRTADGSEFEAGKRTADGSEFEKRTADGSEFESPKKKAKVE

SEQ ID NO: 2674 - protein, 2116 aa, synthetic construct
MPAAKRVKLDGGDKKYSIGLDIGTNSVGWAVITDEYKVPSKKFKVLGNTDRHSIKKNLIGALLFDSGETAEATRLKRTARRRYTRRKNRICYLQEIFSNEMAKVDDSFFHRLEESFLVEEDKKHERHPIFGNIVDEVAYHEKYPTIYHLRKKLVDSTDKADLRLIYLALAHMIKFRGHFLIEGDLNPDNSDVDKLFIQLVQTYNQLFEENPINASGVDAKAILSARLSKSRRLENLIAQLPGEKKNGLFGNLIALSLGLTPNFKSNFDLAEDAKLQLSKDTYDDDLDNLLAQIGDQYADLFLAAKNLSDAILLSDILRVNTEITKAPLSASMIKRYDEHHQDLTLLKALVRQQLPEKYKEIFFDQSKNGYAGYIDGGASQEEFYKFIKPILEKMDGTEELLVKLNREDLLRKQRTFDNGSIPHQIHLGELHAILRRQEDFYPFLKDNREKIEKILTFRIPYYVGPLARGNSRFAWMTRKSEETITPWNFEEVVDKGASAQSFIERMTNFDKNLPNEKVLPKHSLLYEYFTVYNELTKVKYVTEGMRKPAFLSGEQKKAIVDLLFKTNRKVTVKQLKEDYFKKIECFDSVEISGVEDRFNASLGTYHDLLKIIKDKDFLDNEENEDILEDIVLTLTLFEDREMIEERLKTYAHLFDDKVMKQLKRRRYTGWGRLSRKLINGIRDKQSGKTILDFLKSDGFANRNFMQLIHDDSLTFKEDIQKAQVSGQGDSLHEHIANLAGSPAIKKGILQTVKVVDELVKVMGRHKPENIVIEMARENQTTQKGQKNSRERMKRIEEGIKELGSQILKEHPVENTQLQNEKLYLYYLQNGRDMYVDQELDINRLSDYDVDHIVPQSFLKDDSIDNKVLTRSDKARGKSDNVPSEEVVKKMKNYWRQLLNAKLITQRKFDNLTKAERGGLSELDKAGFIKRQLVETRQITKHVAQILDSRMNTKYDENDKLIREVKVITLKSKLVSDFRKDFQFYKVREINNYHHAHDAYLNAVVGTALIKKYPKLESEFVYGDYKVYDVRKMIAKSEQEIGKATAKYFFYSNIMNFFKTEITLANGEIRKRPLIETNGETGEIVWDKGRDFATVRKVLSMPQVNIVKKTEVQTGGFSKESILPKRNSDKLIARKKDWDPKKYGGFDSPTVAYSVLVVAKVEKGKSKKLKSVKELLGITIMERSSFEKNPIDFLEAKGYKEVKKDLIIKLPKYSLFELENGRKRMLASAGELQKGNELALPSKYVNFLYLASHYEKLKGSPEDNEQKQLFVEQHKHYLDEIIEQISEFSKRVILADANLDKVLSAYNKHRDKPIREQAENIIHLFTLTNLGAPAAFKYFDTTIDRKRYTSTKEVLDATLIHQSITGLYETRIDLSQLGGDGGEAAAKPAPGGSGGTLNIEDEYRLHETSKEPDVSLGSTWLSDFPQAWAETGGMGLAVRQAPLIIPLKATSTPVSIKQYPMSQEARLGIKPHIQRLLDQGILVPCQSPWNTPLLPVKKPGTNDYRPVQDLREVNKRVEDIHPTVPNPYNLLSGLPPSHQWYTVLDLKDAFFCLRLHPTSQPLFAFEWRDPEMGISGQLTWTRLPQGFKNSPTLFNEALHRDLADFRIQHPDLILLQYVDDLLLAATSELDCQQGTRALLQTLGNLGYRASAKKAQICQKQVKYLGYLLKEGQRWLTEARKETVMGQPTPKTPRQLREFLGKAGFCRLFIPGFAEMAAPLYPLTKPGTLFNWGPDQQKAYQEIKQALLTAPALGLPDLTKPFELFVDEKQGYAKGVLTQKLGPWRRPVAYLSKKLDPVAAGWPPCLRMVAAIAVLTKDAGKLTMGQPLVILAPHAVEALVKQPPDRWLSNARMTHYQALLLDTDRVQFGPVVALNPATLLPLPEEGLQHNCLDILAEAHGTRPDLTDQPLPDADHTWYTDGSSLLQEGQRKAGAAVTTETEVIWAKALPAGTSAQRAELIALTQALKMAEGKKLNVYTDSRYAFATAHIHGEIYRRRGWLTSEGKEIKNKDEILALLKALFLPKRLSIIHCPGHQKGHSAEARGNRMADQAARKAAITETPDTSTLLIENSSPSGGSKRTADGSEFEAGKRTADGSEFEKRTADGSEFESPKKKAKVE

SEQ ID NO: 2675 - protein, 2114 aa, synthetic construct
MPAAKRVKLDGGDKKYSIGLDIGTNSVGWAVITDEYKVPSKKFKVLGNTDRHSIKKNLIGALLFDSGETAEATRLKRTARRRYTRRKNRICYLQEIFSNEMAKVDDSFFHRLEESFLVEEDKKHERHPIFGNIVDEVAYHEKYPTIYHLRKKLVDSTDKADLRLIYLALAHMIKFRGHFLIEGDLNPDNSDVDKLFIQLVQTYNQLFEENPINASGVDAKAILSARLSKSRRLENLIAQLPGEKKNGLFGNLIALSLGLTPNFKSNFDLAEDAKLQLSKDTYDDDLDNLLAQIGDQYADLFLAAKNLSDAILLSDILRVNTEITKAPLSASMIKRYDEHHQDLTLLKALVRQQLPEKYKEIFFDQSKNGYAGYIDGGASQEEFYKFIKPILEKMDGTEELLVKLNREDLLRKQRTFDNGSIPHQIHLGELHAILRRQEDFYPFLKDNREKIEKILTFRIPYYVGPLARGNSRFAWMTRKSEETITPWNFEEVVDKGASAQSFIERMTNFDKNLPNEKVLPKHSLLYEYFTVYNELTKVKYVTEGMRKPAFLSGEQKKAIVDLLFKTNRKVTVKQLKEDYFKKIECFDSVEISGVEDRFNASLGTYHDLLKIIKDKDFLDNEENEDILEDIVLTLTLFEDREMIEERLKTYAHLFDDKVMKQLKRRRYTGWGRLSRKLINGIRDKQSGKTILDFLKSDGFANRNFMQLIHDDSLTFKEDIQKAQVSGQGDSLHEHIANLAGSPAIKKGILQTVKVVDELVKVMGRHKPENIVIEMARENQTTQKGQKNSRERMKRIEEGIKELGSQILKEHPVENTQLQNEKLYLYYLQNGRDMYVDQELDINRLSDYDVDHIVPQSFLKDDSIDNKVLTRSDKARGKSDNVPSEEVVKKMKNYWRQLLNAKLITQRKFDNLTKAERGGLSELDKAGFIKRQLVETRQITKHVAQILDSRMNTKYDENDKLIREVKVITLKSKLVSDFRKDFQFYKVREINNYHHAHDAYLNAVVGTALIKKYPKLESEFVYGDYKVYDVRKMIAKSEQEIGKATAKYFFYSNIMNFFKTEITLANGEIRKRPLIETNGETGEIVWDKGRDFATVRKVLSMPQVNIVKKTEVQTGGFSKESILPKRNSDKLIARKKDWDPKKYGGFDSPTVAYSVLVVAKVEKGKSKKLKSVKELLGITIMERSSFEKNPIDFLEAKGYKEVKKDLIIKLPKYSLFELENGRKRMLASAGELQKGNELALPSKYVNFLYLASHYEKLKGSPEDNEQKQLFVEQHKHYLDEIIEQISEFSKRVILADANLDKVLSAYNKHRDKPIREQAENIIHLFTLTNLGAPAAFKYFDTTIDRKRYTSTKEVLDATLIHQSITGLYETRIDLSQLGGDGGGGSGSSGGGGGTLNIEDEYRLHETSKEPDVSLGSTWLSDFPQAWAETGGMGLAVRQAPLIIPLKATSTPVSIKQYPMSQEARLGIKPHIQRLLDQGILVPCQSPWNTPLLPVKKPGTNDYRPVQDLREVNKRVEDIHPTVPNPYNLLSGLPPSHQWYTVLDLKDAFFCLRLHPTSQPLFAFEWRDPEMGISGQLTWTRLPQGFKNSPTLFNEALHRDLADFRIQHPDLILLQYVDDLLLAATSELDCQQGTRALLQTLGNLGYRASAKKAQICQKQVKYLGYLLKEGQRWLTEARKETVMGQPTPKTPRQLREFLGKAGFCRLFIPGFAEMAAPLYPLTKPGTLFNWGPDQQKAYQEIKQALLTAPALGLPDLTKPFELFVDEKQGYAKGVLTQKLGPWRRPVAYLSKKLDPVAAGWPPCLRMVAAIAVLTKDAGKLTMGQPLVILAPHAVEALVKQPPDRWLSNARMTHYQALLLDTDRVQFGPVVALNPATLLPLPEEGLQHNCLDILAEAHGTRPDLTDQPLPDADHTWYTDGSSLLQEGQRKAGAAVTTETEVIWAKALPAGTSAQRAELIALTQALKMAEGKKLNVYTDSRYAFATAHIHGEIYRRRGWLTSEGKEIKNKDEILALLKALFLPKRLSIIHCPGHQKGHSAEARGNRMADQAARKAAITETPDTSTLLIENSSPSGGSKRTADGSEFEAGKRTADGSEFEKRTADGSEFESPKKKAKVE

SEQ ID NO: 2676 - protein, 2111 aa, synthetic construct
MPAAKRVKLDGGDKKYSIGLDIGTNSVGWAVITDEYKVPSKKFKVLGNTDRHSIKKNLIGALLFDSGETAEATRLKRTARRRYTRRKNRICYLQEIFSNEMAKVDDSFFHRLEESFLVEEDKKHERHPIFGNIVDEVAYHEKYPTIYHLRKKLVDSTDKADLRLIYLALAHMIKFRGHFLIEGDLNPDNSDVDKLFIQLVQTYNQLFEENPINASGVDAKAILSARLSKSRRLENLIAQLPGEKKNGLFGNLIALSLGLTPNFKSNFDLAEDAKLQLSKDTYDDDLDNLLAQIGDQYADLFLAAKNLSDAILLSDILRVNTEITKAPLSASMIKRYDEHHQDLTLLKALVRQQLPEKYKEIFFDQSKNGYAGYIDGGASQEEFYKFIKPILEKMDGTEELLVKLNREDLLRKQRTFDNGSIPHQIHLGELHAILRRQEDFYPFLKDNREKIEKILTFRIPYYVGPLARGNSRFAWMTRKSEETITPWNFEEVVDKGASAQSFIERMTNFDKNLPNEKVLPKHSLLYEYFTVYNELTKVKYVTEGMRKPAFLSGEQKKAIVDLLFKTNRKVTVKQLKEDYFKKIECFDSVEISGVEDRFNASLGTYHDLLKIIKDKDFLDNEENEDILEDIVLTLTLFEDREMIEERLKTYAHLFDDKVMKQLKRRRYTGWGRLSRKLINGIRDKQSGKTILDFLKSDGFANRNFMQLIHDDSLTFKEDIQKAQVSGQGDSLHEHIANLAGSPAIKKGILQTVKVVDELVKVMGRHKPENIVIEMARENQTTQKGQKNSRERMKRIEEGIKELGSQILKEHPVENTQLQNEKLYLYYLQNGRDMYVDQELDINRLSDYDVDHIVPQSFLKDDSIDNKVLTRSDKARGKSDNVPSEEVVKKMKNYWRQLLNAKLITQRKFDNLTKAERGGLSELDKAGFIKRQLVETRQITKHVAQILDSRMNTKYDENDKLIREVKVITLKSKLVSDFRKDFQFYKVREINNYHHAHDAYLNAVVGTALIKKYPKLESEFVYGDYKVYDVRKMIAKSEQEIGKATAKYFFYSNIMNFFKTEITLANGEIRKRPLIETNGETGEIVWDKGRDFATVRKVLSMPQVNIVKKTEVQTGGFSKESILPKRNSDKLIARKKDWDPKKYGGFDSPTVAYSVLVVAKVEKGKSKKLKSVKELLGITIMERSSFEKNPIDFLEAKGYKEVKKDLIIKLPKYSLFELENGRKRMLASAGELQKGNELALPSKYVNFLYLASHYEKLKGSPEDNEQKQLFVEQHKHYLDEIIEQISEFSKRVILADANLDKVLSAYNKHRDKPIREQAENIIHLFTLTNLGAPAAFKYFDTTIDRKRYTSTKEVLDATLIHQSITGLYETRIDLSQLGGDGGGSSGGGGGTLNIEDEYRLHETSKEPDVSLGSTWLSDFPQAWAETGGMGLAVRQAPLIIPLKATSTPVSIKQYPMSQEARLGIKPHIQRLLDQGILVPCQSPWNTPLLPVKKPGTNDYRPVQDLREVNKRVEDIHPTVPNPYNLLSGLPPSHQWYTVLDLKDAFFCLRLHPTSQPLFAFEWRDPEMGISGQLTWTRLPQGFKNSPTLFNEALHRDLADFRIQHPDLILLQYVDDLLLAATSELDCQQGTRALLQTLGNLGYRASAKKAQICQKQVKYLGYLLKEGQRWLTEARKETVMGQPTPKTPRQLREFLGKAGFCRLFIPGFAEMAAPLYPLTKPGTLFNWGPDQQKAYQEIKQALLTAPALGLPDLTKPFELFVDEKQGYAKGVLTQKLGPWRRPVAYLSKKLDPVAAGWPPCLRMVAAIAVLTKDAGKLTMGQPLVILAPHAVEALVKQPPDRWLSNARMTHYQALLLDTDRVQFGPVVALNPATLLPLPEEGLQHNCLDILAEAHGTRPDLTDQPLPDADHTWYTDGSSLLQEGQRKAGAAVTTETEVIWAKALPAGTSAQRAELIALTQALKMAEGKKLNVYTDSRYAFATAHIHGEIYRRRGWLTSEGKEIKNKDEILALLKALFLPKRLSIIHCPGHQKGHSAEARGNRMADQAARKAAITETPDTSTLLIENSSPSGGSKRTADGSEFEAGKRTADGSEFEKRTADGSEFESPKKKAKVE

SEQ ID NO: 2677 - protein, 2116 aa, synthetic construct
MPAAKRVKLDGGDKKYSIGLDIGTNSVGWAVITDEYKVPSKKFKVLGNTDRHSIKKNLIGALLFDSGETAEATRLKRTARRRYTRRKNRICYLQEIFSNEMAKVDDSFFHRLEESFLVEEDKKHERHPIFGNIVDEVAYHEKYPTIYHLRKKLVDSTDKADLRLIYLALAHMIKFRGHFLIEGDLNPDNSDVDKLFIQLVQTYNQLFEENPINASGVDAKAILSARLSKSRRLENLIAQLPGEKKNGLFGNLIALSLGLTPNFKSNFDLAEDAKLQLSKDTYDDDLDNLLAQIGDQYADLFLAAKNLSDAILLSDILRVNTEITKAPLSASMIKRYDEHHQDLTLLKALVRQQLPEKYKEIFFDQSKNGYAGYIDGGASQEEFYKFIKPILEKMDGTEELLVKLNREDLLRKQRTFDNGSIPHQIHLGELHAILRRQEDFYPFLKDNREKIEKILTFRIPYYVGPLARGNSRFAWMTRKSEETITPWNFEEVVDKGASAQSFIERMTNFDKNLPNEKVLPKHSLLYEYFTVYNELTKVKYVTEGMRKPAFLSGEQKKAIVDLLFKTNRKVTVKQLKEDYFKKIECFDSVEISGVEDRFNASLGTYHDLLKIIKDKDFLDNEENEDILEDIVLTLTLFEDREMIEERLKTYAHLFDDKVMKQLKRRRYTGWGRLSRKLINGIRDKQSGKTILDFLKSDGFANRNFMQLIHDDSLTFKEDIQKAQVSGQGDSLHEHIANLAGSPAIKKGILQTVKVVDELVKVMGRHKPENIVIEMARENQTTQKGQKNSRERMKRIEEGIKELGSQILKEHPVENTQLQNEKLYLYYLQNGRDMYVDQELDINRLSDYDVDHIVPQSFLKDDSIDNKVLTRSDKARGKSDNVPSEEVVKKMKNYWRQLLNAKLITQRKFDNLTKAERGGLSELDKAGFIKRQLVETRQITKHVAQILDSRMNTKYDENDKLIREVKVITLKSKLVSDFRKDFQFYKVREINNYHHAHDAYLNAVVGTALIKKYPKLESEFVYGDYKVYDVRKMIAKSEQEIGKATAKYFFYSNIMNFFKTEITLANGEIRKRPLIETNGETGEIVWDKGRDFATVRKVLSMPQVNIVKKTEVQTGGFSKESILPKRNSDKLIARKKDWDPKKYGGFDSPTVAYSVLVVAKVEKGKSKKLKSVKELLGITIMERSSFEKNPIDFLEAKGYKEVKKDLIIKLPKYSLFELENGRKRMLASAGELQKGNELALPSKYVNFLYLASHYEKLKGSPEDNEQKQLFVEQHKHYLDEIIEQISEFSKRVILADANLDKVLSAYNKHRDKPIREQAENIIHLFTLTNLGAPAAFKYFDTTIDRKRYTSTKEVLDATLIHQSITGLYETRIDLSQLGGDGGGGGEAAAKGSSGGTLNIEDEYRLHETSKEPDVSLGSTWLSDFPQAWAETGGMGLAVRQAPLIIPLKATSTPVSIKQYPMSQEARLGIKPHIQRLLDQGILVPCQSPWNTPLLPVKKPGTNDYRPVQDLREVNKRVEDIHPTVPNPYNLLSGLPPSHQWYTVLDLKDAFFCLRLHPTSQPLFAFEWRDPEMGISGQLTWTRLPQGFKNSPTLFNEALHRDLADFRIQHPDLILLQYVDDLLLAATSELDCQQGTRALLQTLGNLGYRASAKKAQICQKQVKYLGYLLKEGQRWLTEARKETVMGQPTPKTPRQLREFLGKAGFCRLFIPGFAEMAAPLYPLTKPGTLFNWGPDQQKAYQEIKQALLTAPALGLPDLTKPFELFVDEKQGYAKGVLTQKLGPWRRPVAYLSKKLDPVAAGWPPCLRMVAAIAVLTKDAGKLTMGQPLVILAPHAVEALVKQPPDRWLSNARMTHYQALLLDTDRVQFGPVVALNPATLLPLPEEGLQHNCLDILAEAHGTRPDLTDQPLPDADHTWYTDGSSLLQEGQRKAGAAVTTETEVIWAKALPAGTSAQRAELIALTQALKMAEGKKLNVYTDSRYAFATAHIHGEIYRRRGWLTSEGKEIKNKDEILALLKALFLPKRLSIIHCPGHQKGHSAEARGNRMADQAARKAAITETPDTSTLLIENSSPSGGSKRTADGSEFEAGKRTADGSEFEKRTADGSEFESPKKKAKVE

SEQ ID NO: 2678 - protein, 2130 aa, synthetic construct
MPAAKRVKLDGGDKKYSIGLDIGTNSVGWAVITDEYKVPSKKFKVLGNTDRHSIKKNLIGALLFDSGETAEATRLKRTARRRYTRRKNRICYLQEIFSNEMAKVDDSFFHRLEESFLVEEDKKHERHPIFGNIVDEVAYHEKYPTIYHLRKKLVDSTDKADLRLIYLALAHMIKFRGHFLIEGDLNPDNSDVDKLFIQLVQTYNQLFEENPINASGVDAKAILSARLSKSRRLENLIAQLPGEKKNGLFGNLIALSLGLTPNFKSNFDLAEDAKLQLSKDTYDDDLDNLLAQIGDQYADLFLAAKNLSDAILLSDILRVNTEITKAPLSASMIKRYDEHHQDLTLLKALVRQQLPEKYKEIFFDQSKNGYAGYIDGGASQEEFYKFIKPILEKMDGTEELLVKLNREDLLRKQRTFDNGSIPHQIHLGELHAILRRQEDFYPFLKDNREKIEKILTFRIPYYVGPLARGNSRFAWMTRKSEETITPWNFEEVVDKGASAQSFIERMTNFDKNLPNEKVLPKHSLLYEYFTVYNELTKVKYVTEGMRKPAFLSGEQKKAIVDLLFKTNRKVTVKQLKEDYFKKIECFDSVEISGVEDRFNASLGTYHDLLKIIKDKDFLDNEENEDILEDIVLTLTLFEDREMIEERLKTYAHLFDDKVMKQLKRRRYTGWGRLSRKLINGIRDKQSGKTILDFLKSDGFANRNFMQLIHDDSLTFKEDIQKAQVSGQGDSLHEHIANLAGSPAIKKGILQTVKVVDELVKVMGRHKPENIVIEMARENQTTQKGQKNSRERMKRIEEGIKELGSQILKEHPVENTQLQNEKLYLYYLQNGRDMYVDQELDINRLSDYDVDHIVPQSFLKDDSIDNKVLTRSDKARGKSDNVPSEEVVKKMKNYWRQLLNAKLITQRKFDNLTKAERGGLSELDKAGFIKRQLVETRQITKHVAQILDSRMNTKYDENDKLIREVKVITLKSKLVSDFRKDFQFYKVREINNYHHAHDAYLNAVVGTALIKKYPKLESEFVYGDYKVYDVRKMIAKSEQEIGKATAKYFFYSNIMNFFKTEITLANGEIRKRPLIETNGETGEIVWDKGRDFATVRKVLSMPQVNIVKKTEVQTGGFSKESILPKRNSDKLIARKKDWDPKKYGGFDSPTVAYSVLVVAKVEKGKSKKLKSVKELLGITIMERSSFEKNPIDFLEAKGYKEVKKDLIIKLPKYSLFELENGRKRMLASAGELQKGNELALPSKYVNFLYLASHYEKLKGSPEDNEQKQLFVEQHKHYLDEIIEQISEFSKRVILADANLDKVLSAYNKHRDKPIREQAENIIHLFTLTNLGAPAAFKYFDTTIDRKRYTSTKEVLDATLIHQSITGLYETRIDLSQLGGDGGEAAAKEAAAKEAAAKEAAAKEAAAKGGTLNIEDEYRLHETSKEPDVSLGSTWLSDFPQAWAETGGMGLAVRQAPLIIPLKATSTPVSIKQYPMSQEARLGIKPHIQRLLDQGILVPCQSPWNTPLLPVKKPGTNDYRPVQDLREVNKRVEDIHPTVPNPYNLLSGLPPSHQWYTVLDLKDAFFCLRLHPTSQPLFAFEWRDPEMGISGQLTWTRLPQGFKNSPTLFNEALHRDLADFRIQHPDLILLQYVDDLLLAATSELDCQQGTRALLQTLGNLGYRASAKKAQICQKQVKYLGYLLKEGQRWLTEARKETVMGQPTPKTPRQLREFLGKAGFCRLFIPGFAEMAAPLYPLTKPGTLFNWGPDQQKAYQEIKQALLTAPALGLPDLTKPFELFVDEKQGYAKGVLTQKLGPWRRPVAYLSKKLDPVAAGWPPCLRMVAAIAVLTKDAGKLTMGQPLVILAPHAVEALVKQPPDRWLSNARMTHYQALLLDTDRVQFGPVVALNPATLLPLPEEGLQHNCLDILAEAHGTRPDLTDQPLPDADHTWYTDGSSLLQEGQRKAGAAVTTETEVIWAKALPAGTSAQRAELIALTQALKMAEGKKLNVYTDSRYAFATAHIHGEIYRRRGWLTSEGKEIKNKDEILALLKALFLPKRLSIIHCPGHQKGHSAEARGNRMADQAARKAAITETPDTSTLLIENSSPSGGSKRTADGSEFEAGKRTADGSEFEKRTADGSEFESPKKKAKVE

SEQ ID NO: 2679 - protein, 2114 aa, synthetic construct
MPAAKRVKLDGGDKKYSIGLDIGTNSVGWAVITDEYKVPSKKFKVLGNTDRHSIKKNLIGALLFDSGETAEATRLKRTARRRYTRRKNRICYLQEIFSNEMAKVDDSFFHRLEESFLVEEDKKHERHPIFGNIVDEVAYHEKYPTIYHLRKKLVDSTDKADLRLIYLALAHMIKFRGHFLIEGDLNPDNSDVDKLFIQLVQTYNQLFEENPINASGVDAKAILSARLSKSRRLENLIAQLPGEKKNGLFGNLIALSLGLTPNFKSNFDLAEDAKLQLSKDTYDDDLDNLLAQIGDQYADLFLAAKNLSDAILLSDILRVNTEITKAPLSASMIKRYDEHHQDLTLLKALVRQQLPEKYKEIFFDQSKNGYAGYIDGGASQEEFYKFIKPILEKMDGTEELLVKLNREDLLRKQRTFDNGSIPHQIHLGELHAILRRQEDFYPFLKDNREKIEKILTFRIPYYVGPLARGNSRFAWMTRKSEETITPWNFEEVVDKGASAQSFIERMTNFDKNLPNEKVLPKHSLLYEYFTVYNELTKVKYVTEGMRKPAFLSGEQKKAIVDLLFKTNRKVTVKQLKEDYFKKIECFDSVEISGVEDRFNASLGTYHDLLKIIKDKDFLDNEENEDILEDIVLTLTLFEDREMIEERLKTYAHLFDDKVMKQLKRRRYTGWGRLSRKLINGIRDKQSGKTILDFLKSDGFANRNFMQLIHDDSLTFKEDIQKAQVSGQGDSLHEHIANLAGSPAIKKGILQTVKVVDELVKVMGRHKPENIVIEMARENQTTQKGQKNSRERMKRIEEGIKELGSQILKEHPVENTQLQNEKLYLYYLQNGRDMYVDQELDINRLSDYDVDHIVPQSFLKDDSIDNKVLTRSDKARGKSDNVPSEEVVKKMKNYWRQLLNAKLITQRKFDNLTKAERGGLSELDKAGFIKRQLVETRQITKHVAQILDSRMNTKYDENDKLIREVKVITLKSKLVSDFRKDFQFYKVREINNYHHAHDAYLNAVVGTALIKKYPKLESEFVYGDYKVYDVRKMIAKSEQEIGKATAKYFFYSNIMNFFKTEITLANGEIRKRPLIETNGETGEIVWDKGRDFATVRKVLSMPQVNIVKKTEVQTGGFSKESILPKRNSDKLIARKKDWDPKKYGGFDSPTVAYSVLVVAKVEKGKSKKLKSVKELLGITIMERSSFEKNPIDFLEAKGYKEVKKDLIIKLPKYSLFELENGRKRMLASAGELQKGNELALPSKYVNFLYLASHYEKLKGSPEDNEQKQLFVEQHKHYLDEIIEQISEFSKRVILADANLDKVLSAYNKHRDKPIREQAENIIHLFTLTNLGAPAAFKYFDTTIDRKRYTSTKEVLDATLIHQSITGLYETRIDLSQLGGDGGGGSGSSPAPGGTLNIEDEYRLHETSKEPDVSLGSTWLSDFPQAWAETGGMGLAVRQAPLIIPLKATSTPVSIKQYPMSQEARLGIKPHIQRLLDQGILVPCQSPWNTPLLPVKKPGTNDYRPVQDLREVNKRVEDIHPTVPNPYNLLSGLPPSHQWYTVLDLKDAFFCLRLHPTSQPLFAFEWRDPEMGISGQLTWTRLPQGFKNSPTLFNEALHRDLADFRIQHPDLILLQYVDDLLLAATSELDCQQGTRALLQTLGNLGYRASAKKAQICQKQVKYLGYLLKEGQRWLTEARKETVMGQPTPKTPRQLREFLGKAGFCRLFIPGFAEMAAPLYPLTKPGTLFNWGPDQQKAYQEIKQALLTAPALGLPDLTKPFELFVDEKQGYAKGVLTQKLGPWRRPVAYLSKKLDPVAAGWPPCLRMVAAIAVLTKDAGKLTMGQPLVILAPHAVEALVKQPPDRWLSNARMTHYQALLLDTDRVQFGPVVALNPATLLPLPEEGLQHNCLDILAEAHGTRPDLTDQPLPDADHTWYTDGSSLLQEGQRKAGAAVTTETEVIWAKALPAGTSAQRAELIALTQALKMAEGKKLNVYTDSRYAFATAHIHGEIYRRRGWLTSEGKEIKNKDEILALLKALFLPKRLSIIHCPGHQKGHSAEARGNRMADQAARKAAITETPDTSTLLIENSSPSGGSKRTADGSEFEAGKRTADGSEFEKRTADGSEFESPKKKAKVE

SEQ ID NO: 2680 - protein, 2120 aa, synthetic construct
MPAAKRVKLDGGDKKYSIGLDIGTNSVGWAVITDEYKVPSKKFKVLGNTDRHSIKKNLIGALLFDSGETAEATRLKRTARRRYTRRKNRICYLQEIFSNEMAKVDDSFFHRLEESFLVEEDKKHERHPIFGNIVDEVAYHEKYPTIYHLRKKLVDSTDKADLRLIYLALAHMIKFRGHFLIEGDLNPDNSDVDKLFIQLVQTYNQLFEENPINASGVDAKAILSARLSKSRRLENLIAQLPGEKKNGLFGNLIALSLGLTPNFKSNFDLAEDAKLQLSKDTYDDDLDNLLAQIGDQYADLFLAAKNLSDAILLSDILRVNTEITKAPLSASMIKRYDEHHQDLTLLKALVRQQLPEKYKEIFFDQSKNGYAGYIDGGASQEEFYKFIKPILEKMDGTEELLVKLNREDLLRKQRTFDNGSIPHQIHLGELHAILRRQEDFYPFLKDNREKIEKILTFRIPYYVGPLARGNSRFAWMTRKSEETITPWNFEEVVDKGASAQSFIERMTNFDKNLPNEKVLPKHSLLYEYFTVYNELTKVKYVTEGMRKPAFLSGEQKKAIVDLLFKTNRKVTVKQLKEDYFKKIECFDSVEISGVEDRFNASLGTYHDLLKIIKDKDFLDNEENEDILEDIVLTLTLFEDREMIEERLKTYAHLFDDKVMKQLKRRRYTGWGRLSRKLINGIRDKQSGKTILDFLKSDGFANRNFMQLIHDDSLTFKEDIQKAQVSGQGDSLHEHIANLAGSPAIKKGILQTVKVVDELVKVMGRHKPENIVIEMARENQTTQKGQKNSRERMKRIEEGIKELGSQILKEHPVENTQLQNEKLYLYYLQNGRDMYVDQELDINRLSDYDVDHIVPQSFLKDDSIDNKVLTRSDKARGKSDNVPSEEVVKKMKNYWRQLLNAKLITQRKFDNLTKAERGGLSELDKAGFIKRQLVETRQITKHVAQILDSRMNTKYDENDKLIREVKVITLKSKLVSDFRKDFQFYKVREINNYHHAHDAYLNAVVGTALIKKYPKLESEFVYGDYKVYDVRKMIAKSEQEIGKATAKYFFYSNIMNFFKTEITLANGEIRKRPLIETNGETGEIVWDKGRDFATVRKVLSMPQVNIVKKTEVQTGGFSKESILPKRNSDKLIARKKDWDPKKYGGFDSPTVAYSVLVVAKVEKGKSKKLKSVKELLGITIMERSSFEKNPIDFLEAKGYKEVKKDLIIKLPKYSLFELENGRKRMLASAGELQKGNELALPSKYVNFLYLASHYEKLKGSPEDNEQKQLFVEQHKHYLDEIIEQISEFSKRVILADANLDKVLSAYNKHRDKPIREQAENIIHLFTLTNLGAPAAFKYFDTTIDRKRYTSTKEVLDATLIHQSITGLYETRIDLSQLGGDGGGGSGGSGGSGGSGGSGGTLNIEDEYRLHETSKEPDVSLGSTWLSDFPQAWAETGGMGLAVRQAPLIIPLKATSTPVSIKQYPMSQEARLGIKPHIQRLLDQGILVPCQSPWNTPLLPVKKPGTNDYRPVQDLREVNKRVEDIHPTVPNPYNLLSGLPPSHQWYTVLDLKDAFFCLRLHPTSQPLFAFEWRDPEMGISGQLTWTRLPQGFKNSPTLFNEALHRDLADFRIQHPDLILLQYVDDLLLAATSELDCQQGTRALLQTLGNLGYRASAKKAQICQKQVKYLGYLLKEGQRWLTEARKETVMGQPTPKTPRQLREFLGKAGFCRLFIPGFAEMAAPLYPLTKPGTLFNWGPDQQKAYQEIKQALLTAPALGLPDLTKPFELFVDEKQGYAKGVLTQKLGPWRRPVAYLSKKLDPVAAGWPPCLRMVAAIAVLTKDAGKLTMGQPLVILAPHAVEALVKQPPDRWLSNARMTHYQALLLDTDRVQFGPVVALNPATLLPLPEEGLQHNCLDILAEAHGTRPDLTDQPLPDADHTWYTDGSSLLQEGQRKAGAAVTTETEVIWAKALPAGTSAQRAELIALTQALKMAEGKKLNVYTDSRYAFATAHIHGEIYRRRGWLTSEGKEIKNKDEILALLKALFLPKRLSIIHCPGHQKGHSAEARGNRMADQAARKAAITETPDTSTLLIENSSPSGGSKRTADGSEFEAGKRTADGSEFEKRTADGSEFESPKKKAKVE

SEQ ID NO: 2681 - protein, 2116 aa, synthetic construct
MPAAKRVKLDGGDKKYSIGLDIGTNSVGWAVITDEYKVPSKKFKVLGNTDRHSIKKNLIGALLFDSGETAEATRLKRTARRRYTRRKNRICYLQEIFSNEMAKVDDSFFHRLEESFLVEEDKKHERHPIFGNIVDEVAYHEKYPTIYHLRKKLVDSTDKADLRLIYLALAHMIKFRGHFLIEGDLNPDNSDVDKLFIQLVQTYNQLFEENPINASGVDAKAILSARLSKSRRLENLIAQLPGEKKNGLFGNLIALSLGLTPNFKSNFDLAEDAKLQLSKDTYDDDLDNLLAQIGDQYADLFLAAKNLSDAILLSDILRVNTEITKAPLSASMIKRYDEHHQDLTLLKALVRQQLPEKYKEIFFDQSKNGYAGYIDGGASQEEFYKFIKPILEKMDGTEELLVKLNREDLLRKQRTFDNGSIPHQIHLGELHAILRRQEDFYPFLKDNREKIEKILTFRIPYYVGPLARGNSRFAWMTRKSEETITPWNFEEVVDKGASAQSFIERMTNFDKNLPNEKVLPKHSLLYEYFTVYNELTKVKYVTEGMRKPAFLSGEQKKAIVDLLFKTNRKVTVKQLKEDYFKKIECFDSVEISGVEDRFNASLGTYHDLLKIIKDKDFLDNEENEDILEDIVLTLTLFEDREMIEERLKTYAHLFDDKVMKQLKRRRYTGWGRLSRKLINGIRDKQSGKTILDFLKSDGFANRNFMQLIHDDSLTFKEDIQKAQVSGQGDSLHEHIANLAGSPAIKKGILQTVKVVDELVKVMGRHKPENIVIEMARENQTTQKGQKNSRERMKRIEEGIKELGSQILKEHPVENTQLQNEKLYLYYLQNGRDMYVDQELDINRLSDYDVDHIVPQSFLKDDSIDNKVLTRSDKARGKSDNVPSEEVVKKMKNYWRQLLNAKLITQRKFDNLTKAERGGLSELDKAGFIKRQLVETRQITKHVAQILDSRMNTKYDENDKLIREVKVITLKSKLVSDFRKDFQFYKVREINNYHHAHDAYLNAVVGTALIKKYPKLESEFVYGDYKVYDVRKMIAKSEQEIGKATAKYFFYSNIMNFFKTEITLANGEIRKRPLIETNGETGEIVWDKGRDFATVRKVLSMPQVNIVKKTEVQTGGFSKESILPKRNSDKLIARKKDWDPKKYGGFDSPTVAYSVLVVAKVEKGKSKKLKSVKELLGITIMERSSFEKNPIDFLEAKGYKEVKKDLIIKLPKYSLFELENGRKRMLASAGELQKGNELALPSKYVNFLYLASHYEKLKGSPEDNEQKQLFVEQHKHYLDEIIEQISEFSKRVILADANLDKVLSAYNKHRDKPIREQAENIIHLFTLTNLGAPAAFKYFDTTIDRKRYTSTKEVLDATLIHQSITGLYETRIDLSQLGGDGGEAAAKPAPGGGGGTLNIEDEYRLHETSKEPDVSLGSTWLSDFPQAWAETGGMGLAVRQAPLIIPLKATSTPVSIKQYPMSQEARLGIKPHIQRLLDQGILVPCQSPWNTPLLPVKKPGTNDYRPVQDLREVNKRVEDIHPTVPNPYNLLSGLPPSHQWYTVLDLKDAFFCLRLHPTSQPLFAFEWRDPEMGISGQLTWTRLPQGFKNSPTLFNEALHRDLADFRIQHPDLILLQYVDDLLLAATSELDCQQGTRALLQTLGNLGYRASAKKAQICQKQVKYLGYLLKEGQRWLTEARKETVMGQPTPKTPRQLREFLGKAGFCRLFIPGFAEMAAPLYPLTKPGTLFNWGPDQQKAYQEIKQALLTAPALGLPDLTKPFELFVDEKQGYAKGVLTQKLGPWRRPVAYLSKKLDPVAAGWPPCLRMVAAIAVLTKDAGKLTMGQPLVILAPHAVEALVKQPPDRWLSNARMTHYQALLLDTDRVQFGPVVALNPATLLPLPEEGLQHNCLDILAEAHGTRPDLTDQPLPDADHTWYTDGSSLLQEGQRKAGAAVTTETEVIWAKALPAGTSAQRAELIALTQALKMAEGKKLNVYTDSRYAFATAHIHGEIYRRRGWLTSEGKEIKNKDEILALLKALFLPKRLSIIHCPGHQKGHSAEARGNRMADQAARKAAITETPDTSTLLIENSSPSGGSKRTADGSEFEAGKRTADGSEFEKRTADGSEFESPKKKAKVE

SEQ ID NO: 2682 - protein, 2111 aa, synthetic construct
MPAAKRVKLDGGDKKYSIGLDIGTNSVGWAVITDEYKVPSKKFKVLGNTDRHSIKKNLIGALLFDSGETAEATRLKRTARRRYTRRKNRICYLQEIFSNEMAKVDDSFFHRLEESFLVEEDKKHERHPIFGNIVDEVAYHEKYPTIYHLRKKLVDSTDKADLRLIYLALAHMIKFRGHFLIEGDLNPDNSDVDKLFIQLVQTYNQLFEENPINASGVDAKAILSARLSKSRRLENLIAQLPGEKKNGLFGNLIALSLGLTPNFKSNFDLAEDAKLQLSKDTYDDDLDNLLAQIGDQYADLFLAAKNLSDAILLSDILRVNTEITKAPLSASMIKRYDEHHQDLTLLKALVRQQLPEKYKEIFFDQSKNGYAGYIDGGASQEEFYKFIKPILEKMDGTEELLVKLNREDLLRKQRTFDNGSIPHQIHLGELHAILRRQEDFYPFLKDNREKIEKILTFRIPYYVGPLARGNSRFAWMTRKSEETITPWNFEEVVDKGASAQSFIERMTNFDKNLPNEKVLPKHSLLYEYFTVYNELTKVKYVTEGMRKPAFLSGEQKKAIVDLLFKTNRKVTVKQLKEDYFKKIECFDSVEISGVEDRFNASLGTYHDLLKIIKDKDFLDNEENEDILEDIVLTLTLFEDREMIEERLKTYAHLFDDKVMKQLKRRRYTGWGRLSRKLINGIRDKQSGKTILDFLKSDGFANRNFMQLIHDDSLTFKEDIQKAQVSGQGDSLHEHIANLAGSPAIKKGILQTVKVVDELVKVMGRHKPENIVIEMARENQTTQKGQKNSRERMKRIEEGIKELGSQILKEHPVENTQLQNEKLYLYYLQNGRDMYVDQELDINRLSDYDVDHIVPQSFLKDDSIDNKVLTRSDKARGKSDNVPSEEVVKKMKNYWRQLLNAKLITQRKFDNLTKAERGGLSELDKAGFIKRQLVETRQITKHVAQILDSRMNTKYDENDKLIREVKVITLKSKLVSDFRKDFQFYKVREINNYHHAHDAYLNAVVGTALIKKYPKLESEFVYGDYKVYDVRKMIAKSEQEIGKATAKYFFYSNIMNFFKTEITLANGEIRKRPLIETNGETGEIVWDKGRDFATVRKVLSMPQVNIVKKTEVQTGGFSKESILPKRNSDKLIARKKDWDPKKYGGFDSPTVAYSVLVVAKVEKGKSKKLKSVKELLGITIMERSSFEKNPIDFLEAKGYKEVKKDLIIKLPKYSLFELENGRKRMLASAGELQKGNELALPSKYVNFLYLASHYEKLKGSPEDNEQKQLFVEQHKHYLDEIIEQISEFSKRVILADANLDKVLSAYNKHRDKPIREQAENIIHLFTLTNLGAPAAFKYFDTTIDRKRYTSTKEVLDATLIHQSITGLYETRIDLSQLGGDGGGSSGGSGGTLNIEDEYRLHETSKEPDVSLGSTWLSDFPQAWAETGGMGLAVRQAPLIIPLKATSTPVSIKQYPMSQEARLGIKPHIQRLLDQGILVPCQSPWNTPLLPVKKPGTNDYRPVQDLREVNKRVEDIHPTVPNPYNLLSGLPPSHQWYTVLDLKDAFFCLRLHPTSQPLFAFEWRDPEMGISGQLTWTRLPQGFKNSPTLFNEALHRDLADFRIQHPDLILLQYVDDLLLAATSELDCQQGTRALLQTLGNLGYRASAKKAQICQKQVKYLGYLLKEGQRWLTEARKETVMGQPTPKTPRQLREFLGKAGFCRLFIPGFAEMAAPLYPLTKPGTLFNWGPDQQKAYQEIKQALLTAPALGLPDLTKPFELFVDEKQGYAKGVLTQKLGPWRRPVAYLSKKLDPVAAGWPPCLRMVAAIAVLTKDAGKLTMGQPLVILAPHAVEALVKQPPDRWLSNARMTHYQALLLDTDRVQFGPVVALNPATLLPLPEEGLQHNCLDILAEAHGTRPDLTDQPLPDADHTWYTDGSSLLQEGQRKAGAAVTTETEVIWAKALPAGTSAQRAELIALTQALKMAEGKKLNVYTDSRYAFATAHIHGEIYRRRGWLTSEGKEIKNKDEILALLKALFLPKRLSIIHCPGHQKGHSAEARGNRMADQAARKAAITETPDTSTLLIENSSPSGGSKRTADGSEFEAGKRTADGSEFEKRTADGSEFESPKKKAKVE

SEQ ID NO: 2683 - protein, 2116 aa, synthetic construct
MPAAKRVKLDGGDKKYSIGLDIGTNSVGWAVITDEYKVPSKKFKVLGNTDRHSIKKNLIGALLFDSGETAEATRLKRTARRRYTRRKNRICYLQEIFSNEMAKVDDSFFHRLEESFLVEEDKKHERHPIFGNIVDEVAYHEKYPTIYHLRKKLVDSTDKADLRLIYLALAHMIKFRGHFLIEGDLNPDNSDVDKLFIQLVQTYNQLFEENPINASGVDAKAILSARLSKSRRLENLIAQLPGEKKNGLFGNLIALSLGLTPNFKSNFDLAEDAKLQLSKDTYDDDLDNLLAQIGDQYADLFLAAKNLSDAILLSDILRVNTEITKAPLSASMIKRYDEHHQDLTLLKALVRQQLPEKYKEIFFDQSKNGYAGYIDGGASQEEFYKFIKPILEKMDGTEELLVKLNREDLLRKQRTFDNGSIPHQIHLGELHAILRRQEDFYPFLKDNREKIEKILTFRIPYYVGPLARGNSRFAWMTRKSEETITPWNFEEVVDKGASAQSFIERMTNFDKNLPNEKVLPKHSLLYEYFTVYNELTKVKYVTEGMRKPAFLSGEQKKAIVDLLFKTNRKVTVKQLKEDYFKKIECFDSVEISGVEDRFNASLGTYHDLLKIIKDKDFLDNEENEDILEDIVLTLTLFEDREMIEERLKTYAHLFDDKVMKQLKRRRYTGWGRLSRKLINGIRDKQSGKTILDFLKSDGFANRNFMQLIHDDSLTFKEDIQKAQVSGQGDSLHEHIANLAGSPAIKKGILQTVKVVDELVKVMGRHKPENIVIEMARENQTTQKGQKNSRERMKRIEEGIKELGSQILKEHPVENTQLQNEKLYLYYLQNGRDMYVDQELDINRLSDYDVDHIVPQSFLKDDSIDNKVLTRSDKARGKSDNVPSEEVVKKMKNYWRQLLNAKLITQRKFDNLTKAERGGLSELDKAGFIKRQLVETRQITKHVAQILDSRMNTKYDENDKLIREVKVITLKSKLVSDFRKDFQFYKVREINNYHHAHDAYLNAVVGTALIKKYPKLESEFVYGDYKVYDVRKMIAKSEQEIGKATAKYFFYSNIMNFFKTEITLANGEIRKRPLIETNGETGEIVWDKGRDFATVRKVLSMPQVNIVKKTEVQTGGFSKESILPKRNSDKLIARKKDWDPKKYGGFDSPTVAYSVLVVAKVEKGKSKKLKSVKELLGITIMERSSFEKNPIDFLEAKGYKEVKKDLIIKLPKYSLFELENGRKRMLASAGELQKGNELALPSKYVNFLYLASHYEKLKGSPEDNEQKQLFVEQHKHYLDEIIEQISEFSKRVILADANLDKVLSAYNKHRDKPIREQAENIIHLFTLTNLGAPAAFKYFDTTIDRKRYTSTKEVLDATLIHQSITGLYETRIDLSQLGGDGGEAAAKGSSGGSGGTLNIEDEYRLHETSKEPDVSLGSTWLSDFPQAWAETGGMGLAVRQAPLIIPLKATSTPVSIKQYPMSQEARLGIKPHIQRLLDQGILVPCQSPWNTPLLPVKKPGTNDYRPVQDLREVNKRVEDIHPTVPNPYNLLSGLPPSHQWYTVLDLKDAFFCLRLHPTSQPLFAFEWRDPEMGISGQLTWTRLPQGFKNSPTLFNEALHRDLADFRIQHPDLILLQYVDDLLLAATSELDCQQGTRALLQTLGNLGYRASAKKAQICQKQVKYLGYLLKEGQRWLTEARKETVMGQPTPKTPRQLREFLGKAGFCRLFIPGFAEMAAPLYPLTKPGTLFNWGPDQQKAYQEIKQALLTAPALGLPDLTKPFELFVDEKQGYAKGVLTQKLGPWRRPVAYLSKKLDPVAAGWPPCLRMVAAIAVLTKDAGKLTMGQPLVILAPHAVEALVKQPPDRWLSNARMTHYQALLLDTDRVQFGPVVALNPATLLPLPEEGLQHNCLDILAEAHGTRPDLTDQPLPDADHTWYTDGSSLLQEGQRKAGAAVTTETEVIWAKALPAGTSAQRAELIALTQALKMAEGKKLNVYTDSRYAFATAHIHGEIYRRRGWLTSEGKEIKNKDEILALLKALFLPKRLSIIHCPGHQKGHSAEARGNRMADQAARKAAITETPDTSTLLIENSSPSGGSKRTADGSEFEAGKRTADGSEFEKRTADGSEFESPKKKAKVE

SEQ ID NO: 2684 - protein, 2114 aa, synthetic construct
MPAAKRVKLDGGDKKYSIGLDIGTNSVGWAVITDEYKVPSKKFKVLGNTDRHSIKKNLIGALLFDSGETAEATRLKRTARRRYTRRKNRICYLQEIFSNEMAKVDDSFFHRLEESFLVEEDKKHERHPIFGNIVDEVAYHEKYPTIYHLRKKLVDSTDKADLRLIYLALAHMIKFRGHFLIEGDLNPDNSDVDKLFIQLVQTYNQLFEENPINASGVDAKAILSARLSKSRRLENLIAQLPGEKKNGLFGNLIALSLGLTPNFKSNFDLAEDAKLQLSKDTYDDDLDNLLAQIGDQYADLFLAAKNLSDAILLSDILRVNTEITKAPLSASMIKRYDEHHQDLTLLKALVRQQLPEKYKEIFFDQSKNGYAGYIDGGASQEEFYKFIKPILEKMDGTEELLVKLNREDLLRKQRTFDNGSIPHQIHLGELHAILRRQEDFYPFLKDNREKIEKILTFRIPYYVGPLARGNSRFAWMTRKSEETITPWNFEEVVDKGASAQSFIERMTNFDKNLPNEKVLPKHSLLYEYFTVYNELTKVKYVTEGMRKPAFLSGEQKKAIVDLLFKTNRKVTVKQLKEDYFKKIECFDSVEISGVEDRFNASLGTYHDLLKIIKDKDFLDNEENEDILEDIVLTLTLFEDREMIEERLKTYAHLFDDKVMKQLKRRRYTGWGRLSRKLINGIRDKQSGKTILDFLKSDGFANRNFMQLIHDDSLTFKEDIQKAQVSGQGDSLHEHIANLAGSPAIKKGILQTVKVVDELVKVMGRHKPENIVIEMARENQTTQKGQKNSRERMKRIEEGIKELGSQILKEHPVENTQLQNEKLYLYYLQNGRDMYVDQELDINRLSDYDVDHIVPQSFLKDDSIDNKVLTRSDKARGKSDNVPSEEVVKKMKNYWRQLLNAKLITQRKFDNLTKAERGGLSELDKAGFIKRQLVETRQITKHVAQILDSRMNTKYDENDKLIREVKVITLKSKLVSDFRKDFQFYKVREINNYHHAHDAYLNAVVGTALIKKYPKLESEFVYGDYKVYDVRKMIAKSEQEIGKATAKYFFYSNIMNFFKTEITLANGEIRKRPLIETNGETGEIVWDKGRDFATVRKVLSMPQVNIVKKTEVQTGGFSKESILPKRNSDKLIARKKDWDPKKYGGFDSPTVAYSVLVVAKVEKGKSKKLKSVKELLGITIMERSSFEKNPIDFLEAKGYKEVKKDLIIKLPKYSLFELENGRKRMLASAGELQKGNELALPSKYVNFLYLASHYEKLKGSPEDNEQKQLFVEQHKHYLDEIIEQISEFSKRVILADANLDKVLSAYNKHRDKPIREQAENIIHLFTLTNLGAPAAFKYFDTTIDRKRYTSTKEVLDATLIHQSITGLYETRIDLSQLGGDGGGGSPAPGSSGGTLNIEDEYRLHETSKEPDVSLGSTWLSDFPQAWAETGGMGLAVRQAPLIIPLKATSTPVSIKQYPMSQEARLGIKPHIQRLLDQGILVPCQSPWNTPLLPVKKPGTNDYRPVQDLREVNKRVEDIHPTVPNPYNLLSGLPPSHQWYTVLDLKDAFFCLRLHPTSQPLFAFEWRDPEMGISGQLTWTRLPQGFKNSPTLFNEALHRDLADFRIQHPDLILLQYVDDLLLAATSELDCQQGTRALLQTLGNLGYRASAKKAQICQKQVKYLGYLLKEGQRWLTEARKETVMGQPTPKTPRQLREFLGKAGFCRLFIPGFAEMAAPLYPLTKPGTLFNWGPDQQKAYQEIKQALLTAPALGLPDLTKPFELFVDEKQGYAKGVLTQKLGPWRRPVAYLSKKLDPVAAGWPPCLRMVAAIAVLTKDAGKLTMGQPLVILAPHAVEALVKQPPDRWLSNARMTHYQALLLDTDRVQFGPVVALNPATLLPLPEEGLQHNCLDILAEAHGTRPDLTDQPLPDADHTWYTDGSSLLQEGQRKAGAAVTTETEVIWAKALPAGTSAQRAELIALTQALKMAEGKKLNVYTDSRYAFATAHIHGEIYRRRGWLTSEGKEIKNKDEILALLKALFLPKRLSIIHCPGHQKGHSAEARGNRMADQAARKAAITETPDTSTLLIENSSPSGGSKRTADGSEFEAGKRTADGSEFEKRTADGSEFESPKKKAKVE

SEQ ID NO: 2685 - protein, 2114 aa, synthetic construct
MPAAKRVKLDGGDKKYSIGLDIGTNSVGWAVITDEYKVPSKKFKVLGNTDRHSIKKNLIGALLFDSGETAEATRLKRTARRRYTRRKNRICYLQEIFSNEMAKVDDSFFHRLEESFLVEEDKKHERHPIFGNIVDEVAYHEKYPTIYHLRKKLVDSTDKADLRLIYLALAHMIKFRGHFLIEGDLNPDNSDVDKLFIQLVQTYNQLFEENPINASGVDAKAILSARLSKSRRLENLIAQLPGEKKNGLFGNLIALSLGLTPNFKSNFDLAEDAKLQLSKDTYDDDLDNLLAQIGDQYADLFLAAKNLSDAILLSDILRVNTEITKAPLSASMIKRYDEHHQDLTLLKALVRQQLPEKYKEIFFDQSKNGYAGYIDGGASQEEFYKFIKPILEKMDGTEELLVKLNREDLLRKQRTFDNGSIPHQIHLGELHAILRRQEDFYPFLKDNREKIEKILTFRIPYYVGPLARGNSRFAWMTRKSEETITPWNFEEVVDKGASAQSFIERMTNFDKNLPNEKVLPKHSLLYEYFTVYNELTKVKYVTEGMRKPAFLSGEQKKAIVDLLFKTNRKVTVKQLKEDYFKKIECFDSVEISGVEDRFNASLGTYHDLLKIIKDKDFLDNEENEDILEDIVLTLTLFEDREMIEERLKTYAHLFDDKVMKQLKRRRYTGWGRLSRKLINGIRDKQSGKTILDFLKSDGFANRNFMQLIHDDSLTFKEDIQKAQVSGQGDSLHEHIANLAGSPAIKKGILQTVKVVDELVKVMGRHKPENIVIEMARENQTTQKGQKNSRERMKRIEEGIKELGSQILKEHPVENTQLQNEKLYLYYLQNGRDMYVDQELDINRLSDYDVDHIVPQSFLKDDSIDNKVLTRSDKARGKSDNVPSEEVVKKMKNYWRQLLNAKLITQRKFDNLTKAERGGLSELDKAGFIKRQLVETRQITKHVAQILDSRMNTKYDENDKLIREVKVITLKSKLVSDFRKDFQFYKVREINNYHHAHDAYLNAVVGTALIKKYPKLESEFVYGDYKVYDVRKMIAKSEQEIGKATAKYFFYSNIMNFFKTEITLANGEIRKRPLIETNGETGEIVWDKGRDFATVRKVLSMPQVNIVKKTEVQTGGFSKESILPKRNSDKLIARKKDWDPKKYGGFDSPTVAYSVLVVAKVEKGKSKKLKSVKELLGITIMERSSFEKNPIDFLEAKGYKEVKKDLIIKLPKYSLFELENGRKRMLASAGELQKGNELALPSKYVNFLYLASHYEKLKGSPEDNEQKQLFVEQHKHYLDEIIEQISEFSKRVILADANLDKVLSAYNKHRDKPIREQAENIIHLFTLTNLGAPAAFKYFDTTIDRKRYTSTKEVLDATLIHQSITGLYETRIDLSQLGGDGGPAPGSSGGSGGTLNIEDEYRLHETSKEPDVSLGSTWLSDFPQAWAETGGMGLAVRQAPLIIPLKATSTPVSIKQYPMSQEARLGIKPHIQRLLDQGILVPCQSPWNTPLLPVKKPGTNDYRPVQDLREVNKRVEDIHPTVPNPYNLLSGLPPSHQWYTVLDLKDAFFCLRLHPTSQPLFAFEWRDPEMGISGQLTWTRLPQGFKNSPTLFNEALHRDLADFRIQHPDLILLQYVDDLLLAATSELDCQQGTRALLQTLGNLGYRASAKKAQICQKQVKYLGYLLKEGQRWLTEARKETVMGQPTPKTPRQLREFLGKAGFCRLFIPGFAEMAAPLYPLTKPGTLFNWGPDQQKAYQEIKQALLTAPALGLPDLTKPFELFVDEKQGYAKGVLTQKLGPWRRPVAYLSKKLDPVAAGWPPCLRMVAAIAVLTKDAGKLTMGQPLVILAPHAVEALVKQPPDRWLSNARMTHYQALLLDTDRVQFGPVVALNPATLLPLPEEGLQHNCLDILAEAHGTRPDLTDQPLPDADHTWYTDGSSLLQEGQRKAGAAVTTETEVIWAKALPAGTSAQRAELIALTQALKMAEGKKLNVYTDSRYAFATAHIHGEIYRRRGWLTSEGKEIKNKDEILALLKALFLPKRLSIIHCPGHQKGHSAEARGNRMADQAARKAAITETPDTSTLLIENSSPSGGSKRTADGSEFEAGKRTADGSEFEKRTADGSEFESPKKKAKVE

SEQ ID NO: 2686 - protein, 2116 aa, synthetic construct
MPAAKRVKLDGGDKKYSIGLDIGTNSVGWAVITDEYKVPSKKFKVLGNTDRHSIKKNLIGALLFDSGETAEATRLKRTARRRYTRRKNRICYLQEIFSNEMAKVDDSFFHRLEESFLVEEDKKHERHPIFGNIVDEVAYHEKYPTIYHLRKKLVDSTDKADLRLIYLALAHMIKFRGHFLIEGDLNPDNSDVDKLFIQLVQTYNQLFEENPINASGVDAKAILSARLSKSRRLENLIAQLPGEKKNGLFGNLIALSLGLTPNFKSNFDLAEDAKLQLSKDTYDDDLDNLLAQIGDQYADLFLAAKNLSDAILLSDILRVNTEITKAPLSASMIKRYDEHHQDLTLLKALVRQQLPEKYKEIFFDQSKNGYAGYIDGGASQEEFYKFIKPILEKMDGTEELLVKLNREDLLRKQRTFDNGSIPHQIHLGELHAILRRQEDFYPFLKDNREKIEKILTFRIPYYVGPLARGNSRFAWMTRKSEETITPWNFEEVVDKGASAQSFIERMTNFDKNLPNEKVLPKHSLLYEYFTVYNELTKVKYVTEGMRKPAFLSGEQKKAIVDLLFKTNRKVTVKQLKEDYFKKIECFDSVEISGVEDRFNASLGTYHDLLKIIKDKDFLDNEENEDILEDIVLTLTLFEDREMIEERLKTYAHLFDDKVMKQLKRRRYTGWGRLSRKLINGIRDKQSGKTILDFLKSDGFANRNFMQLIHDDSLTFKEDIQKAQVSGQGDSLHEHIANLAGSPAIKKGILQTVKVVDELVKVMGRHKPENIVIEMARENQTTQKGQKNSRERMKRIEEGIKELGSQILKEHPVENTQLQNEKLYLYYLQNGRDMYVDQELDINRLSDYDVDHIVPQSFLKDDSIDNKVLTRSDKARGKSDNVPSEEVVKKMKNYWRQLLNAKLITQRKFDNLTKAERGGLSELDKAGFIKRQLVETRQITKHVAQILDSRMNTKYDENDKLIREVKVITLKSKLVSDFRKDFQFYKVREINNYHHAHDAYLNAVVGTALIKKYPKLESEFVYGDYKVYDVRKMIAKSEQEIGKATAKYFFYSNIMNFFKTEITLANGEIRKRPLIETNGETGEIVWDKGRDFATVRKVLSMPQVNIVKKTEVQTGGFSKESILPKRNSDKLIARKKDWDPKKYGGFDSPTVAYSVLVVAKVEKGKSKKLKSVKELLGITIMERSSFEKNPIDFLEAKGYKEVKKDLIIKLPKYSLFELENGRKRMLASAGELQKGNELALPSKYVNFLYLASHYEKLKGSPEDNEQKQLFVEQHKHYLDEIIEQISEFSKRVILADANLDKVLSAYNKHRDKPIREQAENIIHLFTLTNLGAPAAFKYFDTTIDRKRYTSTKEVLDATLIHQSITGLYETRIDLSQLGGDGGEAAAKGSSGGGGGTLNIEDEYRLHETSKEPDVSLGSTWLSDFPQAWAETGGMGLAVRQAPLIIPLKATSTPVSIKQYPMSQEARLGIKPHIQRLLDQGILVPCQSPWNTPLLPVKKPGTNDYRPVQDLREVNKRVEDIHPTVPNPYNLLSGLPPSHQWYTVLDLKDAFFCLRLHPTSQPLFAFEWRDPEMGISGQLTWTRLPQGFKNSPTLFNEALHRDLADFRIQHPDLILLQYVDDLLLAATSELDCQQGTRALLQTLGNLGYRASAKKAQICQKQVKYLGYLLKEGQRWLTEARKETVMGQPTPKTPRQLREFLGKAGFCRLFIPGFAEMAAPLYPLTKPGTLFNWGPDQQKAYQEIKQALLTAPALGLPDLTKPFELFVDEKQGYAKGVLTQKLGPWRRPVAYLSKKLDPVAAGWPPCLRMVAAIAVLTKDAGKLTMGQPLVILAPHAVEALVKQPPDRWLSNARMTHYQALLLDTDRVQFGPVVALNPATLLPLPEEGLQHNCLDILAEAHGTRPDLTDQPLPDADHTWYTDGSSLLQEGQRKAGAAVTTETEVIWAKALPAGTSAQRAELIALTQALKMAEGKKLNVYTDSRYAFATAHIHGEIYRRRGWLTSEGKEIKNKDEILALLKALFLPKRLSIIHCPGHQKGHSAEARGNRMADQAARKAAITETPDTSTLLIENSSPSGGSKRTADGSEFEAGKRTADGSEFEKRTADGSEFESPKKKAKVE

SEQ ID NO: 2687 - protein, 2117 aa, synthetic construct
MPAAKRVKLDGGDKKYSIGLDIGTNSVGWAVITDEYKVPSKKFKVLGNTDRHSIKKNLIGALLFDSGETAEATRLKRTARRRYTRRKNRICYLQEIFSNEMAKVDDSFFHRLEESFLVEEDKKHERHPIFGNIVDEVAYHEKYPTIYHLRKKLVDSTDKADLRLIYLALAHMIKFRGHFLIEGDLNPDNSDVDKLFIQLVQTYNQLFEENPINASGVDAKAILSARLSKSRRLENLIAQLPGEKKNGLFGNLIALSLGLTPNFKSNFDLAEDAKLQLSKDTYDDDLDNLLAQIGDQYADLFLAAKNLSDAILLSDILRVNTEITKAPLSASMIKRYDEHHQDLTLLKALVRQQLPEKYKEIFFDQSKNGYAGYIDGGASQEEFYKFIKPILEKMDGTEELLVKLNREDLLRKQRTFDNGSIPHQIHLGELHAILRRQEDFYPFLKDNREKIEKILTFRIPYYVGPLARGNSRFAWMTRKSEETITPWNFEEVVDKGASAQSFIERMTNFDKNLPNEKVLPKHSLLYEYFTVYNELTKVKYVTEGMRKPAFLSGEQKKAIVDLLFKTNRKVTVKQLKEDYFKKIECFDSVEISGVEDRFNASLGTYHDLLKIIKDKDFLDNEENEDILEDIVLTLTLFEDREMIEERLKTYAHLFDDKVMKQLKRRRYTGWGRLSRKLINGIRDKQSGKTILDFLKSDGFANRNFMQLIHDDSLTFKEDIQKAQVSGQGDSLHEHIANLAGSPAIKKGILQTVKVVDELVKVMGRHKPENIVIEMARENQTTQKGQKNSRERMKRIEEGIKELGSQILKEHPVENTQLQNEKLYLYYLQNGRDMYVDQELDINRLSDYDVDHIVPQSFLKDDSIDNKVLTRSDKARGKSDNVPSEEVVKKMKNYWRQLLNAKLITQRKFDNLTKAERGGLSELDKAGFIKRQLVETRQITKHVAQILDSRMNTKYDENDKLIREVKVITLKSKLVSDFRKDFQFYKVREINNYHHAHDAYLNAVVGTALIKKYPKLESEFVYGDYKVYDVRKMIAKSEQEIGKATAKYFFYSNIMNFFKTEITLANGEIRKRPLIETNGETGEIVWDKGRDFATVRKVLSMPQVNIVKKTEVQTGGFSKESILPKRNSDKLIARKKDWDPKKYGGFDSPTVAYSVLVVAKVEKGKSKKLKSVKELLGITIMERSSFEKNPIDFLEAKGYKEVKKDLIIKLPKYSLFELENGRKRMLASAGELQKGNELALPSKYVNFLYLASHYEKLKGSPEDNEQKQLFVEQHKHYLDEIIEQISEFSKRVILADANLDKVLSAYNKHRDKPIREQAENIIHLFTLTNLGAPAAFKYFDTTIDRKRYTSTKEVLDATLIHQSITGLYETRIDLSQLGGDGGGGSGGSGGSGGSGGTLNIEDEYRLHETSKEPDVSLGSTWLSDFPQAWAETGGMGLAVRQAPLIIPLKATSTPVSIKQYPMSQEARLGIKPHIQRLLDQGILVPCQSPWNTPLLPVKKPGTNDYRPVQDLREVNKRVEDIHPTVPNPYNLLSGLPPSHQWYTVLDLKDAFFCLRLHPTSQPLFAFEWRDPEMGISGQLTWTRLPQGFKNSPTLFNEALHRDLADFRIQHPDLILLQYVDDLLLAATSELDCQQGTRALLQTLGNLGYRASAKKAQICQKQVKYLGYLLKEGQRWLTEARKETVMGQPTPKTPRQLREFLGKAGFCRLFIPGFAEMAAPLYPLTKPGTLFNWGPDQQKAYQEIKQALLTAPALGLPDLTKPFELFVDEKQGYAKGVLTQKLGPWRRPVAYLSKKLDPVAAGWPPCLRMVAAIAVLTKDAGKLTMGQPLVILAPHAVEALVKQPPDRWLSNARMTHYQALLLDTDRVQFGPVVALNPATLLPLPEEGLQHNCLDILAEAHGTRPDLTDQPLPDADHTWYTDGSSLLQEGQRKAGAAVTTETEVIWAKALPAGTSAQRAELIALTQALKMAEGKKLNVYTDSRYAFATAHIHGEIYRRRGWLTSEGKEIKNKDEILALLKALFLPKRLSIIHCPGHQKGHSAEARGNRMADQAARKAAITETPDTSTLLIENSSPSGGSKRTADGSEFEAGKRTADGSEFEKRTADGSEFESPKKKAKVE

SEQ ID NO: 2688 - protein, 2116 aa, synthetic construct
MPAAKRVKLDGGDKKYSIGLDIGTNSVGWAVITDEYKVPSKKFKVLGNTDRHSIKKNLIGALLFDSGETAEATRLKRTARRRYTRRKNRICYLQEIFSNEMAKVDDSFFHRLEESFLVEEDKKHERHPIFGNIVDEVAYHEKYPTIYHLRKKLVDSTDKADLRLIYLALAHMIKFRGHFLIEGDLNPDNSDVDKLFIQLVQTYNQLFEENPINASGVDAKAILSARLSKSRRLENLIAQLPGEKKNGLFGNLIALSLGLTPNFKSNFDLAEDAKLQLSKDTYDDDLDNLLAQIGDQYADLFLAAKNLSDAILLSDILRVNTEITKAPLSASMIKRYDEHHQDLTLLKALVRQQLPEKYKEIFFDQSKNGYAGYIDGGASQEEFYKFIKPILEKMDGTEELLVKLNREDLLRKQRTFDNGSIPHQIHLGELHAILRRQEDFYPFLKDNREKIEKILTFRIPYYVGPLARGNSRFAWMTRKSEETITPWNFEEVVDKGASAQSFIERMTNFDKNLPNEKVLPKHSLLYEYFTVYNELTKVKYVTEGMRKPAFLSGEQKKAIVDLLFKTNRKVTVKQLKEDYFKKIECFDSVEISGVEDRFNASLGTYHDLLKIIKDKDFLDNEENEDILEDIVLTLTLFEDREMIEERLKTYAHLFDDKVMKQLKRRRYTGWGRLSRKLINGIRDKQSGKTILDFLKSDGFANRNFMQLIHDDSLTFKEDIQKAQVSGQGDSLHEHIANLAGSPAIKKGILQTVKVVDELVKVMGRHKPENIVIEMARENQTTQKGQKNSRERMKRIEEGIKELGSQILKEHPVENTQLQNEKLYLYYLQNGRDMYVDQELDINRLSDYDVDHIVPQSFLKDDSIDNKVLTRSDKARGKSDNVPSEEVVKKMKNYWRQLLNAKLITQRKFDNLTKAERGGLSELDKAGFIKRQLVETRQITKHVAQILDSRMNTKYDENDKLIREVKVITLKSKLVSDFRKDFQFYKVREINNYHHAHDAYLNAVVGTALIKKYPKLESEFVYGDYKVYDVRKMIAKSEQEIGKATAKYFFYSNIMNFFKTEITLANGEIRKRPLIETNGETGEIVWDKGRDFATVRKVLSMPQVNIVKKTEVQTGGFSKESILPKRNSDKLIARKKDWDPKKYGGFDSPTVAYSVLVVAKVEKGKSKKLKSVKELLGITIMERSSFEKNPIDFLEAKGYKEVKKDLIIKLPKYSLFELENGRKRMLASAGELQKGNELALPSKYVNFLYLASHYEKLKGSPEDNEQKQLFVEQHKHYLDEIIEQISEFSKRVILADANLDKVLSAYNKHRDKPIREQAENIIHLFTLTNLGAPAAFKYFDTTIDRKRYTSTKEVLDATLIHQSITGLYETRIDLSQLGGDGGGGGGSSEAAAKGGTLNIEDEYRLHETSKEPDVSLGSTWLSDFPQAWAETGGMGLAVRQAPLIIPLKATSTPVSIKQYPMSQEARLGIKPHIQRLLDQGILVPCQSPWNTPLLPVKKPGTNDYRPVQDLREVNKRVEDIHPTVPNPYNLLSGLPPSHQWYTVLDLKDAFFCLRLHPTSQPLFAFEWRDPEMGISGQLTWTRLPQGFKNSPTLFNEALHRDLADFRIQHPDLILLQYVDDLLLAATSELDCQQGTRALLQTLGNLGYRASAKKAQICQKQVKYLGYLLKEGQRWLTEARKETVMGQPTPKTPRQLREFLGKAGFCRLFIPGFAEMAAPLYPLTKPGTLFNWGPDQQKAYQEIKQALLTAPALGLPDLTKPFELFVDEKQGYAKGVLTQKLGPWRRPVAYLSKKLDPVAAGWPPCLRMVAAIAVLTKDAGKLTMGQPLVILAPHAVEALVKQPPDRWLSNARMTHYQALLLDTDRVQFGPVVALNPATLLPLPEEGLQHNCLDILAEAHGTRPDLTDQPLPDADHTWYTDGSSLLQEGQRKAGAAVTTETEVIWAKALPAGTSAQRAELIALTQALKMAEGKKLNVYTDSRYAFATAHIHGEIYRRRGWLTSEGKEIKNKDEILALLKALFLPKRLSIIHCPGHQKGHSAEARGNRMADQAARKAAITETPDTSTLLIENSSPSGGSKRTADGSEFEAGKRTADGSEFEKRTADGSEFESPKKKAKVE

SEQ ID NO: 2689 - protein, 2114 aa, synthetic construct
MPAAKRVKLDGGDKKYSIGLDIGTNSVGWAVITDEYKVPSKKFKVLGNTDRHSIKKNLIGALLFDSGETAEATRLKRTARRRYTRRKNRICYLQEIFSNEMAKVDDSFFHRLEESFLVEEDKKHERHPIFGNIVDEVAYHEKYPTIYHLRKKLVDSTDKADLRLIYLALAHMIKFRGHFLIEGDLNPDNSDVDKLFIQLVQTYNQLFEENPINASGVDAKAILSARLSKSRRLENLIAQLPGEKKNGLFGNLIALSLGLTPNFKSNFDLAEDAKLQLSKDTYDDDLDNLLAQIGDQYADLFLAAKNLSDAILLSDILRVNTEITKAPLSASMIKRYDEHHQDLTLLKALVRQQLPEKYKEIFFDQSKNGYAGYIDGGASQEEFYKFIKPILEKMDGTEELLVKLNREDLLRKQRTFDNGSIPHQIHLGELHAILRRQEDFYPFLKDNREKIEKILTFRIPYYVGPLARGNSRFAWMTRKSEETITPWNFEEVVDKGASAQSFIERMTNFDKNLPNEKVLPKHSLLYEYFTVYNELTKVKYVTEGMRKPAFLSGEQKKAIVDLLFKTNRKVTVKQLKEDYFKKIECFDSVEISGVEDRFNASLGTYHDLLKIIKDKDFLDNEENEDILEDIVLTLTLFEDREMIEERLKTYAHLFDDKVMKQLKRRRYTGWGRLSRKLINGIRDKQSGKTILDFLKSDGFANRNFMQLIHDDSLTFKEDIQKAQVSGQGDSLHEHIANLAGSPAIKKGILQTVKVVDELVKVMGRHKPENIVIEMARENQTTQKGQKNSRERMKRIEEGIKELGSQILKEHPVENTQLQNEKLYLYYLQNGRDMYVDQELDINRLSDYDVDHIVPQSFLKDDSIDNKVLTRSDKARGKSDNVPSEEVVKKMKNYWRQLLNAKLITQRKFDNLTKAERGGLSELDKAGFIKRQLVETRQITKHVAQILDSRMNTKYDENDKLIREVKVITLKSKLVSDFRKDFQFYKVREINNYHHAHDAYLNAVVGTALIKKYPKLESEFVYGDYKVYDVRKMIAKSEQEIGKATAKYFFYSNIMNFFKTEITLANGEIRKRPLIETNGETGEIVWDKGRDFATVRKVLSMPQVNIVKKTEVQTGGFSKESILPKRNSDKLIARKKDWDPKKYGGFDSPTVAYSVLVVAKVEKGKSKKLKSVKELLGITIMERSSFEKNPIDFLEAKGYKEVKKDLIIKLPKYSLFELENGRKRMLASAGELQKGNELALPSKYVNFLYLASHYEKLKGSPEDNEQKQLFVEQHKHYLDEIIEQISEFSKRVILADANLDKVLSAYNKHRDKPIREQAENIIHLFTLTNLGAPAAFKYFDTTIDRKRYTSTKEVLDATLIHQSITGLYETRIDLSQLGGDGGGSSPAPGGSGGTLNIEDEYRLHETSKEPDVSLGSTWLSDFPQAWAETGGMGLAVRQAPLIIPLKATSTPVSIKQYPMSQEARLGIKPHIQRLLDQGILVPCQSPWNTPLLPVKKPGTNDYRPVQDLREVNKRVEDIHPTVPNPYNLLSGLPPSHQWYTVLDLKDAFFCLRLHPTSQPLFAFEWRDPEMGISGQLTWTRLPQGFKNSPTLFNEALHRDLADFRIQHPDLILLQYVDDLLLAATSELDCQQGTRALLQTLGNLGYRASAKKAQICQKQVKYLGYLLKEGQRWLTEARKETVMGQPTPKTPRQLREFLGKAGFCRLFIPGFAEMAAPLYPLTKPGTLFNWGPDQQKAYQEIKQALLTAPALGLPDLTKPFELFVDEKQGYAKGVLTQKLGPWRRPVAYLSKKLDPVAAGWPPCLRMVAAIAVLTKDAGKLTMGQPLVILAPHAVEALVKQPPDRWLSNARMTHYQALLLDTDRVQFGPVVALNPATLLPLPEEGLQHNCLDILAEAHGTRPDLTDQPLPDADHTWYTDGSSLLQEGQRKAGAAVTTETEVIWAKALPAGTSAQRAELIALTQALKMAEGKKLNVYTDSRYAFATAHIHGEIYRRRGWLTSEGKEIKNKDEILALLKALFLPKRLSIIHCPGHQKGHSAEARGNRMADQAARKAAITETPDTSTLLIENSSPSGGSKRTADGSEFEAGKRTADGSEFEKRTADGSEFESPKKKAKVE

SEQ ID NO: 2690 - protein, 2116 aa, synthetic construct
MPAAKRVKLDGGDKKYSIGLDIGTNSVGWAVITDEYKVPSKKFKVLGNTDRHSIKKNLIGALLFDSGETAEATRLKRTARRRYTRRKNRICYLQEIFSNEMAKVDDSFFHRLEESFLVEEDKKHERHPIFGNIVDEVAYHEKYPTIYHLRKKLVDSTDKADLRLIYLALAHMIKFRGHFLIEGDLNPDNSDVDKLFIQLVQTYNQLFEENPINASGVDAKAILSARLSKSRRLENLIAQLPGEKKNGLFGNLIALSLGLTPNFKSNFDLAEDAKLQLSKDTYDDDLDNLLAQIGDQYADLFLAAKNLSDAILLSDILRVNTEITKAPLSASMIKRYDEHHQDLTLLKALVRQQLPEKYKEIFFDQSKNGYAGYIDGGASQEEFYKFIKPILEKMDGTEELLVKLNREDLLRKQRTFDNGSIPHQIHLGELHAILRRQEDFYPFLKDNREKIEKILTFRIPYYVGPLARGNSRFAWMTRKSEETITPWNFEEVVDKGASAQSFIERMTNFDKNLPNEKVLPKHSLLYEYFTVYNELTKVKYVTEGMRKPAFLSGEQKKAIVDLLFKTNRKVTVKQLKEDYFKKIECFDSVEISGVEDRFNASLGTYHDLLKIIKDKDFLDNEENEDILEDIVLTLTLFEDREMIEERLKTYAHLFDDKVMKQLKRRRYTGWGRLSRKLINGIRDKQSGKTILDFLKSDGFANRNFMQLIHDDSLTFKEDIQKAQVSGQGDSLHEHIANLAGSPAIKKGILQTVKVVDELVKVMGRHKPENIVIEMARENQTTQKGQKNSRERMKRIEEGIKELGSQILKEHPVENTQLQNEKLYLYYLQNGRDMYVDQELDINRLSDYDVDHIVPQSFLKDDSIDNKVLTRSDKARGKSDNVPSEEVVKKMKNYWRQLLNAKLITQRKFDNLTKAERGGLSELDKAGFIKRQLVETRQITKHVAQILDSRMNTKYDENDKLIREVKVITLKSKLVSDFRKDFQFYKVREINNYHHAHDAYLNAVVGTALIKKYPKLESEFVYGDYKVYDVRKMIAKSEQEIGKATAKYFFYSNIMNFFKTEITLANGEIRKRPLIETNGETGEIVWDKGRDFATVRKVLSMPQVNIVKKTEVQTGGFSKESILPKRNSDKLIARKKDWDPKKYGGFDSPTVAYSVLVVAKVEKGKSKKLKSVKELLGITIMERSSFEKNPIDFLEAKGYKEVKKDLIIKLPKYSLFELENGRKRMLASAGELQKGNELALPSKYVNFLYLASHYEKLKGSPEDNEQKQLFVEQHKHYLDEIIEQISEFSKRVILADANLDKVLSAYNKHRDKPIREQAENIIHLFTLTNLGAPAAFKYFDTTIDRKRYTSTKEVLDATLIHQSITGLYETRIDLSQLGGDGGGGSEAAAKPAPGGTLNIEDEYRLHETSKEPDVSLGSTWLSDFPQAWAETGGMGLAVRQAPLIIPLKATSTPVSIKQYPMSQEARLGIKPHIQRLLDQGILVPCQSPWNTPLLPVKKPGTNDYRPVQDLREVNKRVEDIHPTVPNPYNLLSGLPPSHQWYTVLDLKDAFFCLRLHPTSQPLFAFEWRDPEMGISGQLTWTRLPQGFKNSPTLFNEALHRDLADFRIQHPDLILLQYVDDLLLAATSELDCQQGTRALLQTLGNLGYRASAKKAQICQKQVKYLGYLLKEGQRWLTEARKETVMGQPTPKTPRQLREFLGKAGFCRLFIPGFAEMAAPLYPLTKPGTLFNWGPDQQKAYQEIKQALLTAPALGLPDLTKPFELFVDEKQGYAKGVLTQKLGPWRRPVAYLSKKLDPVAAGWPPCLRMVAAIAVLTKDAGKLTMGQPLVILAPHAVEALVKQPPDRWLSNARMTHYQALLLDTDRVQFGPVVALNPATLLPLPEEGLQHNCLDILAEAHGTRPDLTDQPLPDADHTWYTDGSSLLQEGQRKAGAAVTTETEVIWAKALPAGTSAQRAELIALTQALKMAEGKKLNVYTDSRYAFATAHIHGEIYRRRGWLTSEGKEIKNKDEILALLKALFLPKRLSIIHCPGHQKGHSAEARGNRMADQAARKAAITETPDTSTLLIENSSPSGGSKRTADGSEFEAGKRTADGSEFEKRTADGSEFESPKKKAKVE

SEQ ID NO: 2691 - protein, 2110 aa, synthetic construct
MPAAKRVKLDGGDKKYSIGLDIGTNSVGWAVITDEYKVPSKKFKVLGNTDRHSIKKNLIGALLFDSGETAEATRLKRTARRRYTRRKNRICYLQEIFSNEMAKVDDSFFHRLEESFLVEEDKKHERHPIFGNIVDEVAYHEKYPTIYHLRKKLVDSTDKADLRLIYLALAHMIKFRGHFLIEGDLNPDNSDVDKLFIQLVQTYNQLFEENPINASGVDAKAILSARLSKSRRLENLIAQLPGEKKNGLFGNLIALSLGLTPNFKSNFDLAEDAKLQLSKDTYDDDLDNLLAQIGDQYADLFLAAKNLSDAILLSDILRVNTEITKAPLSASMIKRYDEHHQDLTLLKALVRQQLPEKYKEIFFDQSKNGYAGYIDGGASQEEFYKFIKPILEKMDGTEELLVKLNREDLLRKQRTFDNGSIPHQIHLGELHAILRRQEDFYPFLKDNREKIEKILTFRIPYYVGPLARGNSRFAWMTRKSEETITPWNFEEVVDKGASAQSFIERMTNFDKNLPNEKVLPKHSLLYEYFTVYNELTKVKYVTEGMRKPAFLSGEQKKAIVDLLFKTNRKVTVKQLKEDYFKKIECFDSVEISGVEDRFNASLGTYHDLLKIIKDKDFLDNEENEDILEDIVLTLTLFEDREMIEERLKTYAHLFDDKVMKQLKRRRYTGWGRLSRKLINGIRDKQSGKTILDFLKSDGFANRNFMQLIHDDSLTFKEDIQKAQVSGQGDSLHEHIANLAGSPAIKKGILQTVKVVDELVKVMGRHKPENIVIEMARENQTTQKGQKNSRERMKRIEEGIKELGSQILKEHPVENTQLQNEKLYLYYLQNGRDMYVDQELDINRLSDYDVDHIVPQSFLKDDSIDNKVLTRSDKARGKSDNVPSEEVVKKMKNYWRQLLNAKLITQRKFDNLTKAERGGLSELDKAGFIKRQLVETRQITKHVAQILDSRMNTKYDENDKLIREVKVITLKSKLVSDFRKDFQFYKVREINNYHHAHDAYLNAVVGTALIKKYPKLESEFVYGDYKVYDVRKMIAKSEQEIGKATAKYFFYSNIMNFFKTEITLANGEIRKRPLIETNGETGEIVWDKGRDFATVRKVLSMPQVNIVKKTEVQTGGFSKESILPKRNSDKLIARKKDWDPKKYGGFDSPTVAYSVLVVAKVEKGKSKKLKSVKELLGITIMERSSFEKNPIDFLEAKGYKEVKKDLIIKLPKYSLFELENGRKRMLASAGELQKGNELALPSKYVNFLYLASHYEKLKGSPEDNEQKQLFVEQHKHYLDEIIEQISEFSKRVILADANLDKVLSAYNKHRDKPIREQAENIIHLFTLTNLGAPAAFKYFDTTIDRKRYTSTKEVLDATLIHQSITGLYETRIDLSQLGGDGGGGGGSGGTLNIEDEYRLHETSKEPDVSLGSTWLSDFPQAWAETGGMGLAVRQAPLIIPLKATSTPVSIKQYPMSQEARLGIKPHIQRLLDQGILVPCQSPWNTPLLPVKKPGTNDYRPVQDLREVNKRVEDIHPTVPNPYNLLSGLPPSHQWYTVLDLKDAFFCLRLHPTSQPLFAFEWRDPEMGISGQLTWTRLPQGFKNSPTLFNEALHRDLADFRIQHPDLILLQYVDDLLLAATSELDCQQGTRALLQTLGNLGYRASAKKAQICQKQVKYLGYLLKEGQRWLTEARKETVMGQPTPKTPRQLREFLGKAGFCRLFIPGFAEMAAPLYPLTKPGTLFNWGPDQQKAYQEIKQALLTAPALGLPDLTKPFELFVDEKQGYAKGVLTQKLGPWRRPVAYLSKKLDPVAAGWPPCLRMVAAIAVLTKDAGKLTMGQPLVILAPHAVEALVKQPPDRWLSNARMTHYQALLLDTDRVQFGPVVALNPATLLPLPEEGLQHNCLDILAEAHGTRPDLTDQPLPDADHTWYTDGSSLLQEGQRKAGAAVTTETEVIWAKALPAGTSAQRAELIALTQALKMAEGKKLNVYTDSRYAFATAHIHGEIYRRRGWLTSEGKEIKNKDEILALLKALFLPKRLSIIHCPGHQKGHSAEARGNRMADQAARKAAITETPDTSTLLIENSSPSGGSKRTADGSEFEAGKRTADGSEFEKRTADGSEFESPKKKAKVE

SEQ ID NO: 2692 - protein, 2116 aa, synthetic construct
MPAAKRVKLDGGDKKYSIGLDIGTNSVGWAVITDEYKVPSKKFKVLGNTDRHSIKKNLIGALLFDSGETAEATRLKRTARRRYTRRKNRICYLQEIFSNEMAKVDDSFFHRLEESFLVEEDKKHERHPIFGNIVDEVAYHEKYPTIYHLRKKLVDSTDKADLRLIYLALAHMIKFRGHFLIEGDLNPDNSDVDKLFIQLVQTYNQLFEENPINASGVDAKAILSARLSKSRRLENLIAQLPGEKKNGLFGNLIALSLGLTPNFKSNFDLAEDAKLQLSKDTYDDDLDNLLAQIGDQYADLFLAAKNLSDAILLSDILRVNTEITKAPLSASMIKRYDEHHQDLTLLKALVRQQLPEKYKEIFFDQSKNGYAGYIDGGASQEEFYKFIKPILEKMDGTEELLVKLNREDLLRKQRTFDNGSIPHQIHLGELHAILRRQEDFYPFLKDNREKIEKILTFRIPYYVGPLARGNSRFAWMTRKSEETITPWNFEEVVDKGASAQSFIERMTNFDKNLPNEKVLPKHSLLYEYFTVYNELTKVKYVTEGMRKPAFLSGEQKKAIVDLLFKTNRKVTVKQLKEDYFKKIECFDSVEISGVEDRFNASLGTYHDLLKIIKDKDFLDNEENEDILEDIVLTLTLFEDREMIEERLKTYAHLFDDKVMKQLKRRRYTGWGRLSRKLINGIRDKQSGKTILDFLKSDGFANRNFMQLIHDDSLTFKEDIQKAQVSGQGDSLHEHIANLAGSPAIKKGILQTVKVVDELVKVMGRHKPENIVIEMARENQTTQKGQKNSRERMKRIEEGIKELGSQILKEHPVENTQLQNEKLYLYYLQNGRDMYVDQELDINRLSDYDVDHIVPQSFLKDDSIDNKVLTRSDKARGKSDNVPSEEVVKKMKNYWRQLLNAKLITQRKFDNLTKAERGGLSELDKAGFIKRQLVETRQITKHVAQILDSRMNTKYDENDKLIREVKVITLKSKLVSDFRKDFQFYKVREINNYHHAHDAYLNAVVGTALIKKYPKLESEFVYGDYKVYDVRKMIAKSEQEIGKATAKYFFYSNIMNFFKTEITLANGEIRKRPLIETNGETGEIVWDKGRDFATVRKVLSMPQVNIVKKTEVQTGGFSKESILPKRNSDKLIARKKDWDPKKYGGFDSPTVAYSVLVVAKVEKGKSKKLKSVKELLGITIMERSSFEKNPIDFLEAKGYKEVKKDLIIKLPKYSLFELENGRKRMLASAGELQKGNELALPSKYVNFLYLASHYEKLKGSPEDNEQKQLFVEQHKHYLDEIIEQISEFSKRVILADANLDKVLSAYNKHRDKPIREQAENIIHLFTLTNLGAPAAFKYFDTTIDRKRYTSTKEVLDATLIHQSITGLYETRIDLSQLGGDGGGGSGGGEAAAKGGTLNIEDEYRLHETSKEPDVSLGSTWLSDFPQAWAETGGMGLAVRQAPLIIPLKATSTPVSIKQYPMSQEARLGIKPHIQRLLDQGILVPCQSPWNTPLLPVKKPGTNDYRPVQDLREVNKRVEDIHPTVPNPYNLLSGLPPSHQWYTVLDLKDAFFCLRLHPTSQPLFAFEWRDPEMGISGQLTWTRLPQGFKNSPTLFNEALHRDLADFRIQHPDLILLQYVDDLLLAATSELDCQQGTRALLQTLGNLGYRASAKKAQICQKQVKYLGYLLKEGQRWLTEARKETVMGQPTPKTPRQLREFLGKAGFCRLFIPGFAEMAAPLYPLTKPGTLFNWGPDQQKAYQEIKQALLTAPALGLPDLTKPFELFVDEKQGYAKGVLTQKLGPWRRPVAYLSKKLDPVAAGWPPCLRMVAAIAVLTKDAGKLTMGQPLVILAPHAVEALVKQPPDRWLSNARMTHYQALLLDTDRVQFGPVVALNPATLLPLPEEGLQHNCLDILAEAHGTRPDLTDQPLPDADHTWYTDGSSLLQEGQRKAGAAVTTETEVIWAKALPAGTSAQRAELIALTQALKMAEGKKLNVYTDSRYAFATAHIHGEIYRRRGWLTSEGKEIKNKDEILALLKALFLPKRLSIIHCPGHQKGHSAEARGNRMADQAARKAAITETPDTSTLLIENSSPSGGSKRTADGSEFEAGKRTADGSEFEKRTADGSEFESPKKKAKVE

SEQ ID NO: 2693 - protein, 2111 aa, synthetic construct
MPAAKRVKLDGGDKKYSIGLDIGTNSVGWAVITDEYKVPSKKFKVLGNTDRHSIKKNLIGALLFDSGETAEATRLKRTARRRYTRRKNRICYLQEIFSNEMAKVDDSFFHRLEESFLVEEDKKHERHPIFGNIVDEVAYHEKYPTIYHLRKKLVDSTDKADLRLIYLALAHMIKFRGHFLIEGDLNPDNSDVDKLFIQLVQTYNQLFEENPINASGVDAKAILSARLSKSRRLENLIAQLPGEKKNGLFGNLIALSLGLTPNFKSNFDLAEDAKLQLSKDTYDDDLDNLLAQIGDQYADLFLAAKNLSDAILLSDILRVNTEITKAPLSASMIKRYDEHHQDLTLLKALVRQQLPEKYKEIFFDQSKNGYAGYIDGGASQEEFYKFIKPILEKMDGTEELLVKLNREDLLRKQRTFDNGSIPHQIHLGELHAILRRQEDFYPFLKDNREKIEKILTFRIPYYVGPLARGNSRFAWMTRKSEETITPWNFEEVVDKGASAQSFIERMTNFDKNLPNEKVLPKHSLLYEYFTVYNELTKVKYVTEGMRKPAFLSGEQKKAIVDLLFKTNRKVTVKQLKEDYFKKIECFDSVEISGVEDRFNASLGTYHDLLKIIKDKDFLDNEENEDILEDIVLTLTLFEDREMIEERLKTYAHLFDDKVMKQLKRRRYTGWGRLSRKLINGIRDKQSGKTILDFLKSDGFANRNFMQLIHDDSLTFKEDIQKAQVSGQGDSLHEHIANLAGSPAIKKGILQTVKVVDELVKVMGRHKPENIVIEMARENQTTQKGQKNSRERMKRIEEGIKELGSQILKEHPVENTQLQNEKLYLYYLQNGRDMYVDQELDINRLSDYDVDHIVPQSFLKDDSIDNKVLTRSDKARGKSDNVPSEEVVKKMKNYWRQLLNAKLITQRKFDNLTKAERGGLSELDKAGFIKRQLVETRQITKHVAQILDSRMNTKYDENDKLIREVKVITLKSKLVSDFRKDFQFYKVREINNYHHAHDAYLNAVVGTALIKKYPKLESEFVYGDYKVYDVRKMIAKSEQEIGKATAKYFFYSNIMNFFKTEITLANGEIRKRPLIETNGETGEIVWDKGRDFATVRKVLSMPQVNIVKKTEVQTGGFSKESILPKRNSDKLIARKKDWDPKKYGGFDSPTVAYSVLVVAKVEKGKSKKLKSVKELLGITIMERSSFEKNPIDFLEAKGYKEVKKDLIIKLPKYSLFELENGRKRMLASAGELQKGNELALPSKYVNFLYLASHYEKLKGSPEDNEQKQLFVEQHKHYLDEIIEQISEFSKRVILADANLDKVLSAYNKHRDKPIREQAENIIHLFTLTNLGAPAAFKYFDTTIDRKRYTSTKEVLDATLIHQSITGLYETRIDLSQLGGDGGGGSGGSGGTLNIEDEYRLHETSKEPDVSLGSTWLSDFPQAWAETGGMGLAVRQAPLIIPLKATSTPVSIKQYPMSQEARLGIKPHIQRLLDQGILVPCQSPWNTPLLPVKKPGTNDYRPVQDLREVNKRVEDIHPTVPNPYNLLSGLPPSHQWYTVLDLKDAFFCLRLHPTSQPLFAFEWRDPEMGISGQLTWTRLPQGFKNSPTLFNEALHRDLADFRIQHPDLILLQYVDDLLLAATSELDCQQGTRALLQTLGNLGYRASAKKAQICQKQVKYLGYLLKEGQRWLTEARKETVMGQPTPKTPRQLREFLGKAGFCRLFIPGFAEMAAPLYPLTKPGTLFNWGPDQQKAYQEIKQALLTAPALGLPDLTKPFELFVDEKQGYAKGVLTQKLGPWRRPVAYLSKKLDPVAAGWPPCLRMVAAIAVLTKDAGKLTMGQPLVILAPHAVEALVKQPPDRWLSNARMTHYQALLLDTDRVQFGPVVALNPATLLPLPEEGLQHNCLDILAEAHGTRPDLTDQPLPDADHTWYTDGSSLLQEGQRKAGAAVTTETEVIWAKALPAGTSAQRAELIALTQALKMAEGKKLNVYTDSRYAFATAHIHGEIYRRRGWLTSEGKEIKNKDEILALLKALFLPKRLSIIHCPGHQKGHSAEARGNRMADQAARKAAITETPDTSTLLIENSSPSGGSKRTADGSEFEAGKRTADGSEFEKRTADGSEFESPKKKAKVE

SEQ ID NO: 2694 - protein, 2114 aa, synthetic construct
MPAAKRVKLDGGDKKYSIGLDIGTNSVGWAVITDEYKVPSKKFKVLGNTDRHSIKKNLIGALLFDSGETAEATRLKRTARRRYTRRKNRICYLQEIFSNEMAKVDDSFFHRLEESFLVEEDKKHERHPIFGNIVDEVAYHEKYPTIYHLRKKLVDSTDKADLRLIYLALAHMIKFRGHFLIEGDLNPDNSDVDKLFIQLVQTYNQLFEENPINASGVDAKAILSARLSKSRRLENLIAQLPGEKKNGLFGNLIALSLGLTPNFKSNFDLAEDAKLQLSKDTYDDDLDNLLAQIGDQYADLFLAAKNLSDAILLSDILRVNTEITKAPLSASMIKRYDEHHQDLTLLKALVRQQLPEKYKEIFFDQSKNGYAGYIDGGASQEEFYKFIKPILEKMDGTEELLVKLNREDLLRKQRTFDNGSIPHQIHLGELHAILRRQEDFYPFLKDNREKIEKILTFRIPYYVGPLARGNSRFAWMTRKSEETITPWNFEEVVDKGASAQSFIERMTNFDKNLPNEKVLPKHSLLYEYFTVYNELTKVKYVTEGMRKPAFLSGEQKKAIVDLLFKTNRKVTVKQLKEDYFKKIECFDSVEISGVEDRFNASLGTYHDLLKIIKDKDFLDNEENEDILEDIVLTLTLFEDREMIEERLKTYAHLFDDKVMKQLKRRRYTGWGRLSRKLINGIRDKQSGKTILDFLKSDGFANRNFMQLIHDDSLTFKEDIQKAQVSGQGDSLHEHIANLAGSPAIKKGILQTVKVVDELVKVMGRHKPENIVIEMARENQTTQKGQKNSRERMKRIEEGIKELGSQILKEHPVENTQLQNEKLYLYYLQNGRDMYVDQELDINRLSDYDVDHIVPQSFLKDDSIDNKVLTRSDKARGKSDNVPSEEVVKKMKNYWRQLLNAKLITQRKFDNLTKAERGGLSELDKAGFIKRQLVETRQITKHVAQILDSRMNTKYDENDKLIREVKVITLKSKLVSDFRKDFQFYKVREINNYHHAHDAYLNAVVGTALIKKYPKLESEFVYGDYKVYDVRKMIAKSEQEIGKATAKYFFYSNIMNFFKTEITLANGEIRKRPLIETNGETGEIVWDKGRDFATVRKVLSMPQVNIVKKTEVQTGGFSKESILPKRNSDKLIARKKDWDPKKYGGFDSPTVAYSVLVVAKVEKGKSKKLKSVKELLGITIMERSSFEKNPIDFLEAKGYKEVKKDLIIKLPKYSLFELENGRKRMLASAGELQKGNELALPSKYVNFLYLASHYEKLKGSPEDNEQKQLFVEQHKHYLDEIIEQISEFSKRVILADANLDKVLSAYNKHRDKPIREQAENIIHLFTLTNLGAPAAFKYFDTTIDRKRYTSTKEVLDATLIHQSITGLYETRIDLSQLGGDGGGSSGGSGGGGGTLNIEDEYRLHETSKEPDVSLGSTWLSDFPQAWAETGGMGLAVRQAPLIIPLKATSTPVSIKQYPMSQEARLGIKPHIQRLLDQGILVPCQSPWNTPLLPVKKPGTNDYRPVQDLREVNKRVEDIHPTVPNPYNLLSGLPPSHQWYTVLDLKDAFFCLRLHPTSQPLFAFEWRDPEMGISGQLTWTRLPQGFKNSPTLFNEALHRDLADFRIQHPDLILLQYVDDLLLAATSELDCQQGTRALLQTLGNLGYRASAKKAQICQKQVKYLGYLLKEGQRWLTEARKETVMGQPTPKTPRQLREFLGKAGFCRLFIPGFAEMAAPLYPLTKPGTLFNWGPDQQKAYQEIKQALLTAPALGLPDLTKPFELFVDEKQGYAKGVLTQKLGPWRRPVAYLSKKLDPVAAGWPPCLRMVAAIAVLTKDAGKLTMGQPLVILAPHAVEALVKQPPDRWLSNARMTHYQALLLDTDRVQFGPVVALNPATLLPLPEEGLQHNCLDILAEAHGTRPDLTDQPLPDADHTWYTDGSSLLQEGQRKAGAAVTTETEVIWAKALPAGTSAQRAELIALTQALKMAEGKKLNVYTDSRYAFATAHIHGEIYRRRGWLTSEGKEIKNKDEILALLKALFLPKRLSIIHCPGHQKGHSAEARGNRMADQAARKAAITETPDTSTLLIENSSPSGGSKRTADGSEFEAGKRTADGSEFEKRTADGSEFESPKKKAKVE

SEQ ID NO: 2695 - protein, 2116 aa, synthetic construct
MPAAKRVKLDGGDKKYSIGLDIGTNSVGWAVITDEYKVPSKKFKVLGNTDRHSIKKNLIGALLFDSGETAEATRLKRTARRRYTRRKNRICYLQEIFSNEMAKVDDSFFHRLEESFLVEEDKKHERHPIFGNIVDEVAYHEKYPTIYHLRKKLVDSTDKADLRLIYLALAHMIKFRGHFLIEGDLNPDNSDVDKLFIQLVQTYNQLFEENPINASGVDAKAILSARLSKSRRLENLIAQLPGEKKNGLFGNLIALSLGLTPNFKSNFDLAEDAKLQLSKDTYDDDLDNLLAQIGDQYADLFLAAKNLSDAILLSDILRVNTEITKAPLSASMIKRYDEHHQDLTLLKALVRQQLPEKYKEIFFDQSKNGYAGYIDGGASQEEFYKFIKPILEKMDGTEELLVKLNREDLLRKQRTFDNGSIPHQIHLGELHAILRRQEDFYPFLKDNREKIEKILTFRIPYYVGPLARGNSRFAWMTRKSEETITPWNFEEVVDKGASAQSFIERMTNFDKNLPNEKVLPKHSLLYEYFTVYNELTKVKYVTEGMRKPAFLSGEQKKAIVDLLFKTNRKVTVKQLKEDYFKKIECFDSVEISGVEDRFNASLGTYHDLLKIIKDKDFLDNEENEDILEDIVLTLTLFEDREMIEERLKTYAHLFDDKVMKQLKRRRYTGWGRLSRKLINGIRDKQSGKTILDFLKSDGFANRNFMQLIHDDSLTFKEDIQKAQVSGQGDSLHEHIANLAGSPAIKKGILQTVKVVDELVKVMGRHKPENIVIEMARENQTTQKGQKNSRERMKRIEEGIKELGSQILKEHPVENTQLQNEKLYLYYLQNGRDMYVDQELDINRLSDYDVDHIVPQSFLKDDSIDNKVLTRSDKARGKSDNVPSEEVVKKMKNYWRQLLNAKLITQRKFDNLTKAERGGLSELDKAGFIKRQLVETRQITKHVAQILDSRMNTKYDENDKLIREVKVITLKSKLVSDFRKDFQFYKVREINNYHHAHDAYLNAVVGTALIKKYPKLESEFVYGDYKVYDVRKMIAKSEQEIGKATAKYFFYSNIMNFFKTEITLANGEIRKRPLIETNGETGEIVWDKGRDFATVRKVLSMPQVNIVKKTEVQTGGFSKESILPKRNSDKLIARKKDWDPKKYGGFDSPTVAYSVLVVAKVEKGKSKKLKSVKELLGITIMERSSFEKNPIDFLEAKGYKEVKKDLIIKLPKYSLFELENGRKRMLASAGELQKGNELALPSKYVNFLYLASHYEKLKGSPEDNEQKQLFVEQHKHYLDEIIEQISEFSKRVILADANLDKVLSAYNKHRDKPIREQAENIIHLFTLTNLGAPAAFKYFDTTIDRKRYTSTKEVLDATLIHQSITGLYETRIDLSQLGGDGGEAAAKGGGGSSGGTLNIEDEYRLHETSKEPDVSLGSTWLSDFPQAWAETGGMGLAVRQAPLIIPLKATSTPVSIKQYPMSQEARLGIKPHIQRLLDQGILVPCQSPWNTPLLPVKKPGTNDYRPVQDLREVNKRVEDIHPTVPNPYNLLSGLPPSHQWYTVLDLKDAFFCLRLHPTSQPLFAFEWRDPEMGISGQLTWTRLPQGFKNSPTLFNEALHRDLADFRIQHPDLILLQYVDDLLLAATSELDCQQGTRALLQTLGNLGYRASAKKAQICQKQVKYLGYLLKEGQRWLTEARKETVMGQPTPKTPRQLREFLGKAGFCRLFIPGFAEMAAPLYPLTKPGTLFNWGPDQQKAYQEIKQALLTAPALGLPDLTKPFELFVDEKQGYAKGVLTQKLGPWRRPVAYLSKKLDPVAAGWPPCLRMVAAIAVLTKDAGKLTMGQPLVILAPHAVEALVKQPPDRWLSNARMTHYQALLLDTDRVQFGPVVALNPATLLPLPEEGLQHNCLDILAEAHGTRPDLTDQPLPDADHTWYTDGSSLLQEGQRKAGAAVTTETEVIWAKALPAGTSAQRAELIALTQALKMAEGKKLNVYTDSRYAFATAHIHGEIYRRRGWLTSEGKEIKNKDEILALLKALFLPKRLSIIHCPGHQKGHSAEARGNRMADQAARKAAITETPDTSTLLIENSSPSGGSKRTADGSEFEAGKRTADGSEFEKRTADGSEFESPKKKAKVE

SEQ ID NO: 2696 - protein, 2117 aa, synthetic construct
MPAAKRVKLDGGDKKYSIGLDIGTNSVGWAVITDEYKVPSKKFKVLGNTDRHSIKKNLIGALLFDSGETAEATRLKRTARRRYTRRKNRICYLQEIFSNEMAKVDDSFFHRLEESFLVEEDKKHERHPIFGNIVDEVAYHEKYPTIYHLRKKLVDSTDKADLRLIYLALAHMIKFRGHFLIEGDLNPDNSDVDKLFIQLVQTYNQLFEENPINASGVDAKAILSARLSKSRRLENLIAQLPGEKKNGLFGNLIALSLGLTPNFKSNFDLAEDAKLQLSKDTYDDDLDNLLAQIGDQYADLFLAAKNLSDAILLSDILRVNTEITKAPLSASMIKRYDEHHQDLTLLKALVRQQLPEKYKEIFFDQSKNGYAGYIDGGASQEEFYKFIKPILEKMDGTEELLVKLNREDLLRKQRTFDNGSIPHQIHLGELHAILRRQEDFYPFLKDNREKIEKILTFRIPYYVGPLARGNSRFAWMTRKSEETITPWNFEEVVDKGASAQSFIERMTNFDKNLPNEKVLPKHSLLYEYFTVYNELTKVKYVTEGMRKPAFLSGEQKKAIVDLLFKTNRKVTVKQLKEDYFKKIECFDSVEISGVEDRFNASLGTYHDLLKIIKDKDFLDNEENEDILEDIVLTLTLFEDREMIEERLKTYAHLFDDKVMKQLKRRRYTGWGRLSRKLINGIRDKQSGKTILDFLKSDGFANRNFMQLIHDDSLTFKEDIQKAQVSGQGDSLHEHIANLAGSPAIKKGILQTVKVVDELVKVMGRHKPENIVIEMARENQTTQKGQKNSRERMKRIEEGIKELGSQILKEHPVENTQLQNEKLYLYYLQNGRDMYVDQELDINRLSDYDVDHIVPQSFLKDDSIDNKVLTRSDKARGKSDNVPSEEVVKKMKNYWRQLLNAKLITQRKFDNLTKAERGGLSELDKAGFIKRQLVETRQITKHVAQILDSRMNTKYDENDKLIREVKVITLKSKLVSDFRKDFQFYKVREINNYHHAHDAYLNAVVGTALIKKYPKLESEFVYGDYKVYDVRKMIAKSEQEIGKATAKYFFYSNIMNFFKTEITLANGEIRKRPLIETNGETGEIVWDKGRDFATVRKVLSMPQVNIVKKTEVQTGGFSKESILPKRNSDKLIARKKDWDPKKYGGFDSPTVAYSVLVVAKVEKGKSKKLKSVKELLGITIMERSSFEKNPIDFLEAKGYKEVKKDLIIKLPKYSLFELENGRKRMLASAGELQKGNELALPSKYVNFLYLASHYEKLKGSPEDNEQKQLFVEQHKHYLDEIIEQISEFSKRVILADANLDKVLSAYNKHRDKPIREQAENIIHLFTLTNLGAPAAFKYFDTTIDRKRYTSTKEVLDATLIHQSITGLYETRIDLSQLGGDGGGSAGSAAGSGEFGGTLNIEDEYRLHETSKEPDVSLGSTWLSDFPQAWAETGGMGLAVRQAPLIIPLKATSTPVSIKQYPMSQEARLGIKPHIQRLLDQGILVPCQSPWNTPLLPVKKPGTNDYRPVQDLREVNKRVEDIHPTVPNPYNLLSGLPPSHQWYTVLDLKDAFFCLRLHPTSQPLFAFEWRDPEMGISGQLTWTRLPQGFKNSPTLFNEALHRDLADFRIQHPDLILLQYVDDLLLAATSELDCQQGTRALLQTLGNLGYRASAKKAQICQKQVKYLGYLLKEGQRWLTEARKETVMGQPTPKTPRQLREFLGKAGFCRLFIPGFAEMAAPLYPLTKPGTLFNWGPDQQKAYQEIKQALLTAPALGLPDLTKPFELFVDEKQGYAKGVLTQKLGPWRRPVAYLSKKLDPVAAGWPPCLRMVAAIAVLTKDAGKLTMGQPLVILAPHAVEALVKQPPDRWLSNARMTHYQALLLDTDRVQFGPVVALNPATLLPLPEEGLQHNCLDILAEAHGTRPDLTDQPLPDADHTWYTDGSSLLQEGQRKAGAAVTTETEVIWAKALPAGTSAQRAELIALTQALKMAEGKKLNVYTDSRYAFATAHIHGEIYRRRGWLTSEGKEIKNKDEILALLKALFLPKRLSIIHCPGHQKGHSAEARGNRMADQAARKAAITETPDTSTLLIENSSPSGGSKRTADGSEFEAGKRTADGSEFEKRTADGSEFESPKKKAKVE

SEQ ID NO: 2697 - protein, 2114 aa, synthetic construct
MPAAKRVKLDGGDKKYSIGLDIGTNSVGWAVITDEYKVPSKKFKVLGNTDRHSIKKNLIGALLFDSGETAEATRLKRTARRRYTRRKNRICYLQEIFSNEMAKVDDSFFHRLEESFLVEEDKKHERHPIFGNIVDEVAYHEKYPTIYHLRKKLVDSTDKADLRLIYLALAHMIKFRGHFLIEGDLNPDNSDVDKLFIQLVQTYNQLFEENPINASGVDAKAILSARLSKSRRLENLIAQLPGEKKNGLFGNLIALSLGLTPNFKSNFDLAEDAKLQLSKDTYDDDLDNLLAQIGDQYADLFLAAKNLSDAILLSDILRVNTEITKAPLSASMIKRYDEHHQDLTLLKALVRQQLPEKYKEIFFDQSKNGYAGYIDGGASQEEFYKFIKPILEKMDGTEELLVKLNREDLLRKQRTFDNGSIPHQIHLGELHAILRRQEDFYPFLKDNREKIEKILTFRIPYYVGPLARGNSRFAWMTRKSEETITPWNFEEVVDKGASAQSFIERMTNFDKNLPNEKVLPKHSLLYEYFTVYNELTKVKYVTEGMRKPAFLSGEQKKAIVDLLFKTNRKVTVKQLKEDYFKKIECFDSVEISGVEDRFNASLGTYHDLLKIIKDKDFLDNEENEDILEDIVLTLTLFEDREMIEERLKTYAHLFDDKVMKQLKRRRYTGWGRLSRKLINGIRDKQSGKTILDFLKSDGFANRNFMQLIHDDSLTFKEDIQKAQVSGQGDSLHEHIANLAGSPAIKKGILQTVKVVDELVKVMGRHKPENIVIEMARENQTTQKGQKNSRERMKRIEEGIKELGSQILKEHPVENTQLQNEKLYLYYLQNGRDMYVDQELDINRLSDYDVDHIVPQSFLKDDSIDNKVLTRSDKARGKSDNVPSEEVVKKMKNYWRQLLNAKLITQRKFDNLTKAERGGLSELDKAGFIKRQLVETRQITKHVAQILDSRMNTKYDENDKLIREVKVITLKSKLVSDFRKDFQFYKVREINNYHHAHDAYLNAVVGTALIKKYPKLESEFVYGDYKVYDVRKMIAKSEQEIGKATAKYFFYSNIMNFFKTEITLANGEIRKRPLIETNGETGEIVWDKGRDFATVRKVLSMPQVNIVKKTEVQTGGFSKESILPKRNSDKLIARKKDWDPKKYGGFDSPTVAYSVLVVAKVEKGKSKKLKSVKELLGITIMERSSFEKNPIDFLEAKGYKEVKKDLIIKLPKYSLFELENGRKRMLASAGELQKGNELALPSKYVNFLYLASHYEKLKGSPEDNEQKQLFVEQHKHYLDEIIEQISEFSKRVILADANLDKVLSAYNKHRDKPIREQAENIIHLFTLTNLGAPAAFKYFDTTIDRKRYTSTKEVLDATLIHQSITGLYETRIDLSQLGGDGGGGSGGSGGSGGTLNIEDEYRLHETSKEPDVSLGSTWLSDFPQAWAETGGMGLAVRQAPLIIPLKATSTPVSIKQYPMSQEARLGIKPHIQRLLDQGILVPCQSPWNTPLLPVKKPGTNDYRPVQDLREVNKRVEDIHPTVPNPYNLLSGLPPSHQWYTVLDLKDAFFCLRLHPTSQPLFAFEWRDPEMGISGQLTWTRLPQGFKNSPTLFNEALHRDLADFRIQHPDLILLQYVDDLLLAATSELDCQQGTRALLQTLGNLGYRASAKKAQICQKQVKYLGYLLKEGQRWLTEARKETVMGQPTPKTPRQLREFLGKAGFCRLFIPGFAEMAAPLYPLTKPGTLFNWGPDQQKAYQEIKQALLTAPALGLPDLTKPFELFVDEKQGYAKGVLTQKLGPWRRPVAYLSKKLDPVAAGWPPCLRMVAAIAVLTKDAGKLTMGQPLVILAPHAVEALVKQPPDRWLSNARMTHYQALLLDTDRVQFGPVVALNPATLLPLPEEGLQHNCLDILAEAHGTRPDLTDQPLPDADHTWYTDGSSLLQEGQRKAGAAVTTETEVIWAKALPAGTSAQRAELIALTQALKMAEGKKLNVYTDSRYAFATAHIHGEIYRRRGWLTSEGKEIKNKDEILALLKALFLPKRLSIIHCPGHQKGHSAEARGNRMADQAARKAAITETPDTSTLLIENSSPSGGSKRTADGSEFEAGKRTADGSEFEKRTADGSEFESPKKKAKVE

SEQ ID NO: 2698 - protein, 2114 aa, synthetic construct
MPAAKRVKLDGGDKKYSIGLDIGTNSVGWAVITDEYKVPSKKFKVLGNTDRHSIKKNLIGALLFDSGETAEATRLKRTARRRYTRRKNRICYLQEIFSNEMAKVDDSFFHRLEESFLVEEDKKHERHPIFGNIVDEVAYHEKYPTIYHLRKKLVDSTDKADLRLIYLALAHMIKFRGHFLIEGDLNPDNSDVDKLFIQLVQTYNQLFEENPINASGVDAKAILSARLSKSRRLENLIAQLPGEKKNGLFGNLIALSLGLTPNFKSNFDLAEDAKLQLSKDTYDDDLDNLLAQIGDQYADLFLAAKNLSDAILLSDILRVNTEITKAPLSASMIKRYDEHHQDLTLLKALVRQQLPEKYKEIFFDQSKNGYAGYIDGGASQEEFYKFIKPILEKMDGTEELLVKLNREDLLRKQRTFDNGSIPHQIHLGELHAILRRQEDFYPFLKDNREKIEKILTFRIPYYVGPLARGNSRFAWMTRKSEETITPWNFEEVVDKGASAQSFIERMTNFDKNLPNEKVLPKHSLLYEYFTVYNELTKVKYVTEGMRKPAFLSGEQKKAIVDLLFKTNRKVTVKQLKEDYFKKIECFDSVEISGVEDRFNASLGTYHDLLKIIKDKDFLDNEENEDILEDIVLTLTLFEDREMIEERLKTYAHLFDDKVMKQLKRRRYTGWGRLSRKLINGIRDKQSGKTILDFLKSDGFANRNFMQLIHDDSLTFKEDIQKAQVSGQGDSLHEHIANLAGSPAIKKGILQTVKVVDELVKVMGRHKPENIVIEMARENQTTQKGQKNSRERMKRIEEGIKELGSQILKEHPVENTQLQNEKLYLYYLQNGRDMYVDQELDINRLSDYDVDHIVPQSFLKDDSIDNKVLTRSDKARGKSDNVPSEEVVKKMKNYWRQLLNAKLITQRKFDNLTKAERGGLSELDKAGFIKRQLVETRQITKHVAQILDSRMNTKYDENDKLIREVKVITLKSKLVSDFRKDFQFYKVREINNYHHAHDAYLNAVVGTALIKKYPKLESEFVYGDYKVYDVRKMIAKSEQEIGKATAKYFFYSNIMNFFKTEITLANGEIRKRPLIETNGETGEIVWDKGRDFATVRKVLSMPQVNIVKKTEVQTGGFSKESILPKRNSDKLIARKKDWDPKKYGGFDSPTVAYSVLVVAKVEKGKSKKLKSVKELLGITIMERSSFEKNPIDFLEAKGYKEVKKDLIIKLPKYSLFELENGRKRMLASAGELQKGNELALPSKYVNFLYLASHYEKLKGSPEDNEQKQLFVEQHKHYLDEIIEQISEFSKRVILADANLDKVLSAYNKHRDKPIREQAENIIHLFTLTNLGAPAAFKYFDTTIDRKRYTSTKEVLDATLIHQSITGLYETRIDLSQLGGDGGGGGPAPGSSGGTLNIEDEYRLHETSKEPDVSLGSTWLSDFPQAWAETGGMGLAVRQAPLIIPLKATSTPVSIKQYPMSQEARLGIKPHIQRLLDQGILVPCQSPWNTPLLPVKKPGTNDYRPVQDLREVNKRVEDIHPTVPNPYNLLSGLPPSHQWYTVLDLKDAFFCLRLHPTSQPLFAFEWRDPEMGISGQLTWTRLPQGFKNSPTLFNEALHRDLADFRIQHPDLILLQYVDDLLLAATSELDCQQGTRALLQTLGNLGYRASAKKAQICQKQVKYLGYLLKEGQRWLTEARKETVMGQPTPKTPRQLREFLGKAGFCRLFIPGFAEMAAPLYPLTKPGTLFNWGPDQQKAYQEIKQALLTAPALGLPDLTKPFELFVDEKQGYAKGVLTQKLGPWRRPVAYLSKKLDPVAAGWPPCLRMVAAIAVLTKDAGKLTMGQPLVILAPHAVEALVKQPPDRWLSNARMTHYQALLLDTDRVQFGPVVALNPATLLPLPEEGLQHNCLDILAEAHGTRPDLTDQPLPDADHTWYTDGSSLLQEGQRKAGAAVTTETEVIWAKALPAGTSAQRAELIALTQALKMAEGKKLNVYTDSRYAFATAHIHGEIYRRRGWLTSEGKEIKNKDEILALLKALFLPKRLSIIHCPGHQKGHSAEARGNRMADQAARKAAITETPDTSTLLIENSSPSGGSKRTADGSEFEAGKRTADGSEFEKRTADGSEFESPKKKAKVE

SEQ ID NO: 2699 - protein, 2114 aa, synthetic construct
MPAAKRVKLDGGDKKYSIGLDIGTNSVGWAVITDEYKVPSKKFKVLGNTDRHSIKKNLIGALLFDSGETAEATRLKRTARRRYTRRKNRICYLQEIFSNEMAKVDDSFFHRLEESFLVEEDKKHERHPIFGNIVDEVAYHEKYPTIYHLRKKLVDSTDKADLRLIYLALAHMIKFRGHFLIEGDLNPDNSDVDKLFIQLVQTYNQLFEENPINASGVDAKAILSARLSKSRRLENLIAQLPGEKKNGLFGNLIALSLGLTPNFKSNFDLAEDAKLQLSKDTYDDDLDNLLAQIGDQYADLFLAAKNLSDAILLSDILRVNTEITKAPLSASMIKRYDEHHQDLTLLKALVRQQLPEKYKEIFFDQSKNGYAGYIDGGASQEEFYKFIKPILEKMDGTEELLVKLNREDLLRKQRTFDNGSIPHQIHLGELHAILRRQEDFYPFLKDNREKIEKILTFRIPYYVGPLARGNSRFAWMTRKSEETITPWNFEEVVDKGASAQSFIERMTNFDKNLPNEKVLPKHSLLYEYFTVYNELTKVKYVTEGMRKPAFLSGEQKKAIVDLLFKTNRKVTVKQLKEDYFKKIECFDSVEISGVEDRFNASLGTYHDLLKIIKDKDFLDNEENEDILEDIVLTLTLFEDREMIEERLKTYAHLFDDKVMKQLKRRRYTGWGRLSRKLINGIRDKQSGKTILDFLKSDGFANRNFMQLIHDDSLTFKEDIQKAQVSGQGDSLHEHIANLAGSPAIKKGILQTVKVVDELVKVMGRHKPENIVIEMARENQTTQKGQKNSRERMKRIEEGIKELGSQILKEHPVENTQLQNEKLYLYYLQNGRDMYVDQELDINRLSDYDVDHIVPQSFLKDDSIDNKVLTRSDKARGKSDNVPSEEVVKKMKNYWRQLLNAKLITQRKFDNLTKAERGGLSELDKAGFIKRQLVETRQITKHVAQILDSRMNTKYDENDKLIREVKVITLKSKLVSDFRKDFQFYKVREINNYHHAHDAYLNAVVGTALIKKYPKLESEFVYGDYKVYDVRKMIAKSEQEIGKATAKYFFYSNIMNFFKTEITLANGEIRKRPLIETNGETGEIVWDKGRDFATVRKVLSMPQVNIVKKTEVQTGGFSKESILPKRNSDKLIARKKDWDPKKYGGFDSPTVAYSVLVVAKVEKGKSKKLKSVKELLGITIMERSSFEKNPIDFLEAKGYKEVKKDLIIKLPKYSLFELENGRKRMLASAGELQKGNELALPSKYVNFLYLASHYEKLKGSPEDNEQKQLFVEQHKHYLDEIIEQISEFSKRVILADANLDKVLSAYNKHRDKPIREQAENIIHLFTLTNLGAPAAFKYFDTTIDRKRYTSTKEVLDATLIHQSITGLYETRIDLSQLGGDGGGSSGGSPAPGGTLNIEDEYRLHETSKEPDVSLGSTWLSDFPQAWAETGGMGLAVRQAPLIIPLKATSTPVSIKQYPMSQEARLGIKPHIQRLLDQGILVPCQSPWNTPLLPVKKPGTNDYRPVQDLREVNKRVEDIHPTVPNPYNLLSGLPPSHQWYTVLDLKDAFFCLRLHPTSQPLFAFEWRDPEMGISGQLTWTRLPQGFKNSPTLFNEALHRDLADFRIQHPDLILLQYVDDLLLAATSELDCQQGTRALLQTLGNLGYRASAKKAQICQKQVKYLGYLLKEGQRWLTEARKETVMGQPTPKTPRQLREFLGKAGFCRLFIPGFAEMAAPLYPLTKPGTLFNWGPDQQKAYQEIKQALLTAPALGLPDLTKPFELFVDEKQGYAKGVLTQKLGPWRRPVAYLSKKLDPVAAGWPPCLRMVAAIAVLTKDAGKLTMGQPLVILAPHAVEALVKQPPDRWLSNARMTHYQALLLDTDRVQFGPVVALNPATLLPLPEEGLQHNCLDILAEAHGTRPDLTDQPLPDADHTWYTDGSSLLQEGQRKAGAAVTTETEVIWAKALPAGTSAQRAELIALTQALKMAEGKKLNVYTDSRYAFATAHIHGEIYRRRGWLTSEGKEIKNKDEILALLKALFLPKRLSIIHCPGHQKGHSAEARGNRMADQAARKAAITETPDTSTLLIENSSPSGGSKRTADGSEFEAGKRTADGSEFEKRTADGSEFESPKKKAKVE

SEQ ID NO: 2700 - protein, 2113 aa, synthetic construct
MPAAKRVKLDGGDKKYSIGLDIGTNSVGWAVITDEYKVPSKKFKVLGNTDRHSIKKNLIGALLFDSGETAEATRLKRTARRRYTRRKNRICYLQEIFSNEMAKVDDSFFHRLEESFLVEEDKKHERHPIFGNIVDEVAYHEKYPTIYHLRKKLVDSTDKADLRLIYLALAHMIKFRGHFLIEGDLNPDNSDVDKLFIQLVQTYNQLFEENPINASGVDAKAILSARLSKSRRLENLIAQLPGEKKNGLFGNLIALSLGLTPNFKSNFDLAEDAKLQLSKDTYDDDLDNLLAQIGDQYADLFLAAKNLSDAILLSDILRVNTEITKAPLSASMIKRYDEHHQDLTLLKALVRQQLPEKYKEIFFDQSKNGYAGYIDGGASQEEFYKFIKPILEKMDGTEELLVKLNREDLLRKQRTFDNGSIPHQIHLGELHAILRRQEDFYPFLKDNREKIEKILTFRIPYYVGPLARGNSRFAWMTRKSEETITPWNFEEVVDKGASAQSFIERMTNFDKNLPNEKVLPKHSLLYEYFTVYNELTKVKYVTEGMRKPAFLSGEQKKAIVDLLFKTNRKVTVKQLKEDYFKKIECFDSVEISGVEDRFNASLGTYHDLLKIIKDKDFLDNEENEDILEDIVLTLTLFEDREMIEERLKTYAHLFDDKVMKQLKRRRYTGWGRLSRKLINGIRDKQSGKTILDFLKSDGFANRNFMQLIHDDSLTFKEDIQKAQVSGQGDSLHEHIANLAGSPAIKKGILQTVKVVDELVKVMGRHKPENIVIEMARENQTTQKGQKNSRERMKRIEEGIKELGSQILKEHPVENTQLQNEKLYLYYLQNGRDMYVDQELDINRLSDYDVDHIVPQSFLKDDSIDNKVLTRSDKARGKSDNVPSEEVVKKMKNYWRQLLNAKLITQRKFDNLTKAERGGLSELDKAGFIKRQLVETRQITKHVAQILDSRMNTKYDENDKLIREVKVITLKSKLVSDFRKDFQFYKVREINNYHHAHDAYLNAVVGTALIKKYPKLESEFVYGDYKVYDVRKMIAKSEQEIGKATAKYFFYSNIMNFFKTEITLANGEIRKRPLIETNGETGEIVWDKGRDFATVRKVLSMPQVNIVKKTEVQTGGFSKESILPKRNSDKLIARKKDWDPKKYGGFDSPTVAYSVLVVAKVEKGKSKKLKSVKELLGITIMERSSFEKNPIDFLEAKGYKEVKKDLIIKLPKYSLFELENGRKRMLASAGELQKGNELALPSKYVNFLYLASHYEKLKGSPEDNEQKQLFVEQHKHYLDEIIEQISEFSKRVILADANLDKVLSAYNKHRDKPIREQAENIIHLFTLTNLGAPAAFKYFDTTIDRKRYTSTKEVLDATLIHQSITGLYETRIDLSQLGGDGGGGSEAAAKGGTLNIEDEYRLHETSKEPDVSLGSTWLSDFPQAWAETGGMGLAVRQAPLIIPLKATSTPVSIKQYPMSQEARLGIKPHIQRLLDQGILVPCQSPWNTPLLPVKKPGTNDYRPVQDLREVNKRVEDIHPTVPNPYNLLSGLPPSHQWYTVLDLKDAFFCLRLHPTSQPLFAFEWRDPEMGISGQLTWTRLPQGFKNSPTLFNEALHRDLADFRIQHPDLILLQYVDDLLLAATSELDCQQGTRALLQTLGNLGYRASAKKAQICQKQVKYLGYLLKEGQRWLTEARKETVMGQPTPKTPRQLREFLGKAGFCRLFIPGFAEMAAPLYPLTKPGTLFNWGPDQQKAYQEIKQALLTAPALGLPDLTKPFELFVDEKQGYAKGVLTQKLGPWRRPVAYLSKKLDPVAAGWPPCLRMVAAIAVLTKDAGKLTMGQPLVILAPHAVEALVKQPPDRWLSNARMTHYQALLLDTDRVQFGPVVALNPATLLPLPEEGLQHNCLDILAEAHGTRPDLTDQPLPDADHTWYTDGSSLLQEGQRKAGAAVTTETEVIWAKALPAGTSAQRAELIALTQALKMAEGKKLNVYTDSRYAFATAHIHGEIYRRRGWLTSEGKEIKNKDEILALLKALFLPKRLSIIHCPGHQKGHSAEARGNRMADQAARKAAITETPDTSTLLIENSSPSGGSKRTADGSEFEAGKRTADGSEFEKRTADGSEFESPKKKAKVE

SEQ ID NO: 2701 - protein, 2116 aa, synthetic construct
MPAAKRVKLDGGDKKYSIGLDIGTNSVGWAVITDEYKVPSKKFKVLGNTDRHSIKKNLIGALLFDSGETAEATRLKRTARRRYTRRKNRICYLQEIFSNEMAKVDDSFFHRLEESFLVEEDKKHERHPIFGNIVDEVAYHEKYPTIYHLRKKLVDSTDKADLRLIYLALAHMIKFRGHFLIEGDLNPDNSDVDKLFIQLVQTYNQLFEENPINASGVDAKAILSARLSKSRRLENLIAQLPGEKKNGLFGNLIALSLGLTPNFKSNFDLAEDAKLQLSKDTYDDDLDNLLAQIGDQYADLFLAAKNLSDAILLSDILRVNTEITKAPLSASMIKRYDEHHQDLTLLKALVRQQLPEKYKEIFFDQSKNGYAGYIDGGASQEEFYKFIKPILEKMDGTEELLVKLNREDLLRKQRTFDNGSIPHQIHLGELHAILRRQEDFYPFLKDNREKIEKILTFRIPYYVGPLARGNSRFAWMTRKSEETITPWNFEEVVDKGASAQSFIERMTNFDKNLPNEKVLPKHSLLYEYFTVYNELTKVKYVTEGMRKPAFLSGEQKKAIVDLLFKTNRKVTVKQLKEDYFKKIECFDSVEISGVEDRFNASLGTYHDLLKIIKDKDFLDNEENEDILEDIVLTLTLFEDREMIEERLKTYAHLFDDKVMKQLKRRRYTGWGRLSRKLINGIRDKQSGKTILDFLKSDGFANRNFMQLIHDDSLTFKEDIQKAQVSGQGDSLHEHIANLAGSPAIKKGILQTVKVVDELVKVMGRHKPENIVIEMARENQTTQKGQKNSRERMKRIEEGIKELGSQILKEHPVENTQLQNEKLYLYYLQNGRDMYVDQELDINRLSDYDVDHIVPQSFLKDDSIDNKVLTRSDKARGKSDNVPSEEVVKKMKNYWRQLLNAKLITQRKFDNLTKAERGGLSELDKAGFIKRQLVETRQITKHVAQILDSRMNTKYDENDKLIREVKVITLKSKLVSDFRKDFQFYKVREINNYHHAHDAYLNAVVGTALIKKYPKLESEFVYGDYKVYDVRKMIAKSEQEIGKATAKYFFYSNIMNFFKTEITLANGEIRKRPLIETNGETGEIVWDKGRDFATVRKVLSMPQVNIVKKTEVQTGGFSKESILPKRNSDKLIARKKDWDPKKYGGFDSPTVAYSVLVVAKVEKGKSKKLKSVKELLGITIMERSSFEKNPIDFLEAKGYKEVKKDLIIKLPKYSLFELENGRKRMLASAGELQKGNELALPSKYVNFLYLASHYEKLKGSPEDNEQKQLFVEQHKHYLDEIIEQISEFSKRVILADANLDKVLSAYNKHRDKPIREQAENIIHLFTLTNLGAPAAFKYFDTTIDRKRYTSTKEVLDATLIHQSITGLYETRIDLSQLGGDGGGGSPAPEAAAKGGTLNIEDEYRLHETSKEPDVSLGSTWLSDFPQAWAETGGMGLAVRQAPLIIPLKATSTPVSIKQYPMSQEARLGIKPHIQRLLDQGILVPCQSPWNTPLLPVKKPGTNDYRPVQDLREVNKRVEDIHPTVPNPYNLLSGLPPSHQWYTVLDLKDAFFCLRLHPTSQPLFAFEWRDPEMGISGQLTWTRLPQGFKNSPTLFNEALHRDLADFRIQHPDLILLQYVDDLLLAATSELDCQQGTRALLQTLGNLGYRASAKKAQICQKQVKYLGYLLKEGQRWLTEARKETVMGQPTPKTPRQLREFLGKAGFCRLFIPGFAEMAAPLYPLTKPGTLFNWGPDQQKAYQEIKQALLTAPALGLPDLTKPFELFVDEKQGYAKGVLTQKLGPWRRPVAYLSKKLDPVAAGWPPCLRMVAAIAVLTKDAGKLTMGQPLVILAPHAVEALVKQPPDRWLSNARMTHYQALLLDTDRVQFGPVVALNPATLLPLPEEGLQHNCLDILAEAHGTRPDLTDQPLPDADHTWYTDGSSLLQEGQRKAGAAVTTETEVIWAKALPAGTSAQRAELIALTQALKMAEGKKLNVYTDSRYAFATAHIHGEIYRRRGWLTSEGKEIKNKDEILALLKALFLPKRLSIIHCPGHQKGHSAEARGNRMADQAARKAAITETPDTSTLLIENSSPSGGSKRTADGSEFEAGKRTADGSEFEKRTADGSEFESPKKKAKVE

SEQ ID NO: 2702 - protein, 2114 aa, synthetic construct
MPAAKRVKLDGGDKKYSIGLDIGTNSVGWAVITDEYKVPSKKFKVLGNTDRHSIKKNLIGALLFDSGETAEATRLKRTARRRYTRRKNRICYLQEIFSNEMAKVDDSFFHRLEESFLVEEDKKHERHPIFGNIVDEVAYHEKYPTIYHLRKKLVDSTDKADLRLIYLALAHMIKFRGHFLIEGDLNPDNSDVDKLFIQLVQTYNQLFEENPINASGVDAKAILSARLSKSRRLENLIAQLPGEKKNGLFGNLIALSLGLTPNFKSNFDLAEDAKLQLSKDTYDDDLDNLLAQIGDQYADLFLAAKNLSDAILLSDILRVNTEITKAPLSASMIKRYDEHHQDLTLLKALVRQQLPEKYKEIFFDQSKNGYAGYIDGGASQEEFYKFIKPILEKMDGTEELLVKLNREDLLRKQRTFDNGSIPHQIHLGELHAILRRQEDFYPFLKDNREKIEKILTFRIPYYVGPLARGNSRFAWMTRKSEETITPWNFEEVVDKGASAQSFIERMTNFDKNLPNEKVLPKHSLLYEYFTVYNELTKVKYVTEGMRKPAFLSGEQKKAIVDLLFKTNRKVTVKQLKEDYFKKIECFDSVEISGVEDRFNASLGTYHDLLKIIKDKDFLDNEENEDILEDIVLTLTLFEDREMIEERLKTYAHLFDDKVMKQLKRRRYTGWGRLSRKLINGIRDKQSGKTILDFLKSDGFANRNFMQLIHDDSLTFKEDIQKAQVSGQGDSLHEHIANLAGSPAIKKGILQTVKVVDELVKVMGRHKPENIVIEMARENQTTQKGQKNSRERMKRIEEGIKELGSQILKEHPVENTQLQNEKLYLYYLQNGRDMYVDQELDINRLSDYDVDHIVPQSFLKDDSIDNKVLTRSDKARGKSDNVPSEEVVKKMKNYWRQLLNAKLITQRKFDNLTKAERGGLSELDKAGFIKRQLVETRQITKHVAQILDSRMNTKYDENDKLIREVKVITLKSKLVSDFRKDFQFYKVREINNYHHAHDAYLNAVVGTALIKKYPKLESEFVYGDYKVYDVRKMIAKSEQEIGKATAKYFFYSNIMNFFKTEITLANGEIRKRPLIETNGETGEIVWDKGRDFATVRKVLSMPQVNIVKKTEVQTGGFSKESILPKRNSDKLIARKKDWDPKKYGGFDSPTVAYSVLVVAKVEKGKSKKLKSVKELLGITIMERSSFEKNPIDFLEAKGYKEVKKDLIIKLPKYSLFELENGRKRMLASAGELQKGNELALPSKYVNFLYLASHYEKLKGSPEDNEQKQLFVEQHKHYLDEIIEQISEFSKRVILADANLDKVLSAYNKHRDKPIREQAENIIHLFTLTNLGAPAAFKYFDTTIDRKRYTSTKEVLDATLIHQSITGLYETRIDLSQLGGDGGGGSGGGGSSGGTLNIEDEYRLHETSKEPDVSLGSTWLSDFPQAWAETGGMGLAVRQAPLIIPLKATSTPVSIKQYPMSQEARLGIKPHIQRLLDQGILVPCQSPWNTPLLPVKKPGTNDYRPVQDLREVNKRVEDIHPTVPNPYNLLSGLPPSHQWYTVLDLKDAFFCLRLHPTSQPLFAFEWRDPEMGISGQLTWTRLPQGFKNSPTLFNEALHRDLADFRIQHPDLILLQYVDDLLLAATSELDCQQGTRALLQTLGNLGYRASAKKAQICQKQVKYLGYLLKEGQRWLTEARKETVMGQPTPKTPRQLREFLGKAGFCRLFIPGFAEMAAPLYPLTKPGTLFNWGPDQQKAYQEIKQALLTAPALGLPDLTKPFELFVDEKQGYAKGVLTQKLGPWRRPVAYLSKKLDPVAAGWPPCLRMVAAIAVLTKDAGKLTMGQPLVILAPHAVEALVKQPPDRWLSNARMTHYQALLLDTDRVQFGPVVALNPATLLPLPEEGLQHNCLDILAEAHGTRPDLTDQPLPDADHTWYTDGSSLLQEGQRKAGAAVTTETEVIWAKALPAGTSAQRAELIALTQALKMAEGKKLNVYTDSRYAFATAHIHGEIYRRRGWLTSEGKEIKNKDEILALLKALFLPKRLSIIHCPGHQKGHSAEARGNRMADQAARKAAITETPDTSTLLIENSSPSGGSKRTADGSEFEAGKRTADGSEFEKRTADGSEFESPKKKAKVE

SEQ ID NO: 2703 - protein, 2116 aa, synthetic construct
MPAAKRVKLDGGDKKYSIGLDIGTNSVGWAVITDEYKVPSKKFKVLGNTDRHSIKKNLIGALLFDSGETAEATRLKRTARRRYTRRKNRICYLQEIFSNEMAKVDDSFFHRLEESFLVEEDKKHERHPIFGNIVDEVAYHEKYPTIYHLRKKLVDSTDKADLRLIYLALAHMIKFRGHFLIEGDLNPDNSDVDKLFIQLVQTYNQLFEENPINASGVDAKAILSARLSKSRRLENLIAQLPGEKKNGLFGNLIALSLGLTPNFKSNFDLAEDAKLQLSKDTYDDDLDNLLAQIGDQYADLFLAAKNLSDAILLSDILRVNTEITKAPLSASMIKRYDEHHQDLTLLKALVRQQLPEKYKEIFFDQSKNGYAGYIDGGASQEEFYKFIKPILEKMDGTEELLVKLNREDLLRKQRTFDNGSIPHQIHLGELHAILRRQEDFYPFLKDNREKIEKILTFRIPYYVGPLARGNSRFAWMTRKSEETITPWNFEEVVDKGASAQSFIERMTNFDKNLPNEKVLPKHSLLYEYFTVYNELTKVKYVTEGMRKPAFLSGEQKKAIVDLLFKTNRKVTVKQLKEDYFKKIECFDSVEISGVEDRFNASLGTYHDLLKIIKDKDFLDNEENEDILEDIVLTLTLFEDREMIEERLKTYAHLFDDKVMKQLKRRRYTGWGRLSRKLINGIRDKQSGKTILDFLKSDGFANRNFMQLIHDDSLTFKEDIQKAQVSGQGDSLHEHIANLAGSPAIKKGILQTVKVVDELVKVMGRHKPENIVIEMARENQTTQKGQKNSRERMKRIEEGIKELGSQILKEHPVENTQLQNEKLYLYYLQNGRDMYVDQELDINRLSDYDVDHIVPQSFLKDDSIDNKVLTRSDKARGKSDNVPSEEVVKKMKNYWRQLLNAKLITQRKFDNLTKAERGGLSELDKAGFIKRQLVETRQITKHVAQILDSRMNTKYDENDKLIREVKVITLKSKLVSDFRKDFQFYKVREINNYHHAHDAYLNAVVGTALIKKYPKLESEFVYGDYKVYDVRKMIAKSEQEIGKATAKYFFYSNIMNFFKTEITLANGEIRKRPLIETNGETGEIVWDKGRDFATVRKVLSMPQVNIVKKTEVQTGGFSKESILPKRNSDKLIARKKDWDPKKYGGFDSPTVAYSVLVVAKVEKGKSKKLKSVKELLGITIMERSSFEKNPIDFLEAKGYKEVKKDLIIKLPKYSLFELENGRKRMLASAGELQKGNELALPSKYVNFLYLASHYEKLKGSPEDNEQKQLFVEQHKHYLDEIIEQISEFSKRVILADANLDKVLSAYNKHRDKPIREQAENIIHLFTLTNLGAPAAFKYFDTTIDRKRYTSTKEVLDATLIHQSITGLYETRIDLSQLGGDGGGSSEAAAKGGSGGTLNIEDEYRLHETSKEPDVSLGSTWLSDFPQAWAETGGMGLAVRQAPLIIPLKATSTPVSIKQYPMSQEARLGIKPHIQRLLDQGILVPCQSPWNTPLLPVKKPGTNDYRPVQDLREVNKRVEDIHPTVPNPYNLLSGLPPSHQWYTVLDLKDAFFCLRLHPTSQPLFAFEWRDPEMGISGQLTWTRLPQGFKNSPTLFNEALHRDLADFRIQHPDLILLQYVDDLLLAATSELDCQQGTRALLQTLGNLGYRASAKKAQICQKQVKYLGYLLKEGQRWLTEARKETVMGQPTPKTPRQLREFLGKAGFCRLFIPGFAEMAAPLYPLTKPGTLFNWGPDQQKAYQEIKQALLTAPALGLPDLTKPFELFVDEKQGYAKGVLTQKLGPWRRPVAYLSKKLDPVAAGWPPCLRMVAAIAVLTKDAGKLTMGQPLVILAPHAVEALVKQPPDRWLSNARMTHYQALLLDTDRVQFGPVVALNPATLLPLPEEGLQHNCLDILAEAHGTRPDLTDQPLPDADHTWYTDGSSLLQEGQRKAGAAVTTETEVIWAKALPAGTSAQRAELIALTQALKMAEGKKLNVYTDSRYAFATAHIHGEIYRRRGWLTSEGKEIKNKDEILALLKALFLPKRLSIIHCPGHQKGHSAEARGNRMADQAARKAAITETPDTSTLLIENSSPSGGSKRTADGSEFEAGKRTADGSEFEKRTADGSEFESPKKKAKVE

SEQ ID NO: 2704 - protein, 2094 aa, synthetic construct
MPAAKRVKLDGGDKKYSIGLDIGTNSVGWAVITDEYKVPSKKFKVLGNTDRHSIKKNLIGALLFDSGETAEATRLKRTARRRYTRRKNRICYLQEIFSNEMAKVDDSFFHRLEESFLVEEDKKHERHPIFGNIVDEVAYHEKYPTIYHLRKKLVDSTDKADLRLIYLALAHMIKFRGHFLIEGDLNPDNSDVDKLFIQLVQTYNQLFEENPINASGVDAKAILSARLSKSRRLENLIAQLPGEKKNGLFGNLIALSLGLTPNFKSNFDLAEDAKLQLSKDTYDDDLDNLLAQIGDQYADLFLAAKNLSDAILLSDILRVNTEITKAPLSASMIKRYDEHHQDLTLLKALVRQQLPEKYKEIFFDQSKNGYAGYIDGGASQEEFYKFIKPILEKMDGTEELLVKLNREDLLRKQRTFDNGSIPHQIHLGELHAILRRQEDFYPFLKDNREKIEKILTFRIPYYVGPLARGNSRFAWMTRKSEETITPWNFEEVVDKGASAQSFIERMTNFDKNLPNEKVLPKHSLLYEYFTVYNELTKVKYVTEGMRKPAFLSGEQKKAIVDLLFKTNRKVTVKQLKEDYFKKIECFDSVEISGVEDRFNASLGTYHDLLKIIKDKDFLDNEENEDILEDIVLTLTLFEDREMIEERLKTYAHLFDDKVMKQLKRRRYTGWGRLSRKLINGIRDKQSGKTILDFLKSDGFANRNFMQLIHDDSLTFKEDIQKAQVSGQGDSLHEHIANLAGSPAIKKGILQTVKVVDELVKVMGRHKPENIVIEMARENQTTQKGQKNSRERMKRIEEGIKELGSQILKEHPVENTQLQNEKLYLYYLQNGRDMYVDQELDINRLSDYDVDHIVPQSFLKDDSIDNKVLTRSDKARGKSDNVPSEEVVKKMKNYWRQLLNAKLITQRKFDNLTKAERGGLSELDKAGFIKRQLVETRQITKHVAQILDSRMNTKYDENDKLIREVKVITLKSKLVSDFRKDFQFYKVREINNYHHAHDAYLNAVVGTALIKKYPKLESEFVYGDYKVYDVRKMIAKSEQEIGKATAKYFFYSNIMNFFKTEITLANGEIRKRPLIETNGETGEIVWDKGRDFATVRKVLSMPQVNIVKKTEVQTGGFSKESILPKRNSDKLIARKKDWDPKKYGGFDSPTVAYSVLVVAKVEKGKSKKLKSVKELLGITIMERSSFEKNPIDFLEAKGYKEVKKDLIIKLPKYSLFELENGRKRMLASAGELQKGNELALPSKYVNFLYLASHYEKLKGSPEDNEQKQLFVEQHKHYLDEIIEQISEFSKRVILADANLDKVLSAYNKHRDKPIREQAENIIHLFTLTNLGAPAAFKYFDTTIDRKRYTSTKEVLDATLIHQSITGLYETRIDLSQLGGDGGGGSPAPGSSGGTLNIEDEHRLHETSKEPDVSLGSTWLSDFPQAWAETGGMGLAVRQAPLIIPLKATSTPVSIKQYPMSQEARLGIKPHIQRLLDQGILVPCQSPWNTPLLPVKKPGTNDYRPVQDLREVNKRVEDIHPTVPNPYNLLSGLPPSHQWYTVLDLKDAFFCLRLHPTSQPLFAFEWRDPEMGISGQLTWTRLPQGFKNSPTLFDEALHRDLADFRIQHPDLILLQYVDDLLLAATSELDCQQGTRALLQTLGNLGYRASAKKAQICQKQVKYLGYLLKEGQRWLTEARKETVMGQPTPKTPRQLREFLGTAGFCRLWIPGFAEMAAPLYPLTKTGTLFNWGPDQQKAYQEIKQALLTAPALGLPDLTKPFELFVDEKQGYAKGVLTQKLGPWRRPVAYLSKKLDPVAAGWPPCLRMVAAIAVLTKDAGKLTMGQPLVILAPHAVEALVKQPPDRWLSNARMTHYQALLLDTDRVQFGPVVALNPATLLPLPEEGLQHNCLDILAEAHGTRPDLTDQPLPDADHTWYTDGSSLLQEGQRKAGAAVTTETEVIWAKALPAGTSAQRAELIALTQALKMAEGKKLNVYTDSRYAFATAHIHGEIYRRRGLLTSEGKEIKNKDEILALLKALFLPKRLSIIHCPGHQKGHSAEARGNRMADQAARKAAITETPDTSTLLAGKRTADGSEFEKRTADGSEFESPKKKAKVE

SEQ ID NO: 2705 - protein, 2096 aa, synthetic construct
MPAAKRVKLDGGDKKYSIGLDIGTNSVGWAVITDEYKVPSKKFKVLGNTDRHSIKKNLIGALLFDSGETAEATRLKRTARRRYTRRKNRICYLQEIFSNEMAKVDDSFFHRLEESFLVEEDKKHERHPIFGNIVDEVAYHEKYPTIYHLRKKLVDSTDKADLRLIYLALAHMIKFRGHFLIEGDLNPDNSDVDKLFIQLVQTYNQLFEENPINASGVDAKAILSARLSKSRRLENLIAQLPGEKKNGLFGNLIALSLGLTPNFKSNFDLAEDAKLQLSKDTYDDDLDNLLAQIGDQYADLFLAAKNLSDAILLSDILRVNTEITKAPLSASMIKRYDEHHQDLTLLKALVRQQLPEKYKEIFFDQSKNGYAGYIDGGASQEEFYKFIKPILEKMDGTEELLVKLNREDLLRKQRTFDNGSIPHQIHLGELHAILRRQEDFYPFLKDNREKIEKILTFRIPYYVGPLARGNSRFAWMTRKSEETITPWNFEEVVDKGASAQSFIERMTNFDKNLPNEKVLPKHSLLYEYFTVYNELTKVKYVTEGMRKPAFLSGEQKKAIVDLLFKTNRKVTVKQLKEDYFKKIECFDSVEISGVEDRFNASLGTYHDLLKIIKDKDFLDNEENEDILEDIVLTLTLFEDREMIEERLKTYAHLFDDKVMKQLKRRRYTGWGRLSRKLINGIRDKQSGKTILDFLKSDGFANRNFMQLIHDDSLTFKEDIQKAQVSGQGDSLHEHIANLAGSPAIKKGILQTVKVVDELVKVMGRHKPENIVIEMARENQTTQKGQKNSRERMKRIEEGIKELGSQILKEHPVENTQLQNEKLYLYYLQNGRDMYVDQELDINRLSDYDVDHIVPQSFLKDDSIDNKVLTRSDKARGKSDNVPSEEVVKKMKNYWRQLLNAKLITQRKFDNLTKAERGGLSELDKAGFIKRQLVETRQITKHVAQILDSRMNTKYDENDKLIREVKVITLKSKLVSDFRKDFQFYKVREINNYHHAHDAYLNAVVGTALIKKYPKLESEFVYGDYKVYDVRKMIAKSEQEIGKATAKYFFYSNIMNFFKTEITLANGEIRKRPLIETNGETGEIVWDKGRDFATVRKVLSMPQVNIVKKTEVQTGGFSKESILPKRNSDKLIARKKDWDPKKYGGFDSPTVAYSVLVVAKVEKGKSKKLKSVKELLGITIMERSSFEKNPIDFLEAKGYKEVKKDLIIKLPKYSLFELENGRKRMLASAGELQKGNELALPSKYVNFLYLASHYEKLKGSPEDNEQKQLFVEQHKHYLDEIIEQISEFSKRVILADANLDKVLSAYNKHRDKPIREQAENIIHLFTLTNLGAPAAFKYFDTTIDRKRYTSTKEVLDATLIHQSITGLYETRIDLSQLGGDGGEAAAKGSSGGGGGTLNIEDEHRLHETSKEPDVSLGSTWLSDFPQAWAETGGMGLAVRQAPLIIPLKATSTPVSIKQYPMSQEARLGIKPHIQRLLDQGILVPCQSPWNTPLLPVKKPGTNDYRPVQDLREVNKRVEDIHPTVPNPYNLLSGLPPSHQWYTVLDLKDAFFCLRLHPTSQPLFAFEWRDPEMGISGQLTWTRLPQGFKNSPTLFDEALHRDLADFRIQHPDLILLQYVDDLLLAATSELDCQQGTRALLQTLGNLGYRASAKKAQICQKQVKYLGYLLKEGQRWLTEARKETVMGQPTPKTPRQLREFLGTAGFCRLWIPGFAEMAAPLYPLTKTGTLFNWGPDQQKAYQEIKQALLTAPALGLPDLTKPFELFVDEKQGYAKGVLTQKLGPWRRPVAYLSKKLDPVAAGWPPCLRMVAAIAVLTKDAGKLTMGQPLVILAPHAVEALVKQPPDRWLSNARMTHYQALLLDTDRVQFGPVVALNPATLLPLPEEGLQHNCLDILAEAHGTRPDLTDQPLPDADHTWYTDGSSLLQEGQRKAGAAVTTETEVIWAKALPAGTSAQRAELIALTQALKMAEGKKLNVYTDSRYAFATAHIHGEIYRRRGLLTSEGKEIKNKDEILALLKALFLPKRLSIIHCPGHQKGHSAEARGNRMADQAARKAAITETPDTSTLLAGKRTADGSEFEKRTADGSEFESPKKKAKVE

SEQ ID NO: 2706 - protein, 2096 aa, synthetic construct
MPAAKRVKLDGGDKKYSIGLDIGTNSVGWAVITDEYKVPSKKFKVLGNTDRHSIKKNLIGALLFDSGETAEATRLKRTARRRYTRRKNRICYLQEIFSNEMAKVDDSFFHRLEESFLVEEDKKHERHPIFGNIVDEVAYHEKYPTIYHLRKKLVDSTDKADLRLIYLALAHMIKFRGHFLIEGDLNPDNSDVDKLFIQLVQTYNQLFEENPINASGVDAKAILSARLSKSRRLENLIAQLPGEKKNGLFGNLIALSLGLTPNFKSNFDLAEDAKLQLSKDTYDDDLDNLLAQIGDQYADLFLAAKNLSDAILLSDILRVNTEITKAPLSASMIKRYDEHHQDLTLLKALVRQQLPEKYKEIFFDQSKNGYAGYIDGGASQEEFYKFIKPILEKMDGTEELLVKLNREDLLRKQRTFDNGSIPHQIHLGELHAILRRQEDFYPFLKDNREKIEKILTFRIPYYVGPLARGNSRFAWMTRKSEETITPWNFEEVVDKGASAQSFIERMTNFDKNLPNEKVLPKHSLLYEYFTVYNELTKVKYVTEGMRKPAFLSGEQKKAIVDLLFKTNRKVTVKQLKEDYFKKIECFDSVEISGVEDRFNASLGTYHDLLKIIKDKDFLDNEENEDILEDIVLTLTLFEDREMIEERLKTYAHLFDDKVMKQLKRRRYTGWGRLSRKLINGIRDKQSGKTILDFLKSDGFANRNFMQLIHDDSLTFKEDIQKAQVSGQGDSLHEHIANLAGSPAIKKGILQTVKVVDELVKVMGRHKPENIVIEMARENQTTQKGQKNSRERMKRIEEGIKELGSQILKEHPVENTQLQNEKLYLYYLQNGRDMYVDQELDINRLSDYDVDHIVPQSFLKDDSIDNKVLTRSDKARGKSDNVPSEEVVKKMKNYWRQLLNAKLITQRKFDNLTKAERGGLSELDKAGFIKRQLVETRQITKHVAQILDSRMNTKYDENDKLIREVKVITLKSKLVSDFRKDFQFYKVREINNYHHAHDAYLNAVVGTALIKKYPKLESEFVYGDYKVYDVRKMIAKSEQEIGKATAKYFFYSNIMNFFKTEITLANGEIRKRPLIETNGETGEIVWDKGRDFATVRKVLSMPQVNIVKKTEVQTGGFSKESILPKRNSDKLIARKKDWDPKKYGGFDSPTVAYSVLVVAKVEKGKSKKLKSVKELLGITIMERSSFEKNPIDFLEAKGYKEVKKDLIIKLPKYSLFELENGRKRMLASAGELQKGNELALPSKYVNFLYLASHYEKLKGSPEDNEQKQLFVEQHKHYLDEIIEQISEFSKRVILADANLDKVLSAYNKHRDKPIREQAENIIHLFTLTNLGAPAAFKYFDTTIDRKRYTSTKEVLDATLIHQSITGLYETRIDLSQLGGDGGGSSGGGEAAAKGGTLNIEDEHRLHETSKEPDVSLGSTWLSDFPQAWAETGGMGLAVRQAPLIIPLKATSTPVSIKQYPMSQEARLGIKPHIQRLLDQGILVPCQSPWNTPLLPVKKPGTNDYRPVQDLREVNKRVEDIHPTVPNPYNLLSGLPPSHQWYTVLDLKDAFFCLRLHPTSQPLFAFEWRDPEMGISGQLTWTRLPQGFKNSPTLFDEALHRDLADFRIQHPDLILLQYVDDLLLAATSELDCQQGTRALLQTLGNLGYRASAKKAQICQKQVKYLGYLLKEGQRWLTEARKETVMGQPTPKTPRQLREFLGTAGFCRLWIPGFAEMAAPLYPLTKTGTLFNWGPDQQKAYQEIKQALLTAPALGLPDLTKPFELFVDEKQGYAKGVLTQKLGPWRRPVAYLSKKLDPVAAGWPPCLRMVAAIAVLTKDAGKLTMGQPLVILAPHAVEALVKQPPDRWLSNARMTHYQALLLDTDRVQFGPVVALNPATLLPLPEEGLQHNCLDILAEAHGTRPDLTDQPLPDADHTWYTDGSSLLQEGQRKAGAAVTTETEVIWAKALPAGTSAQRAELIALTQALKMAEGKKLNVYTDSRYAFATAHIHGEIYRRRGLLTSEGKEIKNKDEILALLKALFLPKRLSIIHCPGHQKGHSAEARGNRMADQAARKAAITETPDTSTLLAGKRTADGSEFEKRTADGSEFESPKKKAKVE

SEQ ID NO: 2707 - protein, 2093 aa, synthetic construct
MPAAKRVKLDGGDKKYSIGLDIGTNSVGWAVITDEYKVPSKKFKVLGNTDRHSIKKNLIGALLFDSGETAEATRLKRTARRRYTRRKNRICYLQEIFSNEMAKVDDSFFHRLEESFLVEEDKKHERHPIFGNIVDEVAYHEKYPTIYHLRKKLVDSTDKADLRLIYLALAHMIKFRGHFLIEGDLNPDNSDVDKLFIQLVQTYNQLFEENPINASGVDAKAILSARLSKSRRLENLIAQLPGEKKNGLFGNLIALSLGLTPNFKSNFDLAEDAKLQLSKDTYDDDLDNLLAQIGDQYADLFLAAKNLSDAILLSDILRVNTEITKAPLSASMIKRYDEHHQDLTLLKALVRQQLPEKYKEIFFDQSKNGYAGYIDGGASQEEFYKFIKPILEKMDGTEELLVKLNREDLLRKQRTFDNGSIPHQIHLGELHAILRRQEDFYPFLKDNREKIEKILTFRIPYYVGPLARGNSRFAWMTRKSEETITPWNFEEVVDKGASAQSFIERMTNFDKNLPNEKVLPKHSLLYEYFTVYNELTKVKYVTEGMRKPAFLSGEQKKAIVDLLFKTNRKVTVKQLKEDYFKKIECFDSVEISGVEDRFNASLGTYHDLLKIIKDKDFLDNEENEDILEDIVLTLTLFEDREMIEERLKTYAHLFDDKVMKQLKRRRYTGWGRLSRKLINGIRDKQSGKTILDFLKSDGFANRNFMQLIHDDSLTFKEDIQKAQVSGQGDSLHEHIANLAGSPAIKKGILQTVKVVDELVKVMGRHKPENIVIEMARENQTTQKGQKNSRERMKRIEEGIKELGSQILKEHPVENTQLQNEKLYLYYLQNGRDMYVDQELDINRLSDYDVDHIVPQSFLKDDSIDNKVLTRSDKARGKSDNVPSEEVVKKMKNYWRQLLNAKLITQRKFDNLTKAERGGLSELDKAGFIKRQLVETRQITKHVAQILDSRMNTKYDENDKLIREVKVITLKSKLVSDFRKDFQFYKVREINNYHHAHDAYLNAVVGTALIKKYPKLESEFVYGDYKVYDVRKMIAKSEQEIGKATAKYFFYSNIMNFFKTEITLANGEIRKRPLIETNGETGEIVWDKGRDFATVRKVLSMPQVNIVKKTEVQTGGFSKESILPKRNSDKLIARKKDWDPKKYGGFDSPTVAYSVLVVAKVEKGKSKKLKSVKELLGITIMERSSFEKNPIDFLEAKGYKEVKKDLIIKLPKYSLFELENGRKRMLASAGELQKGNELALPSKYVNFLYLASHYEKLKGSPEDNEQKQLFVEQHKHYLDEIIEQISEFSKRVILADANLDKVLSAYNKHRDKPIREQAENIIHLFTLTNLGAPAAFKYFDTTIDRKRYTSTKEVLDATLIHQSITGLYETRIDLSQLGGDGGEAAAKGSSGGTLNIEDEHRLHETSKEPDVSLGSTWLSDFPQAWAETGGMGLAVRQAPLIIPLKATSTPVSIKQYPMSQEARLGIKPHIQRLLDQGILVPCQSPWNTPLLPVKKPGTNDYRPVQDLREVNKRVEDIHPTVPNPYNLLSGLPPSHQWYTVLDLKDAFFCLRLHPTSQPLFAFEWRDPEMGISGQLTWTRLPQGFKNSPTLFDEALHRDLADFRIQHPDLILLQYVDDLLLAATSELDCQQGTRALLQTLGNLGYRASAKKAQICQKQVKYLGYLLKEGQRWLTEARKETVMGQPTPKTPRQLREFLGTAGFCRLWIPGFAEMAAPLYPLTKTGTLFNWGPDQQKAYQEIKQALLTAPALGLPDLTKPFELFVDEKQGYAKGVLTQKLGPWRRPVAYLSKKLDPVAAGWPPCLRMVAAIAVLTKDAGKLTMGQPLVILAPHAVEALVKQPPDRWLSNARMTHYQALLLDTDRVQFGPVVALNPATLLPLPEEGLQHNCLDILAEAHGTRPDLTDQPLPDADHTWYTDGSSLLQEGQRKAGAAVTTETEVIWAKALPAGTSAQRAELIALTQALKMAEGKKLNVYTDSRYAFATAHIHGEIYRRRGLLTSEGKEIKNKDEILALLKALFLPKRLSIIHCPGHQKGHSAEARGNRMADQAARKAAITETPDTSTLLAGKRTADGSEFEKRTADGSEFESPKKKAKVE

SEQ ID NO: 2708 - protein, 2096 aa, synthetic construct
MPAAKRVKLDGGDKKYSIGLDIGTNSVGWAVITDEYKVPSKKFKVLGNTDRHSIKKNLIGALLFDSGETAEATRLKRTARRRYTRRKNRICYLQEIFSNEMAKVDDSFFHRLEESFLVEEDKKHERHPIFGNIVDEVAYHEKYPTIYHLRKKLVDSTDKADLRLIYLALAHMIKFRGHFLIEGDLNPDNSDVDKLFIQLVQTYNQLFEENPINASGVDAKAILSARLSKSRRLENLIAQLPGEKKNGLFGNLIALSLGLTPNFKSNFDLAEDAKLQLSKDTYDDDLDNLLAQIGDQYADLFLAAKNLSDAILLSDILRVNTEITKAPLSASMIKRYDEHHQDLTLLKALVRQQLPEKYKEIFFDQSKNGYAGYIDGGASQEEFYKFIKPILEKMDGTEELLVKLNREDLLRKQRTFDNGSIPHQIHLGELHAILRRQEDFYPFLKDNREKIEKILTFRIPYYVGPLARGNSRFAWMTRKSEETITPWNFEEVVDKGASAQSFIERMTNFDKNLPNEKVLPKHSLLYEYFTVYNELTKVKYVTEGMRKPAFLSGEQKKAIVDLLFKTNRKVTVKQLKEDYFKKIECFDSVEISGVEDRFNASLGTYHDLLKIIKDKDFLDNEENEDILEDIVLTLTLFEDREMIEERLKTYAHLFDDKVMKQLKRRRYTGWGRLSRKLINGIRDKQSGKTILDFLKSDGFANRNFMQLIHDDSLTFKEDIQKAQVSGQGDSLHEHIANLAGSPAIKKGILQTVKVVDELVKVMGRHKPENIVIEMARENQTTQKGQKNSRERMKRIEEGIKELGSQILKEHPVENTQLQNEKLYLYYLQNGRDMYVDQELDINRLSDYDVDHIVPQSFLKDDSIDNKVLTRSDKARGKSDNVPSEEVVKKMKNYWRQLLNAKLITQRKFDNLTKAERGGLSELDKAGFIKRQLVETRQITKHVAQILDSRMNTKYDENDKLIREVKVITLKSKLVSDFRKDFQFYKVREINNYHHAHDAYLNAVVGTALIKKYPKLESEFVYGDYKVYDVRKMIAKSEQEIGKATAKYFFYSNIMNFFKTEITLANGEIRKRPLIETNGETGEIVWDKGRDFATVRKVLSMPQVNIVKKTEVQTGGFSKESILPKRNSDKLIARKKDWDPKKYGGFDSPTVAYSVLVVAKVEKGKSKKLKSVKELLGITIMERSSFEKNPIDFLEAKGYKEVKKDLIIKLPKYSLFELENGRKRMLASAGELQKGNELALPSKYVNFLYLASHYEKLKGSPEDNEQKQLFVEQHKHYLDEIIEQISEFSKRVILADANLDKVLSAYNKHRDKPIREQAENIIHLFTLTNLGAPAAFKYFDTTIDRKRYTSTKEVLDATLIHQSITGLYETRIDLSQLGGDGGGGGGGSEAAAKGGTLNIEDEHRLHETSKEPDVSLGSTWLSDFPQAWAETGGMGLAVRQAPLIIPLKATSTPVSIKQYPMSQEARLGIKPHIQRLLDQGILVPCQSPWNTPLLPVKKPGTNDYRPVQDLREVNKRVEDIHPTVPNPYNLLSGLPPSHQWYTVLDLKDAFFCLRLHPTSQPLFAFEWRDPEMGISGQLTWTRLPQGFKNSPTLFDEALHRDLADFRIQHPDLILLQYVDDLLLAATSELDCQQGTRALLQTLGNLGYRASAKKAQICQKQVKYLGYLLKEGQRWLTEARKETVMGQPTPKTPRQLREFLGTAGFCRLWIPGFAEMAAPLYPLTKTGTLFNWGPDQQKAYQEIKQALLTAPALGLPDLTKPFELFVDEKQGYAKGVLTQKLGPWRRPVAYLSKKLDPVAAGWPPCLRMVAAIAVLTKDAGKLTMGQPLVILAPHAVEALVKQPPDRWLSNARMTHYQALLLDTDRVQFGPVVALNPATLLPLPEEGLQHNCLDILAEAHGTRPDLTDQPLPDADHTWYTDGSSLLQEGQRKAGAAVTTETEVIWAKALPAGTSAQRAELIALTQALKMAEGKKLNVYTDSRYAFATAHIHGEIYRRRGLLTSEGKEIKNKDEILALLKALFLPKRLSIIHCPGHQKGHSAEARGNRMADQAARKAAITETPDTSTLLAGKRTADGSEFEKRTADGSEFESPKKKAKVE

SEQ ID NO: 2709 - protein, 2096 aa, synthetic construct
MPAAKRVKLDGGDKKYSIGLDIGTNSVGWAVITDEYKVPSKKFKVLGNTDRHSIKKNLIGALLFDSGETAEATRLKRTARRRYTRRKNRICYLQEIFSNEMAKVDDSFFHRLEESFLVEEDKKHERHPIFGNIVDEVAYHEKYPTIYHLRKKLVDSTDKADLRLIYLALAHMIKFRGHFLIEGDLNPDNSDVDKLFIQLVQTYNQLFEENPINASGVDAKAILSARLSKSRRLENLIAQLPGEKKNGLFGNLIALSLGLTPNFKSNFDLAEDAKLQLSKDTYDDDLDNLLAQIGDQYADLFLAAKNLSDAILLSDILRVNTEITKAPLSASMIKRYDEHHQDLTLLKALVRQQLPEKYKEIFFDQSKNGYAGYIDGGASQEEFYKFIKPILEKMDGTEELLVKLNREDLLRKQRTFDNGSIPHQIHLGELHAILRRQEDFYPFLKDNREKIEKILTFRIPYYVGPLARGNSRFAWMTRKSEETITPWNFEEVVDKGASAQSFIERMTNFDKNLPNEKVLPKHSLLYEYFTVYNELTKVKYVTEGMRKPAFLSGEQKKAIVDLLFKTNRKVTVKQLKEDYFKKIECFDSVEISGVEDRFNASLGTYHDLLKIIKDKDFLDNEENEDILEDIVLTLTLFEDREMIEERLKTYAHLFDDKVMKQLKRRRYTGWGRLSRKLINGIRDKQSGKTILDFLKSDGFANRNFMQLIHDDSLTFKEDIQKAQVSGQGDSLHEHIANLAGSPAIKKGILQTVKVVDELVKVMGRHKPENIVIEMARENQTTQKGQKNSRERMKRIEEGIKELGSQILKEHPVENTQLQNEKLYLYYLQNGRDMYVDQELDINRLSDYDVDHIVPQSFLKDDSIDNKVLTRSDKARGKSDNVPSEEVVKKMKNYWRQLLNAKLITQRKFDNLTKAERGGLSELDKAGFIKRQLVETRQITKHVAQILDSRMNTKYDENDKLIREVKVITLKSKLVSDFRKDFQFYKVREINNYHHAHDAYLNAVVGTALIKKYPKLESEFVYGDYKVYDVRKMIAKSEQEIGKATAKYFFYSNIMNFFKTEITLANGEIRKRPLIETNGETGEIVWDKGRDFATVRKVLSMPQVNIVKKTEVQTGGFSKESILPKRNSDKLIARKKDWDPKKYGGFDSPTVAYSVLVVAKVEKGKSKKLKSVKELLGITIMERSSFEKNPIDFLEAKGYKEVKKDLIIKLPKYSLFELENGRKRMLASAGELQKGNELALPSKYVNFLYLASHYEKLKGSPEDNEQKQLFVEQHKHYLDEIIEQISEFSKRVILADANLDKVLSAYNKHRDKPIREQAENIIHLFTLTNLGAPAAFKYFDTTIDRKRYTSTKEVLDATLIHQSITGLYETRIDLSQLGGDGGPAPAPAPAPAPGGTLNIEDEHRLHETSKEPDVSLGSTWLSDFPQAWAETGGMGLAVRQAPLIIPLKATSTPVSIKQYPMSQEARLGIKPHIQRLLDQGILVPCQSPWNTPLLPVKKPGTNDYRPVQDLREVNKRVEDIHPTVPNPYNLLSGLPPSHQWYTVLDLKDAFFCLRLHPTSQPLFAFEWRDPEMGISGQLTWTRLPQGFKNSPTLFDEALHRDLADFRIQHPDLILLQYVDDLLLAATSELDCQQGTRALLQTLGNLGYRASAKKAQICQKQVKYLGYLLKEGQRWLTEARKETVMGQPTPKTPRQLREFLGTAGFCRLWIPGFAEMAAPLYPLTKTGTLFNWGPDQQKAYQEIKQALLTAPALGLPDLTKPFELFVDEKQGYAKGVLTQKLGPWRRPVAYLSKKLDPVAAGWPPCLRMVAAIAVLTKDAGKLTMGQPLVILAPHAVEALVKQPPDRWLSNARMTHYQALLLDTDRVQFGPVVALNPATLLPLPEEGLQHNCLDILAEAHGTRPDLTDQPLPDADHTWYTDGSSLLQEGQRKAGAAVTTETEVIWAKALPAGTSAQRAELIALTQALKMAEGKKLNVYTDSRYAFATAHIHGEIYRRRGLLTSEGKEIKNKDEILALLKALFLPKRLSIIHCPGHQKGHSAEARGNRMADQAARKAAITETPDTSTLLAGKRTADGSEFEKRTADGSEFESPKKKAKVE

SEQ ID NO: 2710 - protein, 2091 aa, synthetic construct
MPAAKRVKLDGGDKKYSIGLDIGTNSVGWAVITDEYKVPSKKFKVLGNTDRHSIKKNLIGALLFDSGETAEATRLKRTARRRYTRRKNRICYLQEIFSNEMAKVDDSFFHRLEESFLVEEDKKHERHPIFGNIVDEVAYHEKYPTIYHLRKKLVDSTDKADLRLIYLALAHMIKFRGHFLIEGDLNPDNSDVDKLFIQLVQTYNQLFEENPINASGVDAKAILSARLSKSRRLENLIAQLPGEKKNGLFGNLIALSLGLTPNFKSNFDLAEDAKLQLSKDTYDDDLDNLLAQIGDQYADLFLAAKNLSDAILLSDILRVNTEITKAPLSASMIKRYDEHHQDLTLLKALVRQQLPEKYKEIFFDQSKNGYAGYIDGGASQEEFYKFIKPILEKMDGTEELLVKLNREDLLRKQRTFDNGSIPHQIHLGELHAILRRQEDFYPFLKDNREKIEKILTFRIPYYVGPLARGNSRFAWMTRKSEETITPWNFEEVVDKGASAQSFIERMTNFDKNLPNEKVLPKHSLLYEYFTVYNELTKVKYVTEGMRKPAFLSGEQKKAIVDLLFKTNRKVTVKQLKEDYFKKIECFDSVEISGVEDRFNASLGTYHDLLKIIKDKDFLDNEENEDILEDIVLTLTLFEDREMIEERLKTYAHLFDDKVMKQLKRRRYTGWGRLSRKLINGIRDKQSGKTILDFLKSDGFANRNFMQLIHDDSLTFKEDIQKAQVSGQGDSLHEHIANLAGSPAIKKGILQTVKVVDELVKVMGRHKPENIVIEMARENQTTQKGQKNSRERMKRIEEGIKELGSQILKEHPVENTQLQNEKLYLYYLQNGRDMYVDQELDINRLSDYDVDHIVPQSFLKDDSIDNKVLTRSDKARGKSDNVPSEEVVKKMKNYWRQLLNAKLITQRKFDNLTKAERGGLSELDKAGFIKRQLVETRQITKHVAQILDSRMNTKYDENDKLIREVKVITLKSKLVSDFRKDFQFYKVREINNYHHAHDAYLNAVVGTALIKKYPKLESEFVYGDYKVYDVRKMIAKSEQEIGKATAKYFFYSNIMNFFKTEITLANGEIRKRPLIETNGETGEIVWDKGRDFATVRKVLSMPQVNIVKKTEVQTGGFSKESILPKRNSDKLIARKKDWDPKKYGGFDSPTVAYSVLVVAKVEKGKSKKLKSVKELLGITIMERSSFEKNPIDFLEAKGYKEVKKDLIIKLPKYSLFELENGRKRMLASAGELQKGNELALPSKYVNFLYLASHYEKLKGSPEDNEQKQLFVEQHKHYLDEIIEQISEFSKRVILADANLDKVLSAYNKHRDKPIREQAENIIHLFTLTNLGAPAAFKYFDTTIDRKRYTSTKEVLDATLIHQSITGLYETRIDLSQLGGDGGGSSPAPGGTLNIEDEHRLHETSKEPDVSLGSTWLSDFPQAWAETGGMGLAVRQAPLIIPLKATSTPVSIKQYPMSQEARLGIKPHIQRLLDQGILVPCQSPWNTPLLPVKKPGTNDYRPVQDLREVNKRVEDIHPTVPNPYNLLSGLPPSHQWYTVLDLKDAFFCLRLHPTSQPLFAFEWRDPEMGISGQLTWTRLPQGFKNSPTLFDEALHRDLADFRIQHPDLILLQYVDDLLLAATSELDCQQGTRALLQTLGNLGYRASAKKAQICQKQVKYLGYLLKEGQRWLTEARKETVMGQPTPKTPRQLREFLGTAGFCRLWIPGFAEMAAPLYPLTKTGTLFNWGPDQQKAYQEIKQALLTAPALGLPDLTKPFELFVDEKQGYAKGVLTQKLGPWRRPVAYLSKKLDPVAAGWPPCLRMVAAIAVLTKDAGKLTMGQPLVILAPHAVEALVKQPPDRWLSNARMTHYQALLLDTDRVQFGPVVALNPATLLPLPEEGLQHNCLDILAEAHGTRPDLTDQPLPDADHTWYTDGSSLLQEGQRKAGAAVTTETEVIWAKALPAGTSAQRAELIALTQALKMAEGKKLNVYTDSRYAFATAHIHGEIYRRRGLLTSEGKEIKNKDEILALLKALFLPKRLSIIHCPGHQKGHSAEARGNRMADQAARKAAITETPDTSTLLAGKRTADGSEFEKRTADGSEFESPKKKAKVE

SEQ ID NO: 2711 - protein, 2131 aa, synthetic construct
MPAAKRVKLDGGDKKYSIGLDIGTNSVGWAVITDEYKVPSKKFKVLGNTDRHSIKKNLIGALLFDSGETAEATRLKRTARRRYTRRKNRICYLQEIFSNEMAKVDDSFFHRLEESFLVEEDKKHERHPIFGNIVDEVAYHEKYPTIYHLRKKLVDSTDKADLRLIYLALAHMIKFRGHFLIEGDLNPDNSDVDKLFIQLVQTYNQLFEENPINASGVDAKAILSARLSKSRRLENLIAQLPGEKKNGLFGNLIALSLGLTPNFKSNFDLAEDAKLQLSKDTYDDDLDNLLAQIGDQYADLFLAAKNLSDAILLSDILRVNTEITKAPLSASMIKRYDEHHQDLTLLKALVRQQLPEKYKEIFFDQSKNGYAGYIDGGASQEEFYKFIKPILEKMDGTEELLVKLNREDLLRKQRTFDNGSIPHQIHLGELHAILRRQEDFYPFLKDNREKIEKILTFRIPYYVGPLARGNSRFAWMTRKSEETITPWNFEEVVDKGASAQSFIERMTNFDKNLPNEKVLPKHSLLYEYFTVYNELTKVKYVTEGMRKPAFLSGEQKKAIVDLLFKTNRKVTVKQLKEDYFKKIECFDSVEISGVEDRFNASLGTYHDLLKIIKDKDFLDNEENEDILEDIVLTLTLFEDREMIEERLKTYAHLFDDKVMKQLKRRRYTGWGRLSRKLINGIRDKQSGKTILDFLKSDGFANRNFMQLIHDDSLTFKEDIQKAQVSGQGDSLHEHIANLAGSPAIKKGILQTVKVVDELVKVMGRHKPENIVIEMARENQTTQKGQKNSRERMKRIEEGIKELGSQILKEHPVENTQLQNEKLYLYYLQNGRDMYVDQELDINRLSDYDVDHIVPQSFLKDDSIDNKVLTRSDKARGKSDNVPSEEVVKKMKNYWRQLLNAKLITQRKFDNLTKAERGGLSELDKAGFIKRQLVETRQITKHVAQILDSRMNTKYDENDKLIREVKVITLKSKLVSDFRKDFQFYKVREINNYHHAHDAYLNAVVGTALIKKYPKLESEFVYGDYKVYDVRKMIAKSEQEIGKATAKYFFYSNIMNFFKTEITLANGEIRKRPLIETNGETGEIVWDKGRDFATVRKVLSMPQVNIVKKTEVQTGGFSKESILPKRNSDKLIARKKDWDPKKYGGFDSPTVAYSVLVVAKVEKGKSKKLKSVKELLGITIMERSSFEKNPIDFLEAKGYKEVKKDLIIKLPKYSLFELENGRKRMLASAGELQKGNELALPSKYVNFLYLASHYEKLKGSPEDNEQKQLFVEQHKHYLDEIIEQISEFSKRVILADANLDKVLSAYNKHRDKPIREQAENIIHLFTLTNLGAPAAFKYFDTTIDRKRYTSTKEVLDATLIHQSITGLYETRIDLSQLGGDGGAEAAAKEAAAKEAAAKEAAAKALEAEAAAKEAAAKEAAAKEAAAKAGGTLNIEDEHRLHETSKEPDVSLGSTWLSDFPQAWAETGGMGLAVRQAPLIIPLKATSTPVSIKQYPMSQEARLGIKPHIQRLLDQGILVPCQSPWNTPLLPVKKPGTNDYRPVQDLREVNKRVEDIHPTVPNPYNLLSGLPPSHQWYTVLDLKDAFFCLRLHPTSQPLFAFEWRDPEMGISGQLTWTRLPQGFKNSPTLFNEALHRDLADFRIQHPDLILLQYVDDLLLAATSELDCQQGTRALLQTLGNLGYRASAKKAQICQKQVKYLGYLLKEGQRWLTEARKETVMGQPTPKTPRQLREFLGTAGFCRLWIPGFAEMAAPLYPLTKPGTLFNWGPDQQKAYQEIKQALLTAPALGLPDLTKPFELFVDEKQGYAKGVLTQKLGPWRRPVAYLSKKLDPVAAGWPPCLRMVAAIAVLTKDAGKLTMGQPLVILAPHAVEALVKQPPDRWLSNARMTHYQALLLDTDRVQFGPVVALNPATLLPLPEEGLQHNCLDILAEAHGTRPDLTDQPLPDADHTWYTDGSSLLQEGQRKAGAAVTTETEVIWAKALPAGTSAQRAELIALTQALKMAEGKKLNVYTDSRYAFATAHIHGEIYRRRGWLTSEGKEIKNKDEILALLKALFLPKRLSIIHCPGHQKGHSAEARGNRMADQAARKAAITETPDTSTLLAGKRTADGSEFEKRTADGSEFESPKKKAKVE

SEQ ID NO: 2712 - protein, 2100 aa, synthetic construct
MPAAKRVKLDGGDKKYSIGLDIGTNSVGWAVITDEYKVPSKKFKVLGNTDRHSIKKNLIGALLFDSGETAEATRLKRTARRRYTRRKNRICYLQEIFSNEMAKVDDSFFHRLEESFLVEEDKKHERHPIFGNIVDEVAYHEKYPTIYHLRKKLVDSTDKADLRLIYLALAHMIKFRGHFLIEGDLNPDNSDVDKLFIQLVQTYNQLFEENPINASGVDAKAILSARLSKSRRLENLIAQLPGEKKNGLFGNLIALSLGLTPNFKSNFDLAEDAKLQLSKDTYDDDLDNLLAQIGDQYADLFLAAKNLSDAILLSDILRVNTEITKAPLSASMIKRYDEHHQDLTLLKALVRQQLPEKYKEIFFDQSKNGYAGYIDGGASQEEFYKFIKPILEKMDGTEELLVKLNREDLLRKQRTFDNGSIPHQIHLGELHAILRRQEDFYPFLKDNREKIEKILTFRIPYYVGPLARGNSRFAWMTRKSEETITPWNFEEVVDKGASAQSFIERMTNFDKNLPNEKVLPKHSLLYEYFTVYNELTKVKYVTEGMRKPAFLSGEQKKAIVDLLFKTNRKVTVKQLKEDYFKKIECFDSVEISGVEDRFNASLGTYHDLLKIIKDKDFLDNEENEDILEDIVLTLTLFEDREMIEERLKTYAHLFDDKVMKQLKRRRYTGWGRLSRKLINGIRDKQSGKTILDFLKSDGFANRNFMQLIHDDSLTFKEDIQKAQVSGQGDSLHEHIANLAGSPAIKKGILQTVKVVDELVKVMGRHKPENIVIEMARENQTTQKGQKNSRERMKRIEEGIKELGSQILKEHPVENTQLQNEKLYLYYLQNGRDMYVDQELDINRLSDYDVDHIVPQSFLKDDSIDNKVLTRSDKARGKSDNVPSEEVVKKMKNYWRQLLNAKLITQRKFDNLTKAERGGLSELDKAGFIKRQLVETRQITKHVAQILDSRMNTKYDENDKLIREVKVITLKSKLVSDFRKDFQFYKVREINNYHHAHDAYLNAVVGTALIKKYPKLESEFVYGDYKVYDVRKMIAKSEQEIGKATAKYFFYSNIMNFFKTEITLANGEIRKRPLIETNGETGEIVWDKGRDFATVRKVLSMPQVNIVKKTEVQTGGFSKESILPKRNSDKLIARKKDWDPKKYGGFDSPTVAYSVLVVAKVEKGKSKKLKSVKELLGITIMERSSFEKNPIDFLEAKGYKEVKKDLIIKLPKYSLFELENGRKRMLASAGELQKGNELALPSKYVNFLYLASHYEKLKGSPEDNEQKQLFVEQHKHYLDEIIEQISEFSKRVILADANLDKVLSAYNKHRDKPIREQAENIIHLFTLTNLGAPAAFKYFDTTIDRKRYTSTKEVLDATLIHQSITGLYETRIDLSQLGGDGGEAAAKGGGGSEAAAKGGTLNIEDEHRLHETSKEPDVSLGSTWLSDFPQAWAETGGMGLAVRQAPLIIPLKATSTPVSIKQYPMSQEARLGIKPHIQRLLDQGILVPCQSPWNTPLLPVKKPGTNDYRPVQDLREVNKRVEDIHPTVPNPYNLLSGLPPSHQWYTVLDLKDAFFCLRLHPTSQPLFAFEWRDPEMGISGQLTWTRLPQGFKNSPTLFNEALHRDLADFRIQHPDLILLQYVDDLLLAATSELDCQQGTRALLQTLGNLGYRASAKKAQICQKQVKYLGYLLKEGQRWLTEARKETVMGQPTPKTPRQLREFLGTAGFCRLWIPGFAEMAAPLYPLTKPGTLFNWGPDQQKAYQEIKQALLTAPALGLPDLTKPFELFVDEKQGYAKGVLTQKLGPWRRPVAYLSKKLDPVAAGWPPCLRMVAAIAVLTKDAGKLTMGQPLVILAPHAVEALVKQPPDRWLSNARMTHYQALLLDTDRVQFGPVVALNPATLLPLPEEGLQHNCLDILAEAHGTRPDLTDQPLPDADHTWYTDGSSLLQEGQRKAGAAVTTETEVIWAKALPAGTSAQRAELIALTQALKMAEGKKLNVYTDSRYAFATAHIHGEIYRRRGWLTSEGKEIKNKDEILALLKALFLPKRLSIIHCPGHQKGHSAEARGNRMADQAARKAAITETPDTSTLLAGKRTADGSEFEKRTADGSEFESPKKKAKVE

SEQ ID NO: 2713 - protein, 2096 aa, synthetic construct
MPAAKRVKLDGGDKKYSIGLDIGTNSVGWAVITDEYKVPSKKFKVLGNTDRHSIKKNLIGALLFDSGETAEATRLKRTARRRYTRRKNRICYLQEIFSNEMAKVDDSFFHRLEESFLVEEDKKHERHPIFGNIVDEVAYHEKYPTIYHLRKKLVDSTDKADLRLIYLALAHMIKFRGHFLIEGDLNPDNSDVDKLFIQLVQTYNQLFEENPINASGVDAKAILSARLSKSRRLENLIAQLPGEKKNGLFGNLIALSLGLTPNFKSNFDLAEDAKLQLSKDTYDDDLDNLLAQIGDQYADLFLAAKNLSDAILLSDILRVNTEITKAPLSASMIKRYDEHHQDLTLLKALVRQQLPEKYKEIFFDQSKNGYAGYIDGGASQEEFYKFIKPILEKMDGTEELLVKLNREDLLRKQRTFDNGSIPHQIHLGELHAILRRQEDFYPFLKDNREKIEKILTFRIPYYVGPLARGNSRFAWMTRKSEETITPWNFEEVVDKGASAQSFIERMTNFDKNLPNEKVLPKHSLLYEYFTVYNELTKVKYVTEGMRKPAFLSGEQKKAIVDLLFKTNRKVTVKQLKEDYFKKIECFDSVEISGVEDRFNASLGTYHDLLKIIKDKDFLDNEENEDILEDIVLTLTLFEDREMIEERLKTYAHLFDDKVMKQLKRRRYTGWGRLSRKLINGIRDKQSGKTILDFLKSDGFANRNFMQLIHDDSLTFKEDIQKAQVSGQGDSLHEHIANLAGSPAIKKGILQTVKVVDELVKVMGRHKPENIVIEMARENQTTQKGQKNSRERMKRIEEGIKELGSQILKEHPVENTQLQNEKLYLYYLQNGRDMYVDQELDINRLSDYDVDHIVPQSFLKDDSIDNKVLTRSDKARGKSDNVPSEEVVKKMKNYWRQLLNAKLITQRKFDNLTKAERGGLSELDKAGFIKRQLVETRQITKHVAQILDSRMNTKYDENDKLIREVKVITLKSKLVSDFRKDFQFYKVREINNYHHAHDAYLNAVVGTALIKKYPKLESEFVYGDYKVYDVRKMIAKSEQEIGKATAKYFFYSNIMNFFKTEITLANGEIRKRPLIETNGETGEIVWDKGRDFATVRKVLSMPQVNIVKKTEVQTGGFSKESILPKRNSDKLIARKKDWDPKKYGGFDSPTVAYSVLVVAKVEKGKSKKLKSVKELLGITIMERSSFEKNPIDFLEAKGYKEVKKDLIIKLPKYSLFELENGRKRMLASAGELQKGNELALPSKYVNFLYLASHYEKLKGSPEDNEQKQLFVEQHKHYLDEIIEQISEFSKRVILADANLDKVLSAYNKHRDKPIREQAENIIHLFTLTNLGAPAAFKYFDTTIDRKRYTSTKEVLDATLIHQSITGLYETRIDLSQLGGDGGGGSEAAAKGGGGGTLNIEDEHRLHETSKEPDVSLGSTWLSDFPQAWAETGGMGLAVRQAPLIIPLKATSTPVSIKQYPMSQEARLGIKPHIQRLLDQGILVPCQSPWNTPLLPVKKPGTNDYRPVQDLREVNKRVEDIHPTVPNPYNLLSGLPPSHQWYTVLDLKDAFFCLRLHPTSQPLFAFEWRDPEMGISGQLTWTRLPQGFKNSPTLFNEALHRDLADFRIQHPDLILLQYVDDLLLAATSELDCQQGTRALLQTLGNLGYRASAKKAQICQKQVKYLGYLLKEGQRWLTEARKETVMGQPTPKTPRQLREFLGTAGFCRLWIPGFAEMAAPLYPLTKPGTLFNWGPDQQKAYQEIKQALLTAPALGLPDLTKPFELFVDEKQGYAKGVLTQKLGPWRRPVAYLSKKLDPVAAGWPPCLRMVAAIAVLTKDAGKLTMGQPLVILAPHAVEALVKQPPDRWLSNARMTHYQALLLDTDRVQFGPVVALNPATLLPLPEEGLQHNCLDILAEAHGTRPDLTDQPLPDADHTWYTDGSSLLQEGQRKAGAAVTTETEVIWAKALPAGTSAQRAELIALTQALKMAEGKKLNVYTDSRYAFATAHIHGEIYRRRGWLTSEGKEIKNKDEILALLKALFLPKRLSIIHCPGHQKGHSAEARGNRMADQAARKAAITETPDTSTLLAGKRTADGSEFEKRTADGSEFESPKKKAKVE

SEQ ID NO: 2714 - protein, 2096 aa, synthetic construct
MPAAKRVKLDGGDKKYSIGLDIGTNSVGWAVITDEYKVPSKKFKVLGNTDRHSIKKNLIGALLFDSGETAEATRLKRTARRRYTRRKNRICYLQEIFSNEMAKVDDSFFHRLEESFLVEEDKKHERHPIFGNIVDEVAYHEKYPTIYHLRKKLVDSTDKADLRLIYLALAHMIKFRGHFLIEGDLNPDNSDVDKLFIQLVQTYNQLFEENPINASGVDAKAILSARLSKSRRLENLIAQLPGEKKNGLFGNLIALSLGLTPNFKSNFDLAEDAKLQLSKDTYDDDLDNLLAQIGDQYADLFLAAKNLSDAILLSDILRVNTEITKAPLSASMIKRYDEHHQDLTLLKALVRQQLPEKYKEIFFDQSKNGYAGYIDGGASQEEFYKFIKPILEKMDGTEELLVKLNREDLLRKQRTFDNGSIPHQIHLGELHAILRRQEDFYPFLKDNREKIEKILTFRIPYYVGPLARGNSRFAWMTRKSEETITPWNFEEVVDKGASAQSFIERMTNFDKNLPNEKVLPKHSLLYEYFTVYNELTKVKYVTEGMRKPAFLSGEQKKAIVDLLFKTNRKVTVKQLKEDYFKKIECFDSVEISGVEDRFNASLGTYHDLLKIIKDKDFLDNEENEDILEDIVLTLTLFEDREMIEERLKTYAHLFDDKVMKQLKRRRYTGWGRLSRKLINGIRDKQSGKTILDFLKSDGFANRNFMQLIHDDSLTFKEDIQKAQVSGQGDSLHEHIANLAGSPAIKKGILQTVKVVDELVKVMGRHKPENIVIEMARENQTTQKGQKNSRERMKRIEEGIKELGSQILKEHPVENTQLQNEKLYLYYLQNGRDMYVDQELDINRLSDYDVDHIVPQSFLKDDSIDNKVLTRSDKARGKSDNVPSEEVVKKMKNYWRQLLNAKLITQRKFDNLTKAERGGLSELDKAGFIKRQLVETRQITKHVAQILDSRMNTKYDENDKLIREVKVITLKSKLVSDFRKDFQFYKVREINNYHHAHDAYLNAVVGTALIKKYPKLESEFVYGDYKVYDVRKMIAKSEQEIGKATAKYFFYSNIMNFFKTEITLANGEIRKRPLIETNGETGEIVWDKGRDFATVRKVLSMPQVNIVKKTEVQTGGFSKESILPKRNSDKLIARKKDWDPKKYGGFDSPTVAYSVLVVAKVEKGKSKKLKSVKELLGITIMERSSFEKNPIDFLEAKGYKEVKKDLIIKLPKYSLFELENGRKRMLASAGELQKGNELALPSKYVNFLYLASHYEKLKGSPEDNEQKQLFVEQHKHYLDEIIEQISEFSKRVILADANLDKVLSAYNKHRDKPIREQAENIIHLFTLTNLGAPAAFKYFDTTIDRKRYTSTKEVLDATLIHQSITGLYETRIDLSQLGGDGGEAAAKPAPGGSGGTLNIEDEHRLHETSKEPDVSLGSTWLSDFPQAWAETGGMGLAVRQAPLIIPLKATSTPVSIKQYPMSQEARLGIKPHIQRLLDQGILVPCQSPWNTPLLPVKKPGTNDYRPVQDLREVNKRVEDIHPTVPNPYNLLSGLPPSHQWYTVLDLKDAFFCLRLHPTSQPLFAFEWRDPEMGISGQLTWTRLPQGFKNSPTLFNEALHRDLADFRIQHPDLILLQYVDDLLLAATSELDCQQGTRALLQTLGNLGYRASAKKAQICQKQVKYLGYLLKEGQRWLTEARKETVMGQPTPKTPRQLREFLGTAGFCRLWIPGFAEMAAPLYPLTKPGTLFNWGPDQQKAYQEIKQALLTAPALGLPDLTKPFELFVDEKQGYAKGVLTQKLGPWRRPVAYLSKKLDPVAAGWPPCLRMVAAIAVLTKDAGKLTMGQPLVILAPHAVEALVKQPPDRWLSNARMTHYQALLLDTDRVQFGPVVALNPATLLPLPEEGLQHNCLDILAEAHGTRPDLTDQPLPDADHTWYTDGSSLLQEGQRKAGAAVTTETEVIWAKALPAGTSAQRAELIALTQALKMAEGKKLNVYTDSRYAFATAHIHGEIYRRRGWLTSEGKEIKNKDEILALLKALFLPKRLSIIHCPGHQKGHSAEARGNRMADQAARKAAITETPDTSTLLAGKRTADGSEFEKRTADGSEFESPKKKAKVE

SEQ ID NO: 2715 - protein, 2094 aa, synthetic construct
MPAAKRVKLDGGDKKYSIGLDIGTNSVGWAVITDEYKVPSKKFKVLGNTDRHSIKKNLIGALLFDSGETAEATRLKRTARRRYTRRKNRICYLQEIFSNEMAKVDDSFFHRLEESFLVEEDKKHERHPIFGNIVDEVAYHEKYPTIYHLRKKLVDSTDKADLRLIYLALAHMIKFRGHFLIEGDLNPDNSDVDKLFIQLVQTYNQLFEENPINASGVDAKAILSARLSKSRRLENLIAQLPGEKKNGLFGNLIALSLGLTPNFKSNFDLAEDAKLQLSKDTYDDDLDNLLAQIGDQYADLFLAAKNLSDAILLSDILRVNTEITKAPLSASMIKRYDEHHQDLTLLKALVRQQLPEKYKEIFFDQSKNGYAGYIDGGASQEEFYKFIKPILEKMDGTEELLVKLNREDLLRKQRTFDNGSIPHQIHLGELHAILRRQEDFYPFLKDNREKIEKILTFRIPYYVGPLARGNSRFAWMTRKSEETITPWNFEEVVDKGASAQSFIERMTNFDKNLPNEKVLPKHSLLYEYFTVYNELTKVKYVTEGMRKPAFLSGEQKKAIVDLLFKTNRKVTVKQLKEDYFKKIECFDSVEISGVEDRFNASLGTYHDLLKIIKDKDFLDNEENEDILEDIVLTLTLFEDREMIEERLKTYAHLFDDKVMKQLKRRRYTGWGRLSRKLINGIRDKQSGKTILDFLKSDGFANRNFMQLIHDDSLTFKEDIQKAQVSGQGDSLHEHIANLAGSPAIKKGILQTVKVVDELVKVMGRHKPENIVIEMARENQTTQKGQKNSRERMKRIEEGIKELGSQILKEHPVENTQLQNEKLYLYYLQNGRDMYVDQELDINRLSDYDVDHIVPQSFLKDDSIDNKVLTRSDKARGKSDNVPSEEVVKKMKNYWRQLLNAKLITQRKFDNLTKAERGGLSELDKAGFIKRQLVETRQITKHVAQILDSRMNTKYDENDKLIREVKVITLKSKLVSDFRKDFQFYKVREINNYHHAHDAYLNAVVGTALIKKYPKLESEFVYGDYKVYDVRKMIAKSEQEIGKATAKYFFYSNIMNFFKTEITLANGEIRKRPLIETNGETGEIVWDKGRDFATVRKVLSMPQVNIVKKTEVQTGGFSKESILPKRNSDKLIARKKDWDPKKYGGFDSPTVAYSVLVVAKVEKGKSKKLKSVKELLGITIMERSSFEKNPIDFLEAKGYKEVKKDLIIKLPKYSLFELENGRKRMLASAGELQKGNELALPSKYVNFLYLASHYEKLKGSPEDNEQKQLFVEQHKHYLDEIIEQISEFSKRVILADANLDKVLSAYNKHRDKPIREQAENIIHLFTLTNLGAPAAFKYFDTTIDRKRYTSTKEVLDATLIHQSITGLYETRIDLSQLGGDGGGSSGGGGGSGGTLNIEDEHRLHETSKEPDVSLGSTWLSDFPQAWAETGGMGLAVRQAPLIIPLKATSTPVSIKQYPMSQEARLGIKPHIQRLLDQGILVPCQSPWNTPLLPVKKPGTNDYRPVQDLREVNKRVEDIHPTVPNPYNLLSGLPPSHQWYTVLDLKDAFFCLRLHPTSQPLFAFEWRDPEMGISGQLTWTRLPQGFKNSPTLFNEALHRDLADFRIQHPDLILLQYVDDLLLAATSELDCQQGTRALLQTLGNLGYRASAKKAQICQKQVKYLGYLLKEGQRWLTEARKETVMGQPTPKTPRQLREFLGTAGFCRLWIPGFAEMAAPLYPLTKPGTLFNWGPDQQKAYQEIKQALLTAPALGLPDLTKPFELFVDEKQGYAKGVLTQKLGPWRRPVAYLSKKLDPVAAGWPPCLRMVAAIAVLTKDAGKLTMGQPLVILAPHAVEALVKQPPDRWLSNARMTHYQALLLDTDRVQFGPVVALNPATLLPLPEEGLQHNCLDILAEAHGTRPDLTDQPLPDADHTWYTDGSSLLQEGQRKAGAAVTTETEVIWAKALPAGTSAQRAELIALTQALKMAEGKKLNVYTDSRYAFATAHIHGEIYRRRGWLTSEGKEIKNKDEILALLKALFLPKRLSIIHCPGHQKGHSAEARGNRMADQAARKAAITETPDTSTLLAGKRTADGSEFEKRTADGSEFESPKKKAKVE

SEQ ID NO: 2716 - protein, 2110 aa, synthetic construct
MPAAKRVKLDGGDKKYSIGLDIGTNSVGWAVITDEYKVPSKKFKVLGNTDRHSIKKNLIGALLFDSGETAEATRLKRTARRRYTRRKNRICYLQEIFSNEMAKVDDSFFHRLEESFLVEEDKKHERHPIFGNIVDEVAYHEKYPTIYHLRKKLVDSTDKADLRLIYLALAHMIKFRGHFLIEGDLNPDNSDVDKLFIQLVQTYNQLFEENPINASGVDAKAILSARLSKSRRLENLIAQLPGEKKNGLFGNLIALSLGLTPNFKSNFDLAEDAKLQLSKDTYDDDLDNLLAQIGDQYADLFLAAKNLSDAILLSDILRVNTEITKAPLSASMIKRYDEHHQDLTLLKALVRQQLPEKYKEIFFDQSKNGYAGYIDGGASQEEFYKFIKPILEKMDGTEELLVKLNREDLLRKQRTFDNGSIPHQIHLGELHAILRRQEDFYPFLKDNREKIEKILTFRIPYYVGPLARGNSRFAWMTRKSEETITPWNFEEVVDKGASAQSFIERMTNFDKNLPNEKVLPKHSLLYEYFTVYNELTKVKYVTEGMRKPAFLSGEQKKAIVDLLFKTNRKVTVKQLKEDYFKKIECFDSVEISGVEDRFNASLGTYHDLLKIIKDKDFLDNEENEDILEDIVLTLTLFEDREMIEERLKTYAHLFDDKVMKQLKRRRYTGWGRLSRKLINGIRDKQSGKTILDFLKSDGFANRNFMQLIHDDSLTFKEDIQKAQVSGQGDSLHEHIANLAGSPAIKKGILQTVKVVDELVKVMGRHKPENIVIEMARENQTTQKGQKNSRERMKRIEEGIKELGSQILKEHPVENTQLQNEKLYLYYLQNGRDMYVDQELDINRLSDYDVDHIVPQSFLKDDSIDNKVLTRSDKARGKSDNVPSEEVVKKMKNYWRQLLNAKLITQRKFDNLTKAERGGLSELDKAGFIKRQLVETRQITKHVAQILDSRMNTKYDENDKLIREVKVITLKSKLVSDFRKDFQFYKVREINNYHHAHDAYLNAVVGTALIKKYPKLESEFVYGDYKVYDVRKMIAKSEQEIGKATAKYFFYSNIMNFFKTEITLANGEIRKRPLIETNGETGEIVWDKGRDFATVRKVLSMPQVNIVKKTEVQTGGFSKESILPKRNSDKLIARKKDWDPKKYGGFDSPTVAYSVLVVAKVEKGKSKKLKSVKELLGITIMERSSFEKNPIDFLEAKGYKEVKKDLIIKLPKYSLFELENGRKRMLASAGELQKGNELALPSKYVNFLYLASHYEKLKGSPEDNEQKQLFVEQHKHYLDEIIEQISEFSKRVILADANLDKVLSAYNKHRDKPIREQAENIIHLFTLTNLGAPAAFKYFDTTIDRKRYTSTKEVLDATLIHQSITGLYETRIDLSQLGGDGGEAAAKEAAAKEAAAKEAAAKEAAAKGGTLNIEDEHRLHETSKEPDVSLGSTWLSDFPQAWAETGGMGLAVRQAPLIIPLKATSTPVSIKQYPMSQEARLGIKPHIQRLLDQGILVPCQSPWNTPLLPVKKPGTNDYRPVQDLREVNKRVEDIHPTVPNPYNLLSGLPPSHQWYTVLDLKDAFFCLRLHPTSQPLFAFEWRDPEMGISGQLTWTRLPQGFKNSPTLFNEALHRDLADFRIQHPDLILLQYVDDLLLAATSELDCQQGTRALLQTLGNLGYRASAKKAQICQKQVKYLGYLLKEGQRWLTEARKETVMGQPTPKTPRQLREFLGTAGFCRLWIPGFAEMAAPLYPLTKPGTLFNWGPDQQKAYQEIKQALLTAPALGLPDLTKPFELFVDEKQGYAKGVLTQKLGPWRRPVAYLSKKLDPVAAGWPPCLRMVAAIAVLTKDAGKLTMGQPLVILAPHAVEALVKQPPDRWLSNARMTHYQALLLDTDRVQFGPVVALNPATLLPLPEEGLQHNCLDILAEAHGTRPDLTDQPLPDADHTWYTDGSSLLQEGQRKAGAAVTTETEVIWAKALPAGTSAQRAELIALTQALKMAEGKKLNVYTDSRYAFATAHIHGEIYRRRGWLTSEGKEIKNKDEILALLKALFLPKRLSIIHCPGHQKGHSAEARGNRMADQAARKAAITETPDTSTLLAGKRTADGSEFEKRTADGSEFESPKKKAKVE

SEQ ID NO: 2717 - protein, 2091 aa, synthetic construct
MPAAKRVKLDGGDKKYSIGLDIGTNSVGWAVITDEYKVPSKKFKVLGNTDRHSIKKNLIGALLFDSGETAEATRLKRTARRRYTRRKNRICYLQEIFSNEMAKVDDSFFHRLEESFLVEEDKKHERHPIFGNIVDEVAYHEKYPTIYHLRKKLVDSTDKADLRLIYLALAHMIKFRGHFLIEGDLNPDNSDVDKLFIQLVQTYNQLFEENPINASGVDAKAILSARLSKSRRLENLIAQLPGEKKNGLFGNLIALSLGLTPNFKSNFDLAEDAKLQLSKDTYDDDLDNLLAQIGDQYADLFLAAKNLSDAILLSDILRVNTEITKAPLSASMIKRYDEHHQDLTLLKALVRQQLPEKYKEIFFDQSKNGYAGYIDGGASQEEFYKFIKPILEKMDGTEELLVKLNREDLLRKQRTFDNGSIPHQIHLGELHAILRRQEDFYPFLKDNREKIEKILTFRIPYYVGPLARGNSRFAWMTRKSEETITPWNFEEVVDKGASAQSFIERMTNFDKNLPNEKVLPKHSLLYEYFTVYNELTKVKYVTEGMRKPAFLSGEQKKAIVDLLFKTNRKVTVKQLKEDYFKKIECFDSVEISGVEDRFNASLGTYHDLLKIIKDKDFLDNEENEDILEDIVLTLTLFEDREMIEERLKTYAHLFDDKVMKQLKRRRYTGWGRLSRKLINGIRDKQSGKTILDFLKSDGFANRNFMQLIHDDSLTFKEDIQKAQVSGQGDSLHEHIANLAGSPAIKKGILQTVKVVDELVKVMGRHKPENIVIEMARENQTTQKGQKNSRERMKRIEEGIKELGSQILKEHPVENTQLQNEKLYLYYLQNGRDMYVDQELDINRLSDYDVDHIVPQSFLKDDSIDNKVLTRSDKARGKSDNVPSEEVVKKMKNYWRQLLNAKLITQRKFDNLTKAERGGLSELDKAGFIKRQLVETRQITKHVAQILDSRMNTKYDENDKLIREVKVITLKSKLVSDFRKDFQFYKVREINNYHHAHDAYLNAVVGTALIKKYPKLESEFVYGDYKVYDVRKMIAKSEQEIGKATAKYFFYSNIMNFFKTEITLANGEIRKRPLIETNGETGEIVWDKGRDFATVRKVLSMPQVNIVKKTEVQTGGFSKESILPKRNSDKLIARKKDWDPKKYGGFDSPTVAYSVLVVAKVEKGKSKKLKSVKELLGITIMERSSFEKNPIDFLEAKGYKEVKKDLIIKLPKYSLFELENGRKRMLASAGELQKGNELALPSKYVNFLYLASHYEKLKGSPEDNEQKQLFVEQHKHYLDEIIEQISEFSKRVILADANLDKVLSAYNKHRDKPIREQAENIIHLFTLTNLGAPAAFKYFDTTIDRKRYTSTKEVLDATLIHQSITGLYETRIDLSQLGGDGGGGGGGSGGTLNIEDEHRLHETSKEPDVSLGSTWLSDFPQAWAETGGMGLAVRQAPLIIPLKATSTPVSIKQYPMSQEARLGIKPHIQRLLDQGILVPCQSPWNTPLLPVKKPGTNDYRPVQDLREVNKRVEDIHPTVPNPYNLLSGLPPSHQWYTVLDLKDAFFCLRLHPTSQPLFAFEWRDPEMGISGQLTWTRLPQGFKNSPTLFNEALHRDLADFRIQHPDLILLQYVDDLLLAATSELDCQQGTRALLQTLGNLGYRASAKKAQICQKQVKYLGYLLKEGQRWLTEARKETVMGQPTPKTPRQLREFLGTAGFCRLWIPGFAEMAAPLYPLTKPGTLFNWGPDQQKAYQEIKQALLTAPALGLPDLTKPFELFVDEKQGYAKGVLTQKLGPWRRPVAYLSKKLDPVAAGWPPCLRMVAAIAVLTKDAGKLTMGQPLVILAPHAVEALVKQPPDRWLSNARMTHYQALLLDTDRVQFGPVVALNPATLLPLPEEGLQHNCLDILAEAHGTRPDLTDQPLPDADHTWYTDGSSLLQEGQRKAGAAVTTETEVIWAKALPAGTSAQRAELIALTQALKMAEGKKLNVYTDSRYAFATAHIHGEIYRRRGWLTSEGKEIKNKDEILALLKALFLPKRLSIIHCPGHQKGHSAEARGNRMADQAARKAAITETPDTSTLLAGKRTADGSEFEKRTADGSEFESPKKKAKVE

SEQ ID NO: 2718 - protein, 2093 aa, synthetic construct
MPAAKRVKLDGGDKKYSIGLDIGTNSVGWAVITDEYKVPSKKFKVLGNTDRHSIKKNLIGALLFDSGETAEATRLKRTARRRYTRRKNRICYLQEIFSNEMAKVDDSFFHRLEESFLVEEDKKHERHPIFGNIVDEVAYHEKYPTIYHLRKKLVDSTDKADLRLIYLALAHMIKFRGHFLIEGDLNPDNSDVDKLFIQLVQTYNQLFEENPINASGVDAKAILSARLSKSRRLENLIAQLPGEKKNGLFGNLIALSLGLTPNFKSNFDLAEDAKLQLSKDTYDDDLDNLLAQIGDQYADLFLAAKNLSDAILLSDILRVNTEITKAPLSASMIKRYDEHHQDLTLLKALVRQQLPEKYKEIFFDQSKNGYAGYIDGGASQEEFYKFIKPILEKMDGTEELLVKLNREDLLRKQRTFDNGSIPHQIHLGELHAILRRQEDFYPFLKDNREKIEKILTFRIPYYVGPLARGNSRFAWMTRKSEETITPWNFEEVVDKGASAQSFIERMTNFDKNLPNEKVLPKHSLLYEYFTVYNELTKVKYVTEGMRKPAFLSGEQKKAIVDLLFKTNRKVTVKQLKEDYFKKIECFDSVEISGVEDRFNASLGTYHDLLKIIKDKDFLDNEENEDILEDIVLTLTLFEDREMIEERLKTYAHLFDDKVMKQLKRRRYTGWGRLSRKLINGIRDKQSGKTILDFLKSDGFANRNFMQLIHDDSLTFKEDIQKAQVSGQGDSLHEHIANLAGSPAIKKGILQTVKVVDELVKVMGRHKPENIVIEMARENQTTQKGQKNSRERMKRIEEGIKELGSQILKEHPVENTQLQNEKLYLYYLQNGRDMYVDQELDINRLSDYDVDHIVPQSFLKDDSIDNKVLTRSDKARGKSDNVPSEEVVKKMKNYWRQLLNAKLITQRKFDNLTKAERGGLSELDKAGFIKRQLVETRQITKHVAQILDSRMNTKYDENDKLIREVKVITLKSKLVSDFRKDFQFYKVREINNYHHAHDAYLNAVVGTALIKKYPKLESEFVYGDYKVYDVRKMIAKSEQEIGKATAKYFFYSNIMNFFKTEITLANGEIRKRPLIETNGETGEIVWDKGRDFATVRKVLSMPQVNIVKKTEVQTGGFSKESILPKRNSDKLIARKKDWDPKKYGGFDSPTVAYSVLVVAKVEKGKSKKLKSVKELLGITIMERSSFEKNPIDFLEAKGYKEVKKDLIIKLPKYSLFELENGRKRMLASAGELQKGNELALPSKYVNFLYLASHYEKLKGSPEDNEQKQLFVEQHKHYLDEIIEQISEFSKRVILADANLDKVLSAYNKHRDKPIREQAENIIHLFTLTNLGAPAAFKYFDTTIDRKRYTSTKEVLDATLIHQSITGLYETRIDLSQLGGDGGGSSEAAAKGGTLNIEDEHRLHETSKEPDVSLGSTWLSDFPQAWAETGGMGLAVRQAPLIIPLKATSTPVSIKQYPMSQEARLGIKPHIQRLLDQGILVPCQSPWNTPLLPVKKPGTNDYRPVQDLREVNKRVEDIHPTVPNPYNLLSGLPPSHQWYTVLDLKDAFFCLRLHPTSQPLFAFEWRDPEMGISGQLTWTRLPQGFKNSPTLFNEALHRDLADFRIQHPDLILLQYVDDLLLAATSELDCQQGTRALLQTLGNLGYRASAKKAQICQKQVKYLGYLLKEGQRWLTEARKETVMGQPTPKTPRQLREFLGTAGFCRLWIPGFAEMAAPLYPLTKPGTLFNWGPDQQKAYQEIKQALLTAPALGLPDLTKPFELFVDEKQGYAKGVLTQKLGPWRRPVAYLSKKLDPVAAGWPPCLRMVAAIAVLTKDAGKLTMGQPLVILAPHAVEALVKQPPDRWLSNARMTHYQALLLDTDRVQFGPVVALNPATLLPLPEEGLQHNCLDILAEAHGTRPDLTDQPLPDADHTWYTDGSSLLQEGQRKAGAAVTTETEVIWAKALPAGTSAQRAELIALTQALKMAEGKKLNVYTDSRYAFATAHIHGEIYRRRGWLTSEGKEIKNKDEILALLKALFLPKRLSIIHCPGHQKGHSAEARGNRMADQAARKAAITETPDTSTLLAGKRTADGSEFEKRTADGSEFESPKKKAKVE

SEQ ID NO: 2719 - protein, 2096 aa, synthetic construct
MPAAKRVKLDGGDKKYSIGLDIGTNSVGWAVITDEYKVPSKKFKVLGNTDRHSIKKNLIGALLFDSGETAEATRLKRTARRRYTRRKNRICYLQEIFSNEMAKVDDSFFHRLEESFLVEEDKKHERHPIFGNIVDEVAYHEKYPTIYHLRKKLVDSTDKADLRLIYLALAHMIKFRGHFLIEGDLNPDNSDVDKLFIQLVQTYNQLFEENPINASGVDAKAILSARLSKSRRLENLIAQLPGEKKNGLFGNLIALSLGLTPNFKSNFDLAEDAKLQLSKDTYDDDLDNLLAQIGDQYADLFLAAKNLSDAILLSDILRVNTEITKAPLSASMIKRYDEHHQDLTLLKALVRQQLPEKYKEIFFDQSKNGYAGYIDGGASQEEFYKFIKPILEKMDGTEELLVKLNREDLLRKQRTFDNGSIPHQIHLGELHAILRRQEDFYPFLKDNREKIEKILTFRIPYYVGPLARGNSRFAWMTRKSEETITPWNFEEVVDKGASAQSFIERMTNFDKNLPNEKVLPKHSLLYEYFTVYNELTKVKYVTEGMRKPAFLSGEQKKAIVDLLFKTNRKVTVKQLKEDYFKKIECFDSVEISGVEDRFNASLGTYHDLLKIIKDKDFLDNEENEDILEDIVLTLTLFEDREMIEERLKTYAHLFDDKVMKQLKRRRYTGWGRLSRKLINGIRDKQSGKTILDFLKSDGFANRNFMQLIHDDSLTFKEDIQKAQVSGQGDSLHEHIANLAGSPAIKKGILQTVKVVDELVKVMGRHKPENIVIEMARENQTTQKGQKNSRERMKRIEEGIKELGSQILKEHPVENTQLQNEKLYLYYLQNGRDMYVDQELDINRLSDYDVDHIVPQSFLKDDSIDNKVLTRSDKARGKSDNVPSEEVVKKMKNYWRQLLNAKLITQRKFDNLTKAERGGLSELDKAGFIKRQLVETRQITKHVAQILDSRMNTKYDENDKLIREVKVITLKSKLVSDFRKDFQFYKVREINNYHHAHDAYLNAVVGTALIKKYPKLESEFVYGDYKVYDVRKMIAKSEQEIGKATAKYFFYSNIMNFFKTEITLANGEIRKRPLIETNGETGEIVWDKGRDFATVRKVLSMPQVNIVKKTEVQTGGFSKESILPKRNSDKLIARKKDWDPKKYGGFDSPTVAYSVLVVAKVEKGKSKKLKSVKELLGITIMERSSFEKNPIDFLEAKGYKEVKKDLIIKLPKYSLFELENGRKRMLASAGELQKGNELALPSKYVNFLYLASHYEKLKGSPEDNEQKQLFVEQHKHYLDEIIEQISEFSKRVILADANLDKVLSAYNKHRDKPIREQAENIIHLFTLTNLGAPAAFKYFDTTIDRKRYTSTKEVLDATLIHQSITGLYETRIDLSQLGGDGGGGGEAAAKPAPGGTLNIEDEHRLHETSKEPDVSLGSTWLSDFPQAWAETGGMGLAVRQAPLIIPLKATSTPVSIKQYPMSQEARLGIKPHIQRLLDQGILVPCQSPWNTPLLPVKKPGTNDYRPVQDLREVNKRVEDIHPTVPNPYNLLSGLPPSHQWYTVLDLKDAFFCLRLHPTSQPLFAFEWRDPEMGISGQLTWTRLPQGFKNSPTLFNEALHRDLADFRIQHPDLILLQYVDDLLLAATSELDCQQGTRALLQTLGNLGYRASAKKAQICQKQVKYLGYLLKEGQRWLTEARKETVMGQPTPKTPRQLREFLGTAGFCRLWIPGFAEMAAPLYPLTKPGTLFNWGPDQQKAYQEIKQALLTAPALGLPDLTKPFELFVDEKQGYAKGVLTQKLGPWRRPVAYLSKKLDPVAAGWPPCLRMVAAIAVLTKDAGKLTMGQPLVILAPHAVEALVKQPPDRWLSNARMTHYQALLLDTDRVQFGPVVALNPATLLPLPEEGLQHNCLDILAEAHGTRPDLTDQPLPDADHTWYTDGSSLLQEGQRKAGAAVTTETEVIWAKALPAGTSAQRAELIALTQALKMAEGKKLNVYTDSRYAFATAHIHGEIYRRRGWLTSEGKEIKNKDEILALLKALFLPKRLSIIHCPGHQKGHSAEARGNRMADQAARKAAITETPDTSTLLAGKRTADGSEFEKRTADGSEFESPKKKAKVE

SEQ ID NO: 2720 - protein, 2105 aa, synthetic construct
MPAAKRVKLDGGDKKYSIGLDIGTNSVGWAVITDEYKVPSKKFKVLGNTDRHSIKKNLIGALLFDSGETAEATRLKRTARRRYTRRKNRICYLQEIFSNEMAKVDDSFFHRLEESFLVEEDKKHERHPIFGNIVDEVAYHEKYPTIYHLRKKLVDSTDKADLRLIYLALAHMIKFRGHFLIEGDLNPDNSDVDKLFIQLVQTYNQLFEENPINASGVDAKAILSARLSKSRRLENLIAQLPGEKKNGLFGNLIALSLGLTPNFKSNFDLAEDAKLQLSKDTYDDDLDNLLAQIGDQYADLFLAAKNLSDAILLSDILRVNTEITKAPLSASMIKRYDEHHQDLTLLKALVRQQLPEKYKEIFFDQSKNGYAGYIDGGASQEEFYKFIKPILEKMDGTEELLVKLNREDLLRKQRTFDNGSIPHQIHLGELHAILRRQEDFYPFLKDNREKIEKILTFRIPYYVGPLARGNSRFAWMTRKSEETITPWNFEEVVDKGASAQSFIERMTNFDKNLPNEKVLPKHSLLYEYFTVYNELTKVKYVTEGMRKPAFLSGEQKKAIVDLLFKTNRKVTVKQLKEDYFKKIECFDSVEISGVEDRFNASLGTYHDLLKIIKDKDFLDNEENEDILEDIVLTLTLFEDREMIEERLKTYAHLFDDKVMKQLKRRRYTGWGRLSRKLINGIRDKQSGKTILDFLKSDGFANRNFMQLIHDDSLTFKEDIQKAQVSGQGDSLHEHIANLAGSPAIKKGILQTVKVVDELVKVMGRHKPENIVIEMARENQTTQKGQKNSRERMKRIEEGIKELGSQILKEHPVENTQLQNEKLYLYYLQNGRDMYVDQELDINRLSDYDVDHIVPQSFLKDDSIDNKVLTRSDKARGKSDNVPSEEVVKKMKNYWRQLLNAKLITQRKFDNLTKAERGGLSELDKAGFIKRQLVETRQITKHVAQILDSRMNTKYDENDKLIREVKVITLKSKLVSDFRKDFQFYKVREINNYHHAHDAYLNAVVGTALIKKYPKLESEFVYGDYKVYDVRKMIAKSEQEIGKATAKYFFYSNIMNFFKTEITLANGEIRKRPLIETNGETGEIVWDKGRDFATVRKVLSMPQVNIVKKTEVQTGGFSKESILPKRNSDKLIARKKDWDPKKYGGFDSPTVAYSVLVVAKVEKGKSKKLKSVKELLGITIMERSSFEKNPIDFLEAKGYKEVKKDLIIKLPKYSLFELENGRKRMLASAGELQKGNELALPSKYVNFLYLASHYEKLKGSPEDNEQKQLFVEQHKHYLDEIIEQISEFSKRVILADANLDKVLSAYNKHRDKPIREQAENIIHLFTLTNLGAPAAFKYFDTTIDRKRYTSTKEVLDATLIHQSITGLYETRIDLSQLGGDGGEAAAKEAAAKEAAAKEAAAKGGTLNIEDEHRLHETSKEPDVSLGSTWLSDFPQAWAETGGMGLAVRQAPLIIPLKATSTPVSIKQYPMSQEARLGIKPHIQRLLDQGILVPCQSPWNTPLLPVKKPGTNDYRPVQDLREVNKRVEDIHPTVPNPYNLLSGLPPSHQWYTVLDLKDAFFCLRLHPTSQPLFAFEWRDPEMGISGQLTWTRLPQGFKNSPTLFNEALHRDLADFRIQHPDLILLQYVDDLLLAATSELDCQQGTRALLQTLGNLGYRASAKKAQICQKQVKYLGYLLKEGQRWLTEARKETVMGQPTPKTPRQLREFLGTAGFCRLWIPGFAEMAAPLYPLTKPGTLFNWGPDQQKAYQEIKQALLTAPALGLPDLTKPFELFVDEKQGYAKGVLTQKLGPWRRPVAYLSKKLDPVAAGWPPCLRMVAAIAVLTKDAGKLTMGQPLVILAPHAVEALVKQPPDRWLSNARMTHYQALLLDTDRVQFGPVVALNPATLLPLPEEGLQHNCLDILAEAHGTRPDLTDQPLPDADHTWYTDGSSLLQEGQRKAGAAVTTETEVIWAKALPAGTSAQRAELIALTQALKMAEGKKLNVYTDSRYAFATAHIHGEIYRRRGWLTSEGKEIKNKDEILALLKALFLPKRLSIIHCPGHQKGHSAEARGNRMADQAARKAAITETPDTSTLLAGKRTADGSEFEKRTADGSEFESPKKKAKVE

SEQ ID NO: 2721 - protein, 2096 aa, synthetic construct
MPAAKRVKLDGGDKKYSIGLDIGTNSVGWAVITDEYKVPSKKFKVLGNTDRHSIKKNLIGALLFDSGETAEATRLKRTARRRYTRRKNRICYLQEIFSNEMAKVDDSFFHRLEESFLVEEDKKHERHPIFGNIVDEVAYHEKYPTIYHLRKKLVDSTDKADLRLIYLALAHMIKFRGHFLIEGDLNPDNSDVDKLFIQLVQTYNQLFEENPINASGVDAKAILSARLSKSRRLENLIAQLPGEKKNGLFGNLIALSLGLTPNFKSNFDLAEDAKLQLSKDTYDDDLDNLLAQIGDQYADLFLAAKNLSDAILLSDILRVNTEITKAPLSASMIKRYDEHHQDLTLLKALVRQQLPEKYKEIFFDQSKNGYAGYIDGGASQEEFYKFIKPILEKMDGTEELLVKLNREDLLRKQRTFDNGSIPHQIHLGELHAILRRQEDFYPFLKDNREKIEKILTFRIPYYVGPLARGNSRFAWMTRKSEETITPWNFEEVVDKGASAQSFIERMTNFDKNLPNEKVLPKHSLLYEYFTVYNELTKVKYVTEGMRKPAFLSGEQKKAIVDLLFKTNRKVTVKQLKEDYFKKIECFDSVEISGVEDRFNASLGTYHDLLKIIKDKDFLDNEENEDILEDIVLTLTLFEDREMIEERLKTYAHLFDDKVMKQLKRRRYTGWGRLSRKLINGIRDKQSGKTILDFLKSDGFANRNFMQLIHDDSLTFKEDIQKAQVSGQGDSLHEHIANLAGSPAIKKGILQTVKVVDELVKVMGRHKPENIVIEMARENQTTQKGQKNSRERMKRIEEGIKELGSQILKEHPVENTQLQNEKLYLYYLQNGRDMYVDQELDINRLSDYDVDHIVPQSFLKDDSIDNKVLTRSDKARGKSDNVPSEEVVKKMKNYWRQLLNAKLITQRKFDNLTKAERGGLSELDKAGFIKRQLVETRQITKHVAQILDSRMNTKYDENDKLIREVKVITLKSKLVSDFRKDFQFYKVREINNYHHAHDAYLNAVVGTALIKKYPKLESEFVYGDYKVYDVRKMIAKSEQEIGKATAKYFFYSNIMNFFKTEITLANGEIRKRPLIETNGETGEIVWDKGRDFATVRKVLSMPQVNIVKKTEVQTGGFSKESILPKRNSDKLIARKKDWDPKKYGGFDSPTVAYSVLVVAKVEKGKSKKLKSVKELLGITIMERSSFEKNPIDFLEAKGYKEVKKDLIIKLPKYSLFELENGRKRMLASAGELQKGNELALPSKYVNFLYLASHYEKLKGSPEDNEQKQLFVEQHKHYLDEIIEQISEFSKRVILADANLDKVLSAYNKHRDKPIREQAENIIHLFTLTNLGAPAAFKYFDTTIDRKRYTSTKEVLDATLIHQSITGLYETRIDLSQLGGDGGGGGEAAAKGGSGGTLNIEDEHRLHETSKEPDVSLGSTWLSDFPQAWAETGGMGLAVRQAPLIIPLKATSTPVSIKQYPMSQEARLGIKPHIQRLLDQGILVPCQSPWNTPLLPVKKPGTNDYRPVQDLREVNKRVEDIHPTVPNPYNLLSGLPPSHQWYTVLDLKDAFFCLRLHPTSQPLFAFEWRDPEMGISGQLTWTRLPQGFKNSPTLFNEALHRDLADFRIQHPDLILLQYVDDLLLAATSELDCQQGTRALLQTLGNLGYRASAKKAQICQKQVKYLGYLLKEGQRWLTEARKETVMGQPTPKTPRQLREFLGTAGFCRLWIPGFAEMAAPLYPLTKPGTLFNWGPDQQKAYQEIKQALLTAPALGLPDLTKPFELFVDEKQGYAKGVLTQKLGPWRRPVAYLSKKLDPVAAGWPPCLRMVAAIAVLTKDAGKLTMGQPLVILAPHAVEALVKQPPDRWLSNARMTHYQALLLDTDRVQFGPVVALNPATLLPLPEEGLQHNCLDILAEAHGTRPDLTDQPLPDADHTWYTDGSSLLQEGQRKAGAAVTTETEVIWAKALPAGTSAQRAELIALTQALKMAEGKKLNVYTDSRYAFATAHIHGEIYRRRGWLTSEGKEIKNKDEILALLKALFLPKRLSIIHCPGHQKGHSAEARGNRMADQAARKAAITETPDTSTLLAGKRTADGSEFEKRTADGSEFESPKKKAKVE

SEQ ID NO: 2722 - protein, 2096 aa, synthetic construct
MPAAKRVKLDGGDKKYSIGLDIGTNSVGWAVITDEYKVPSKKFKVLGNTDRHSIKKNLIGALLFDSGETAEATRLKRTARRRYTRRKNRICYLQEIFSNEMAKVDDSFFHRLEESFLVEEDKKHERHPIFGNIVDEVAYHEKYPTIYHLRKKLVDSTDKADLRLIYLALAHMIKFRGHFLIEGDLNPDNSDVDKLFIQLVQTYNQLFEENPINASGVDAKAILSARLSKSRRLENLIAQLPGEKKNGLFGNLIALSLGLTPNFKSNFDLAEDAKLQLSKDTYDDDLDNLLAQIGDQYADLFLAAKNLSDAILLSDILRVNTEITKAPLSASMIKRYDEHHQDLTLLKALVRQQLPEKYKEIFFDQSKNGYAGYIDGGASQEEFYKFIKPILEKMDGTEELLVKLNREDLLRKQRTFDNGSIPHQIHLGELHAILRRQEDFYPFLKDNREKIEKILTFRIPYYVGPLARGNSRFAWMTRKSEETITPWNFEEVVDKGASAQSFIERMTNFDKNLPNEKVLPKHSLLYEYFTVYNELTKVKYVTEGMRKPAFLSGEQKKAIVDLLFKTNRKVTVKQLKEDYFKKIECFDSVEISGVEDRFNASLGTYHDLLKIIKDKDFLDNEENEDILEDIVLTLTLFEDREMIEERLKTYAHLFDDKVMKQLKRRRYTGWGRLSRKLINGIRDKQSGKTILDFLKSDGFANRNFMQLIHDDSLTFKEDIQKAQVSGQGDSLHEHIANLAGSPAIKKGILQTVKVVDELVKVMGRHKPENIVIEMARENQTTQKGQKNSRERMKRIEEGIKELGSQILKEHPVENTQLQNEKLYLYYLQNGRDMYVDQELDINRLSDYDVDHIVPQSFLKDDSIDNKVLTRSDKARGKSDNVPSEEVVKKMKNYWRQLLNAKLITQRKFDNLTKAERGGLSELDKAGFIKRQLVETRQITKHVAQILDSRMNTKYDENDKLIREVKVITLKSKLVSDFRKDFQFYKVREINNYHHAHDAYLNAVVGTALIKKYPKLESEFVYGDYKVYDVRKMIAKSEQEIGKATAKYFFYSNIMNFFKTEITLANGEIRKRPLIETNGETGEIVWDKGRDFATVRKVLSMPQVNIVKKTEVQTGGFSKESILPKRNSDKLIARKKDWDPKKYGGFDSPTVAYSVLVVAKVEKGKSKKLKSVKELLGITIMERSSFEKNPIDFLEAKGYKEVKKDLIIKLPKYSLFELENGRKRMLASAGELQKGNELALPSKYVNFLYLASHYEKLKGSPEDNEQKQLFVEQHKHYLDEIIEQISEFSKRVILADANLDKVLSAYNKHRDKPIREQAENIIHLFTLTNLGAPAAFKYFDTTIDRKRYTSTKEVLDATLIHQSITGLYETRIDLSQLGGDGGGGGGGSEAAAKGGTLNIEDEHRLHETSKEPDVSLGSTWLSDFPQAWAETGGMGLAVRQAPLIIPLKATSTPVSIKQYPMSQEARLGIKPHIQRLLDQGILVPCQSPWNTPLLPVKKPGTNDYRPVQDLREVNKRVEDIHPTVPNPYNLLSGLPPSHQWYTVLDLKDAFFCLRLHPTSQPLFAFEWRDPEMGISGQLTWTRLPQGFKNSPTLFNEALHRDLADFRIQHPDLILLQYVDDLLLAATSELDCQQGTRALLQTLGNLGYRASAKKAQICQKQVKYLGYLLKEGQRWLTEARKETVMGQPTPKTPRQLREFLGTAGFCRLWIPGFAEMAAPLYPLTKPGTLFNWGPDQQKAYQEIKQALLTAPALGLPDLTKPFELFVDEKQGYAKGVLTQKLGPWRRPVAYLSKKLDPVAAGWPPCLRMVAAIAVLTKDAGKLTMGQPLVILAPHAVEALVKQPPDRWLSNARMTHYQALLLDTDRVQFGPVVALNPATLLPLPEEGLQHNCLDILAEAHGTRPDLTDQPLPDADHTWYTDGSSLLQEGQRKAGAAVTTETEVIWAKALPAGTSAQRAELIALTQALKMAEGKKLNVYTDSRYAFATAHIHGEIYRRRGWLTSEGKEIKNKDEILALLKALFLPKRLSIIHCPGHQKGHSAEARGNRMADQAARKAAITETPDTSTLLAGKRTADGSEFEKRTADGSEFESPKKKAKVE

SEQ ID NO: 2723 - protein, 2096 aa, synthetic construct
MPAAKRVKLDGGDKKYSIGLDIGTNSVGWAVITDEYKVPSKKFKVLGNTDRHSIKKNLIGALLFDSGETAEATRLKRTARRRYTRRKNRICYLQEIFSNEMAKVDDSFFHRLEESFLVEEDKKHERHPIFGNIVDEVAYHEKYPTIYHLRKKLVDSTDKADLRLIYLALAHMIKFRGHFLIEGDLNPDNSDVDKLFIQLVQTYNQLFEENPINASGVDAKAILSARLSKSRRLENLIAQLPGEKKNGLFGNLIALSLGLTPNFKSNFDLAEDAKLQLSKDTYDDDLDNLLAQIGDQYADLFLAAKNLSDAILLSDILRVNTEITKAPLSASMIKRYDEHHQDLTLLKALVRQQLPEKYKEIFFDQSKNGYAGYIDGGASQEEFYKFIKPILEKMDGTEELLVKLNREDLLRKQRTFDNGSIPHQIHLGELHAILRRQEDFYPFLKDNREKIEKILTFRIPYYVGPLARGNSRFAWMTRKSEETITPWNFEEVVDKGASAQSFIERMTNFDKNLPNEKVLPKHSLLYEYFTVYNELTKVKYVTEGMRKPAFLSGEQKKAIVDLLFKTNRKVTVKQLKEDYFKKIECFDSVEISGVEDRFNASLGTYHDLLKIIKDKDFLDNEENEDILEDIVLTLTLFEDREMIEERLKTYAHLFDDKVMKQLKRRRYTGWGRLSRKLINGIRDKQSGKTILDFLKSDGFANRNFMQLIHDDSLTFKEDIQKAQVSGQGDSLHEHIANLAGSPAIKKGILQTVKVVDELVKVMGRHKPENIVIEMARENQTTQKGQKNSRERMKRIEEGIKELGSQILKEHPVENTQLQNEKLYLYYLQNGRDMYVDQELDINRLSDYDVDHIVPQSFLKDDSIDNKVLTRSDKARGKSDNVPSEEVVKKMKNYWRQLLNAKLITQRKFDNLTKAERGGLSELDKAGFIKRQLVETRQITKHVAQILDSRMNTKYDENDKLIREVKVITLKSKLVSDFRKDFQFYKVREINNYHHAHDAYLNAVVGTALIKKYPKLESEFVYGDYKVYDVRKMIAKSEQEIGKATAKYFFYSNIMNFFKTEITLANGEIRKRPLIETNGETGEIVWDKGRDFATVRKVLSMPQVNIVKKTEVQTGGFSKESILPKRNSDKLIARKKDWDPKKYGGFDSPTVAYSVLVVAKVEKGKSKKLKSVKELLGITIMERSSFEKNPIDFLEAKGYKEVKKDLIIKLPKYSLFELENGRKRMLASAGELQKGNELALPSKYVNFLYLASHYEKLKGSPEDNEQKQLFVEQHKHYLDEIIEQISEFSKRVILADANLDKVLSAYNKHRDKPIREQAENIIHLFTLTNLGAPAAFKYFDTTIDRKRYTSTKEVLDATLIHQSITGLYETRIDLSQLGGDGGEAAAKGSSPAPGGTLNIEDEHRLHETSKEPDVSLGSTWLSDFPQAWAETGGMGLAVRQAPLIIPLKATSTPVSIKQYPMSQEARLGIKPHIQRLLDQGILVPCQSPWNTPLLPVKKPGTNDYRPVQDLREVNKRVEDIHPTVPNPYNLLSGLPPSHQWYTVLDLKDAFFCLRLHPTSQPLFAFEWRDPEMGISGQLTWTRLPQGFKNSPTLFNEALHRDLADFRIQHPDLILLQYVDDLLLAATSELDCQQGTRALLQTLGNLGYRASAKKAQICQKQVKYLGYLLKEGQRWLTEARKETVMGQPTPKTPRQLREFLGTAGFCRLWIPGFAEMAAPLYPLTKPGTLFNWGPDQQKAYQEIKQALLTAPALGLPDLTKPFELFVDEKQGYAKGVLTQKLGPWRRPVAYLSKKLDPVAAGWPPCLRMVAAIAVLTKDAGKLTMGQPLVILAPHAVEALVKQPPDRWLSNARMTHYQALLLDTDRVQFGPVVALNPATLLPLPEEGLQHNCLDILAEAHGTRPDLTDQPLPDADHTWYTDGSSLLQEGQRKAGAAVTTETEVIWAKALPAGTSAQRAELIALTQALKMAEGKKLNVYTDSRYAFATAHIHGEIYRRRGWLTSEGKEIKNKDEILALLKALFLPKRLSIIHCPGHQKGHSAEARGNRMADQAARKAAITETPDTSTLLAGKRTADGSEFEKRTADGSEFESPKKKAKVE

SEQ ID NO: 2724 - protein, 2093 aa, synthetic construct
MPAAKRVKLDGGDKKYSIGLDIGTNSVGWAVITDEYKVPSKKFKVLGNTDRHSIKKNLIGALLFDSGETAEATRLKRTARRRYTRRKNRICYLQEIFSNEMAKVDDSFFHRLEESFLVEEDKKHERHPIFGNIVDEVAYHEKYPTIYHLRKKLVDSTDKADLRLIYLALAHMIKFRGHFLIEGDLNPDNSDVDKLFIQLVQTYNQLFEENPINASGVDAKAILSARLSKSRRLENLIAQLPGEKKNGLFGNLIALSLGLTPNFKSNFDLAEDAKLQLSKDTYDDDLDNLLAQIGDQYADLFLAAKNLSDAILLSDILRVNTEITKAPLSASMIKRYDEHHQDLTLLKALVRQQLPEKYKEIFFDQSKNGYAGYIDGGASQEEFYKFIKPILEKMDGTEELLVKLNREDLLRKQRTFDNGSIPHQIHLGELHAILRRQEDFYPFLKDNREKIEKILTFRIPYYVGPLARGNSRFAWMTRKSEETITPWNFEEVVDKGASAQSFIERMTNFDKNLPNEKVLPKHSLLYEYFTVYNELTKVKYVTEGMRKPAFLSGEQKKAIVDLLFKTNRKVTVKQLKEDYFKKIECFDSVEISGVEDRFNASLGTYHDLLKIIKDKDFLDNEENEDILEDIVLTLTLFEDREMIEERLKTYAHLFDDKVMKQLKRRRYTGWGRLSRKLINGIRDKQSGKTILDFLKSDGFANRNFMQLIHDDSLTFKEDIQKAQVSGQGDSLHEHIANLAGSPAIKKGILQTVKVVDELVKVMGRHKPENIVIEMARENQTTQKGQKNSRERMKRIEEGIKELGSQILKEHPVENTQLQNEKLYLYYLQNGRDMYVDQELDINRLSDYDVDHIVPQSFLKDDSIDNKVLTRSDKARGKSDNVPSEEVVKKMKNYWRQLLNAKLITQRKFDNLTKAERGGLSELDKAGFIKRQLVETRQITKHVAQILDSRMNTKYDENDKLIREVKVITLKSKLVSDFRKDFQFYKVREINNYHHAHDAYLNAVVGTALIKKYPKLESEFVYGDYKVYDVRKMIAKSEQEIGKATAKYFFYSNIMNFFKTEITLANGEIRKRPLIETNGETGEIVWDKGRDFATVRKVLSMPQVNIVKKTEVQTGGFSKESILPKRNSDKLIARKKDWDPKKYGGFDSPTVAYSVLVVAKVEKGKSKKLKSVKELLGITIMERSSFEKNPIDFLEAKGYKEVKKDLIIKLPKYSLFELENGRKRMLASAGELQKGNELALPSKYVNFLYLASHYEKLKGSPEDNEQKQLFVEQHKHYLDEIIEQISEFSKRVILADANLDKVLSAYNKHRDKPIREQAENIIHLFTLTNLGAPAAFKYFDTTIDRKRYTSTKEVLDATLIHQSITGLYETRIDLSQLGGDGGEAAAKPAPGGTLNIEDEHRLHETSKEPDVSLGSTWLSDFPQAWAETGGMGLAVRQAPLIIPLKATSTPVSIKQYPMSQEARLGIKPHIQRLLDQGILVPCQSPWNTPLLPVKKPGTNDYRPVQDLREVNKRVEDIHPTVPNPYNLLSGLPPSHQWYTVLDLKDAFFCLRLHPTSQPLFAFEWRDPEMGISGQLTWTRLPQGFKNSPTLFNEALHRDLADFRIQHPDLILLQYVDDLLLAATSELDCQQGTRALLQTLGNLGYRASAKKAQICQKQVKYLGYLLKEGQRWLTEARKETVMGQPTPKTPRQLREFLGTAGFCRLWIPGFAEMAAPLYPLTKPGTLFNWGPDQQKAYQEIKQALLTAPALGLPDLTKPFELFVDEKQGYAKGVLTQKLGPWRRPVAYLSKKLDPVAAGWPPCLRMVAAIAVLTKDAGKLTMGQPLVILAPHAVEALVKQPPDRWLSNARMTHYQALLLDTDRVQFGPVVALNPATLLPLPEEGLQHNCLDILAEAHGTRPDLTDQPLPDADHTWYTDGSSLLQEGQRKAGAAVTTETEVIWAKALPAGTSAQRAELIALTQALKMAEGKKLNVYTDSRYAFATAHIHGEIYRRRGWLTSEGKEIKNKDEILALLKALFLPKRLSIIHCPGHQKGHSAEARGNRMADQAARKAAITETPDTSTLLAGKRTADGSEFEKRTADGSEFESPKKKAKVE

SEQ ID NO: 2725 - protein, 2100 aa, synthetic construct
MPAAKRVKLDGGDKKYSIGLDIGTNSVGWAVITDEYKVPSKKFKVLGNTDRHSIKKNLIGALLFDSGETAEATRLKRTARRRYTRRKNRICYLQEIFSNEMAKVDDSFFHRLEESFLVEEDKKHERHPIFGNIVDEVAYHEKYPTIYHLRKKLVDSTDKADLRLIYLALAHMIKFRGHFLIEGDLNPDNSDVDKLFIQLVQTYNQLFEENPINASGVDAKAILSARLSKSRRLENLIAQLPGEKKNGLFGNLIALSLGLTPNFKSNFDLAEDAKLQLSKDTYDDDLDNLLAQIGDQYADLFLAAKNLSDAILLSDILRVNTEITKAPLSASMIKRYDEHHQDLTLLKALVRQQLPEKYKEIFFDQSKNGYAGYIDGGASQEEFYKFIKPILEKMDGTEELLVKLNREDLLRKQRTFDNGSIPHQIHLGELHAILRRQEDFYPFLKDNREKIEKILTFRIPYYVGPLARGNSRFAWMTRKSEETITPWNFEEVVDKGASAQSFIERMTNFDKNLPNEKVLPKHSLLYEYFTVYNELTKVKYVTEGMRKPAFLSGEQKKAIVDLLFKTNRKVTVKQLKEDYFKKIECFDSVEISGVEDRFNASLGTYHDLLKIIKDKDFLDNEENEDILEDIVLTLTLFEDREMIEERLKTYAHLFDDKVMKQLKRRRYTGWGRLSRKLINGIRDKQSGKTILDFLKSDGFANRNFMQLIHDDSLTFKEDIQKAQVSGQGDSLHEHIANLAGSPAIKKGILQTVKVVDELVKVMGRHKPENIVIEMARENQTTQKGQKNSRERMKRIEEGIKELGSQILKEHPVENTQLQNEKLYLYYLQNGRDMYVDQELDINRLSDYDVDHIVPQSFLKDDSIDNKVLTRSDKARGKSDNVPSEEVVKKMKNYWRQLLNAKLITQRKFDNLTKAERGGLSELDKAGFIKRQLVETRQITKHVAQILDSRMNTKYDENDKLIREVKVITLKSKLVSDFRKDFQFYKVREINNYHHAHDAYLNAVVGTALIKKYPKLESEFVYGDYKVYDVRKMIAKSEQEIGKATAKYFFYSNIMNFFKTEITLANGEIRKRPLIETNGETGEIVWDKGRDFATVRKVLSMPQVNIVKKTEVQTGGFSKESILPKRNSDKLIARKKDWDPKKYGGFDSPTVAYSVLVVAKVEKGKSKKLKSVKELLGITIMERSSFEKNPIDFLEAKGYKEVKKDLIIKLPKYSLFELENGRKRMLASAGELQKGNELALPSKYVNFLYLASHYEKLKGSPEDNEQKQLFVEQHKHYLDEIIEQISEFSKRVILADANLDKVLSAYNKHRDKPIREQAENIIHLFTLTNLGAPAAFKYFDTTIDRKRYTSTKEVLDATLIHQSITGLYETRIDLSQLGGDGGGGGGSEAAAKGGGGSGGTLNIEDEHRLHETSKEPDVSLGSTWLSDFPQAWAETGGMGLAVRQAPLIIPLKATSTPVSIKQYPMSQEARLGIKPHIQRLLDQGILVPCQSPWNTPLLPVKKPGTNDYRPVQDLREVNKRVEDIHPTVPNPYNLLSGLPPSHQWYTVLDLKDAFFCLRLHPTSQPLFAFEWRDPEMGISGQLTWTRLPQGFKNSPTLFNEALHRDLADFRIQHPDLILLQYVDDLLLAATSELDCQQGTRALLQTLGNLGYRASAKKAQICQKQVKYLGYLLKEGQRWLTEARKETVMGQPTPKTPRQLREFLGTAGFCRLWIPGFAEMAAPLYPLTKPGTLFNWGPDQQKAYQEIKQALLTAPALGLPDLTKPFELFVDEKQGYAKGVLTQKLGPWRRPVAYLSKKLDPVAAGWPPCLRMVAAIAVLTKDAGKLTMGQPLVILAPHAVEALVKQPPDRWLSNARMTHYQALLLDTDRVQFGPVVALNPATLLPLPEEGLQHNCLDILAEAHGTRPDLTDQPLPDADHTWYTDGSSLLQEGQRKAGAAVTTETEVIWAKALPAGTSAQRAELIALTQALKMAEGKKLNVYTDSRYAFATAHIHGEIYRRRGWLTSEGKEIKNKDEILALLKALFLPKRLSIIHCPGHQKGHSAEARGNRMADQAARKAAITETPDTSTLLAGKRTADGSEFEKRTADGSEFESPKKKAKVE

SEQ ID NO: 2726 - protein, 2093 aa, synthetic construct
MPAAKRVKLDGGDKKYSIGLDIGTNSVGWAVITDEYKVPSKKFKVLGNTDRHSIKKNLIGALLFDSGETAEATRLKRTARRRYTRRKNRICYLQEIFSNEMAKVDDSFFHRLEESFLVEEDKKHERHPIFGNIVDEVAYHEKYPTIYHLRKKLVDSTDKADLRLIYLALAHMIKFRGHFLIEGDLNPDNSDVDKLFIQLVQTYNQLFEENPINASGVDAKAILSARLSKSRRLENLIAQLPGEKKNGLFGNLIALSLGLTPNFKSNFDLAEDAKLQLSKDTYDDDLDNLLAQIGDQYADLFLAAKNLSDAILLSDILRVNTEITKAPLSASMIKRYDEHHQDLTLLKALVRQQLPEKYKEIFFDQSKNGYAGYIDGGASQEEFYKFIKPILEKMDGTEELLVKLNREDLLRKQRTFDNGSIPHQIHLGELHAILRRQEDFYPFLKDNREKIEKILTFRIPYYVGPLARGNSRFAWMTRKSEETITPWNFEEVVDKGASAQSFIERMTNFDKNLPNEKVLPKHSLLYEYFTVYNELTKVKYVTEGMRKPAFLSGEQKKAIVDLLFKTNRKVTVKQLKEDYFKKIECFDSVEISGVEDRFNASLGTYHDLLKIIKDKDFLDNEENEDILEDIVLTLTLFEDREMIEERLKTYAHLFDDKVMKQLKRRRYTGWGRLSRKLINGIRDKQSGKTILDFLKSDGFANRNFMQLIHDDSLTFKEDIQKAQVSGQGDSLHEHIANLAGSPAIKKGILQTVKVVDELVKVMGRHKPENIVIEMARENQTTQKGQKNSRERMKRIEEGIKELGSQILKEHPVENTQLQNEKLYLYYLQNGRDMYVDQELDINRLSDYDVDHIVPQSFLKDDSIDNKVLTRSDKARGKSDNVPSEEVVKKMKNYWRQLLNAKLITQRKFDNLTKAERGGLSELDKAGFIKRQLVETRQITKHVAQILDSRMNTKYDENDKLIREVKVITLKSKLVSDFRKDFQFYKVREINNYHHAHDAYLNAVVGTALIKKYPKLESEFVYGDYKVYDVRKMIAKSEQEIGKATAKYFFYSNIMNFFKTEITLANGEIRKRPLIETNGETGEIVWDKGRDFATVRKVLSMPQVNIVKKTEVQTGGFSKESILPKRNSDKLIARKKDWDPKKYGGFDSPTVAYSVLVVAKVEKGKSKKLKSVKELLGITIMERSSFEKNPIDFLEAKGYKEVKKDLIIKLPKYSLFELENGRKRMLASAGELQKGNELALPSKYVNFLYLASHYEKLKGSPEDNEQKQLFVEQHKHYLDEIIEQISEFSKRVILADANLDKVLSAYNKHRDKPIREQAENIIHLFTLTNLGAPAAFKYFDTTIDRKRYTSTKEVLDATLIHQSITGLYETRIDLSQLGGDGGEAAAKGGSGGTLNIEDEHRLHETSKEPDVSLGSTWLSDFPQAWAETGGMGLAVRQAPLIIPLKATSTPVSIKQYPMSQEARLGIKPHIQRLLDQGILVPCQSPWNTPLLPVKKPGTNDYRPVQDLREVNKRVEDIHPTVPNPYNLLSGLPPSHQWYTVLDLKDAFFCLRLHPTSQPLFAFEWRDPEMGISGQLTWTRLPQGFKNSPTLFNEALHRDLADFRIQHPDLILLQYVDDLLLAATSELDCQQGTRALLQTLGNLGYRASAKKAQICQKQVKYLGYLLKEGQRWLTEARKETVMGQPTPKTPRQLREFLGTAGFCRLWIPGFAEMAAPLYPLTKPGTLFNWGPDQQKAYQEIKQALLTAPALGLPDLTKPFELFVDEKQGYAKGVLTQKLGPWRRPVAYLSKKLDPVAAGWPPCLRMVAAIAVLTKDAGKLTMGQPLVILAPHAVEALVKQPPDRWLSNARMTHYQALLLDTDRVQFGPVVALNPATLLPLPEEGLQHNCLDILAEAHGTRPDLTDQPLPDADHTWYTDGSSLLQEGQRKAGAAVTTETEVIWAKALPAGTSAQRAELIALTQALKMAEGKKLNVYTDSRYAFATAHIHGEIYRRRGWLTSEGKEIKNKDEILALLKALFLPKRLSIIHCPGHQKGHSAEARGNRMADQAARKAAITETPDTSTLLAGKRTADGSEFEKRTADGSEFESPKKKAKVE

SEQ ID NO: 2727 - protein, 2096 aa, synthetic construct
MPAAKRVKLDGGDKKYSIGLDIGTNSVGWAVITDEYKVPSKKFKVLGNTDRHSIKKNLIGALLFDSGETAEATRLKRTARRRYTRRKNRICYLQEIFSNEMAKVDDSFFHRLEESFLVEEDKKHERHPIFGNIVDEVAYHEKYPTIYHLRKKLVDSTDKADLRLIYLALAHMIKFRGHFLIEGDLNPDNSDVDKLFIQLVQTYNQLFEENPINASGVDAKAILSARLSKSRRLENLIAQLPGEKKNGLFGNLIALSLGLTPNFKSNFDLAEDAKLQLSKDTYDDDLDNLLAQIGDQYADLFLAAKNLSDAILLSDILRVNTEITKAPLSASMIKRYDEHHQDLTLLKALVRQQLPEKYKEIFFDQSKNGYAGYIDGGASQEEFYKFIKPILEKMDGTEELLVKLNREDLLRKQRTFDNGSIPHQIHLGELHAILRRQEDFYPFLKDNREKIEKILTFRIPYYVGPLARGNSRFAWMTRKSEETITPWNFEEVVDKGASAQSFIERMTNFDKNLPNEKVLPKHSLLYEYFTVYNELTKVKYVTEGMRKPAFLSGEQKKAIVDLLFKTNRKVTVKQLKEDYFKKIECFDSVEISGVEDRFNASLGTYHDLLKIIKDKDFLDNEENEDILEDIVLTLTLFEDREMIEERLKTYAHLFDDKVMKQLKRRRYTGWGRLSRKLINGIRDKQSGKTILDFLKSDGFANRNFMQLIHDDSLTFKEDIQKAQVSGQGDSLHEHIANLAGSPAIKKGILQTVKVVDELVKVMGRHKPENIVIEMARENQTTQKGQKNSRERMKRIEEGIKELGSQILKEHPVENTQLQNEKLYLYYLQNGRDMYVDQELDINRLSDYDVDHIVPQSFLKDDSIDNKVLTRSDKARGKSDNVPSEEVVKKMKNYWRQLLNAKLITQRKFDNLTKAERGGLSELDKAGFIKRQLVETRQITKHVAQILDSRMNTKYDENDKLIREVKVITLKSKLVSDFRKDFQFYKVREINNYHHAHDAYLNAVVGTALIKKYPKLESEFVYGDYKVYDVRKMIAKSEQEIGKATAKYFFYSNIMNFFKTEITLANGEIRKRPLIETNGETGEIVWDKGRDFATVRKVLSMPQVNIVKKTEVQTGGFSKESILPKRNSDKLIARKKDWDPKKYGGFDSPTVAYSVLVVAKVEKGKSKKLKSVKELLGITIMERSSFEKNPIDFLEAKGYKEVKKDLIIKLPKYSLFELENGRKRMLASAGELQKGNELALPSKYVNFLYLASHYEKLKGSPEDNEQKQLFVEQHKHYLDEIIEQISEFSKRVILADANLDKVLSAYNKHRDKPIREQAENIIHLFTLTNLGAPAAFKYFDTTIDRKRYTSTKEVLDATLIHQSITGLYETRIDLSQLGGDGGEAAAKGGSGSSGGTLNIEDEHRLHETSKEPDVSLGSTWLSDFPQAWAETGGMGLAVRQAPLIIPLKATSTPVSIKQYPMSQEARLGIKPHIQRLLDQGILVPCQSPWNTPLLPVKKPGTNDYRPVQDLREVNKRVEDIHPTVPNPYNLLSGLPPSHQWYTVLDLKDAFFCLRLHPTSQPLFAFEWRDPEMGISGQLTWTRLPQGFKNSPTLFNEALHRDLADFRIQHPDLILLQYVDDLLLAATSELDCQQGTRALLQTLGNLGYRASAKKAQICQKQVKYLGYLLKEGQRWLTEARKETVMGQPTPKTPRQLREFLGTAGFCRLWIPGFAEMAAPLYPLTKPGTLFNWGPDQQKAYQEIKQALLTAPALGLPDLTKPFELFVDEKQGYAKGVLTQKLGPWRRPVAYLSKKLDPVAAGWPPCLRMVAAIAVLTKDAGKLTMGQPLVILAPHAVEALVKQPPDRWLSNARMTHYQALLLDTDRVQFGPVVALNPATLLPLPEEGLQHNCLDILAEAHGTRPDLTDQPLPDADHTWYTDGSSLLQEGQRKAGAAVTTETEVIWAKALPAGTSAQRAELIALTQALKMAEGKKLNVYTDSRYAFATAHIHGEIYRRRGWLTSEGKEIKNKDEILALLKALFLPKRLSIIHCPGHQKGHSAEARGNRMADQAARKAAITETPDTSTLLAGKRTADGSEFEKRTADGSEFESPKKKAKVE

SEQ ID NO: 2728 - protein, 2097 aa, synthetic construct
MPAAKRVKLDGGDKKYSIGLDIGTNSVGWAVITDEYKVPSKKFKVLGNTDRHSIKKNLIGALLFDSGETAEATRLKRTARRRYTRRKNRICYLQEIFSNEMAKVDDSFFHRLEESFLVEEDKKHERHPIFGNIVDEVAYHEKYPTIYHLRKKLVDSTDKADLRLIYLALAHMIKFRGHFLIEGDLNPDNSDVDKLFIQLVQTYNQLFEENPINASGVDAKAILSARLSKSRRLENLIAQLPGEKKNGLFGNLIALSLGLTPNFKSNFDLAEDAKLQLSKDTYDDDLDNLLAQIGDQYADLFLAAKNLSDAILLSDILRVNTEITKAPLSASMIKRYDEHHQDLTLLKALVRQQLPEKYKEIFFDQSKNGYAGYIDGGASQEEFYKFIKPILEKMDGTEELLVKLNREDLLRKQRTFDNGSIPHQIHLGELHAILRRQEDFYPFLKDNREKIEKILTFRIPYYVGPLARGNSRFAWMTRKSEETITPWNFEEVVDKGASAQSFIERMTNFDKNLPNEKVLPKHSLLYEYFTVYNELTKVKYVTEGMRKPAFLSGEQKKAIVDLLFKTNRKVTVKQLKEDYFKKIECFDSVEISGVEDRFNASLGTYHDLLKIIKDKDFLDNEENEDILEDIVLTLTLFEDREMIEERLKTYAHLFDDKVMKQLKRRRYTGWGRLSRKLINGIRDKQSGKTILDFLKSDGFANRNFMQLIHDDSLTFKEDIQKAQVSGQGDSLHEHIANLAGSPAIKKGILQTVKVVDELVKVMGRHKPENIVIEMARENQTTQKGQKNSRERMKRIEEGIKELGSQILKEHPVENTQLQNEKLYLYYLQNGRDMYVDQELDINRLSDYDVDHIVPQSFLKDDSIDNKVLTRSDKARGKSDNVPSEEVVKKMKNYWRQLLNAKLITQRKFDNLTKAERGGLSELDKAGFIKRQLVETRQITKHVAQILDSRMNTKYDENDKLIREVKVITLKSKLVSDFRKDFQFYKVREINNYHHAHDAYLNAVVGTALIKKYPKLESEFVYGDYKVYDVRKMIAKSEQEIGKATAKYFFYSNIMNFFKTEITLANGEIRKRPLIETNGETGEIVWDKGRDFATVRKVLSMPQVNIVKKTEVQTGGFSKESILPKRNSDKLIARKKDWDPKKYGGFDSPTVAYSVLVVAKVEKGKSKKLKSVKELLGITIMERSSFEKNPIDFLEAKGYKEVKKDLIIKLPKYSLFELENGRKRMLASAGELQKGNELALPSKYVNFLYLASHYEKLKGSPEDNEQKQLFVEQHKHYLDEIIEQISEFSKRVILADANLDKVLSAYNKHRDKPIREQAENIIHLFTLTNLGAPAAFKYFDTTIDRKRYTSTKEVLDATLIHQSITGLYETRIDLSQLGGDGGGSSGSSGSSGSSGGTLNIEDEHRLHETSKEPDVSLGSTWLSDFPQAWAETGGMGLAVRQAPLIIPLKATSTPVSIKQYPMSQEARLGIKPHIQRLLDQGILVPCQSPWNTPLLPVKKPGTNDYRPVQDLREVNKRVEDIHPTVPNPYNLLSGLPPSHQWYTVLDLKDAFFCLRLHPTSQPLFAFEWRDPEMGISGQLTWTRLPQGFKNSPTLFNEALHRDLADFRIQHPDLILLQYVDDLLLAATSELDCQQGTRALLQTLGNLGYRASAKKAQICQKQVKYLGYLLKEGQRWLTEARKETVMGQPTPKTPRQLREFLGTAGFCRLWIPGFAEMAAPLYPLTKPGTLFNWGPDQQKAYQEIKQALLTAPALGLPDLTKPFELFVDEKQGYAKGVLTQKLGPWRRPVAYLSKKLDPVAAGWPPCLRMVAAIAVLTKDAGKLTMGQPLVILAPHAVEALVKQPPDRWLSNARMTHYQALLLDTDRVQFGPVVALNPATLLPLPEEGLQHNCLDILAEAHGTRPDLTDQPLPDADHTWYTDGSSLLQEGQRKAGAAVTTETEVIWAKALPAGTSAQRAELIALTQALKMAEGKKLNVYTDSRYAFATAHIHGEIYRRRGWLTSEGKEIKNKDEILALLKALFLPKRLSIIHCPGHQKGHSAEARGNRMADQAARKAAITETPDTSTLLAGKRTADGSEFEKRTADGSEFESPKKKAKVE

SEQ ID NO: 2729 - protein, 2095 aa, synthetic construct
MPAAKRVKLDGGDKKYSIGLDIGTNSVGWAVITDEYKVPSKKFKVLGNTDRHSIKKNLIGALLFDSGETAEATRLKRTARRRYTRRKNRICYLQEIFSNEMAKVDDSFFHRLEESFLVEEDKKHERHPIFGNIVDEVAYHEKYPTIYHLRKKLVDSTDKADLRLIYLALAHMIKFRGHFLIEGDLNPDNSDVDKLFIQLVQTYNQLFEENPINASGVDAKAILSARLSKSRRLENLIAQLPGEKKNGLFGNLIALSLGLTPNFKSNFDLAEDAKLQLSKDTYDDDLDNLLAQIGDQYADLFLAAKNLSDAILLSDILRVNTEITKAPLSASMIKRYDEHHQDLTLLKALVRQQLPEKYKEIFFDQSKNGYAGYIDGGASQEEFYKFIKPILEKMDGTEELLVKLNREDLLRKQRTFDNGSIPHQIHLGELHAILRRQEDFYPFLKDNREKIEKILTFRIPYYVGPLARGNSRFAWMTRKSEETITPWNFEEVVDKGASAQSFIERMTNFDKNLPNEKVLPKHSLLYEYFTVYNELTKVKYVTEGMRKPAFLSGEQKKAIVDLLFKTNRKVTVKQLKEDYFKKIECFDSVEISGVEDRFNASLGTYHDLLKIIKDKDFLDNEENEDILEDIVLTLTLFEDREMIEERLKTYAHLFDDKVMKQLKRRRYTGWGRLSRKLINGIRDKQSGKTILDFLKSDGFANRNFMQLIHDDSLTFKEDIQKAQVSGQGDSLHEHIANLAGSPAIKKGILQTVKVVDELVKVMGRHKPENIVIEMARENQTTQKGQKNSRERMKRIEEGIKELGSQILKEHPVENTQLQNEKLYLYYLQNGRDMYVDQELDINRLSDYDVDHIVPQSFLKDDSIDNKVLTRSDKARGKSDNVPSEEVVKKMKNYWRQLLNAKLITQRKFDNLTKAERGGLSELDKAGFIKRQLVETRQITKHVAQILDSRMNTKYDENDKLIREVKVITLKSKLVSDFRKDFQFYKVREINNYHHAHDAYLNAVVGTALIKKYPKLESEFVYGDYKVYDVRKMIAKSEQEIGKATAKYFFYSNIMNFFKTEITLANGEIRKRPLIETNGETGEIVWDKGRDFATVRKVLSMPQVNIVKKTEVQTGGFSKESILPKRNSDKLIARKKDWDPKKYGGFDSPTVAYSVLVVAKVEKGKSKKLKSVKELLGITIMERSSFEKNPIDFLEAKGYKEVKKDLIIKLPKYSLFELENGRKRMLASAGELQKGNELALPSKYVNFLYLASHYEKLKGSPEDNEQKQLFVEQHKHYLDEIIEQISEFSKRVILADANLDKVLSAYNKHRDKPIREQAENIIHLFTLTNLGAPAAFKYFDTTIDRKRYTSTKEVLDATLIHQSITGLYETRIDLSQLGGDGGEAAAKEAAAKGGTLNIEDEHRLHETSKEPDVSLGSTWLSDFPQAWAETGGMGLAVRQAPLIIPLKATSTPVSIKQYPMSQEARLGIKPHIQRLLDQGILVPCQSPWNTPLLPVKKPGTNDYRPVQDLREVNKRVEDIHPTVPNPYNLLSGLPPSHQWYTVLDLKDAFFCLRLHPTSQPLFAFEWRDPEMGISGQLTWTRLPQGFKNSPTLFNEALHRDLADFRIQHPDLILLQYVDDLLLAATSELDCQQGTRALLQTLGNLGYRASAKKAQICQKQVKYLGYLLKEGQRWLTEARKETVMGQPTPKTPRQLREFLGTAGFCRLWIPGFAEMAAPLYPLTKPGTLFNWGPDQQKAYQEIKQALLTAPALGLPDLTKPFELFVDEKQGYAKGVLTQKLGPWRRPVAYLSKKLDPVAAGWPPCLRMVAAIAVLTKDAGKLTMGQPLVILAPHAVEALVKQPPDRWLSNARMTHYQALLLDTDRVQFGPVVALNPATLLPLPEEGLQHNCLDILAEAHGTRPDLTDQPLPDADHTWYTDGSSLLQEGQRKAGAAVTTETEVIWAKALPAGTSAQRAELIALTQALKMAEGKKLNVYTDSRYAFATAHIHGEIYRRRGWLTSEGKEIKNKDEILALLKALFLPKRLSIIHCPGHQKGHSAEARGNRMADQAARKAAITETPDTSTLLAGKRTADGSEFEKRTADGSEFESPKKKAKVE

SEQ ID NO: 2730 - protein, 2090 aa, synthetic construct
MPAAKRVKLDGGDKKYSIGLDIGTNSVGWAVITDEYKVPSKKFKVLGNTDRHSIKKNLIGALLFDSGETAEATRLKRTARRRYTRRKNRICYLQEIFSNEMAKVDDSFFHRLEESFLVEEDKKHERHPIFGNIVDEVAYHEKYPTIYHLRKKLVDSTDKADLRLIYLALAHMIKFRGHFLIEGDLNPDNSDVDKLFIQLVQTYNQLFEENPINASGVDAKAILSARLSKSRRLENLIAQLPGEKKNGLFGNLIALSLGLTPNFKSNFDLAEDAKLQLSKDTYDDDLDNLLAQIGDQYADLFLAAKNLSDAILLSDILRVNTEITKAPLSASMIKRYDEHHQDLTLLKALVRQQLPEKYKEIFFDQSKNGYAGYIDGGASQEEFYKFIKPILEKMDGTEELLVKLNREDLLRKQRTFDNGSIPHQIHLGELHAILRRQEDFYPFLKDNREKIEKILTFRIPYYVGPLARGNSRFAWMTRKSEETITPWNFEEVVDKGASAQSFIERMTNFDKNLPNEKVLPKHSLLYEYFTVYNELTKVKYVTEGMRKPAFLSGEQKKAIVDLLFKTNRKVTVKQLKEDYFKKIECFDSVEISGVEDRFNASLGTYHDLLKIIKDKDFLDNEENEDILEDIVLTLTLFEDREMIEERLKTYAHLFDDKVMKQLKRRRYTGWGRLSRKLINGIRDKQSGKTILDFLKSDGFANRNFMQLIHDDSLTFKEDIQKAQVSGQGDSLHEHIANLAGSPAIKKGILQTVKVVDELVKVMGRHKPENIVIEMARENQTTQKGQKNSRERMKRIEEGIKELGSQILKEHPVENTQLQNEKLYLYYLQNGRDMYVDQELDINRLSDYDVDHIVPQSFLKDDSIDNKVLTRSDKARGKSDNVPSEEVVKKMKNYWRQLLNAKLITQRKFDNLTKAERGGLSELDKAGFIKRQLVETRQITKHVAQILDSRMNTKYDENDKLIREVKVITLKSKLVSDFRKDFQFYKVREINNYHHAHDAYLNAVVGTALIKKYPKLESEFVYGDYKVYDVRKMIAKSEQEIGKATAKYFFYSNIMNFFKTEITLANGEIRKRPLIETNGETGEIVWDKGRDFATVRKVLSMPQVNIVKKTEVQTGGFSKESILPKRNSDKLIARKKDWDPKKYGGFDSPTVAYSVLVVAKVEKGKSKKLKSVKELLGITIMERSSFEKNPIDFLEAKGYKEVKKDLIIKLPKYSLFELENGRKRMLASAGELQKGNELALPSKYVNFLYLASHYEKLKGSPEDNEQKQLFVEQHKHYLDEIIEQISEFSKRVILADANLDKVLSAYNKHRDKPIREQAENIIHLFTLTNLGAPAAFKYFDTTIDRKRYTSTKEVLDATLIHQSITGLYETRIDLSQLGGDGGEAAAKGGTLNIEDEHRLHETSKEPDVSLGSTWLSDFPQAWAETGGMGLAVRQAPLIIPLKATSTPVSIKQYPMSQEARLGIKPHIQRLLDQGILVPCQSPWNTPLLPVKKPGTNDYRPVQDLREVNKRVEDIHPTVPNPYNLLSGLPPSHQWYTVLDLKDAFFCLRLHPTSQPLFAFEWRDPEMGISGQLTWTRLPQGFKNSPTLFNEALHRDLADFRIQHPDLILLQYVDDLLLAATSELDCQQGTRALLQTLGNLGYRASAKKAQICQKQVKYLGYLLKEGQRWLTEARKETVMGQPTPKTPRQLREFLGTAGFCRLWIPGFAEMAAPLYPLTKPGTLFNWGPDQQKAYQEIKQALLTAPALGLPDLTKPFELFVDEKQGYAKGVLTQKLGPWRRPVAYLSKKLDPVAAGWPPCLRMVAAIAVLTKDAGKLTMGQPLVILAPHAVEALVKQPPDRWLSNARMTHYQALLLDTDRVQFGPVVALNPATLLPLPEEGLQHNCLDILAEAHGTRPDLTDQPLPDADHTWYTDGSSLLQEGQRKAGAAVTTETEVIWAKALPAGTSAQRAELIALTQALKMAEGKKLNVYTDSRYAFATAHIHGEIYRRRGWLTSEGKEIKNKDEILALLKALFLPKRLSIIHCPGHQKGHSAEARGNRMADQAARKAAITETPDTSTLLAGKRTADGSEFEKRTADGSEFESPKKKAKVE

SEQ ID NO: 2731 - protein, 2094 aa, synthetic construct
MPAAKRVKLDGGDKKYSIGLDIGTNSVGWAVITDEYKVPSKKFKVLGNTDRHSIKKNLIGALLFDSGETAEATRLKRTARRRYTRRKNRICYLQEIFSNEMAKVDDSFFHRLEESFLVEEDKKHERHPIFGNIVDEVAYHEKYPTIYHLRKKLVDSTDKADLRLIYLALAHMIKFRGHFLIEGDLNPDNSDVDKLFIQLVQTYNQLFEENPINASGVDAKAILSARLSKSRRLENLIAQLPGEKKNGLFGNLIALSLGLTPNFKSNFDLAEDAKLQLSKDTYDDDLDNLLAQIGDQYADLFLAAKNLSDAILLSDILRVNTEITKAPLSASMIKRYDEHHQDLTLLKALVRQQLPEKYKEIFFDQSKNGYAGYIDGGASQEEFYKFIKPILEKMDGTEELLVKLNREDLLRKQRTFDNGSIPHQIHLGELHAILRRQEDFYPFLKDNREKIEKILTFRIPYYVGPLARGNSRFAWMTRKSEETITPWNFEEVVDKGASAQSFIERMTNFDKNLPNEKVLPKHSLLYEYFTVYNELTKVKYVTEGMRKPAFLSGEQKKAIVDLLFKTNRKVTVKQLKEDYFKKIECFDSVEISGVEDRFNASLGTYHDLLKIIKDKDFLDNEENEDILEDIVLTLTLFEDREMIEERLKTYAHLFDDKVMKQLKRRRYTGWGRLSRKLINGIRDKQSGKTILDFLKSDGFANRNFMQLIHDDSLTFKEDIQKAQVSGQGDSLHEHIANLAGSPAIKKGILQTVKVVDELVKVMGRHKPENIVIEMARENQTTQKGQKNSRERMKRIEEGIKELGSQILKEHPVENTQLQNEKLYLYYLQNGRDMYVDQELDINRLSDYDVDHIVPQSFLKDDSIDNKVLTRSDKARGKSDNVPSEEVVKKMKNYWRQLLNAKLITQRKFDNLTKAERGGLSELDKAGFIKRQLVETRQITKHVAQILDSRMNTKYDENDKLIREVKVITLKSKLVSDFRKDFQFYKVREINNYHHAHDAYLNAVVGTALIKKYPKLESEFVYGDYKVYDVRKMIAKSEQEIGKATAKYFFYSNIMNFFKTEITLANGEIRKRPLIETNGETGEIVWDKGRDFATVRKVLSMPQVNIVKKTEVQTGGFSKESILPKRNSDKLIARKKDWDPKKYGGFDSPTVAYSVLVVAKVEKGKSKKLKSVKELLGITIMERSSFEKNPIDFLEAKGYKEVKKDLIIKLPKYSLFELENGRKRMLASAGELQKGNELALPSKYVNFLYLASHYEKLKGSPEDNEQKQLFVEQHKHYLDEIIEQISEFSKRVILADANLDKVLSAYNKHRDKPIREQAENIIHLFTLTNLGAPAAFKYFDTTIDRKRYTSTKEVLDATLIHQSITGLYETRIDLSQLGGDGGPAPAPAPAPGGTLNIEDEHRLHETSKEPDVSLGSTWLSDFPQAWAETGGMGLAVRQAPLIIPLKATSTPVSIKQYPMSQEARLGIKPHIQRLLDQGILVPCQSPWNTPLLPVKKPGTNDYRPVQDLREVNKRVEDIHPTVPNPYNLLSGLPPSHQWYTVLDLKDAFFCLRLHPTSQPLFAFEWRDPEMGISGQLTWTRLPQGFKNSPTLFNEALHRDLADFRIQHPDLILLQYVDDLLLAATSELDCQQGTRALLQTLGNLGYRASAKKAQICQKQVKYLGYLLKEGQRWLTEARKETVMGQPTPKTPRQLREFLGTAGFCRLWIPGFAEMAAPLYPLTKPGTLFNWGPDQQKAYQEIKQALLTAPALGLPDLTKPFELFVDEKQGYAKGVLTQKLGPWRRPVAYLSKKLDPVAAGWPPCLRMVAAIAVLTKDAGKLTMGQPLVILAPHAVEALVKQPPDRWLSNARMTHYQALLLDTDRVQFGPVVALNPATLLPLPEEGLQHNCLDILAEAHGTRPDLTDQPLPDADHTWYTDGSSLLQEGQRKAGAAVTTETEVIWAKALPAGTSAQRAELIALTQALKMAEGKKLNVYTDSRYAFATAHIHGEIYRRRGWLTSEGKEIKNKDEILALLKALFLPKRLSIIHCPGHQKGHSAEARGNRMADQAARKAAITETPDTSTLLAGKRTADGSEFEKRTADGSEFESPKKKAKVE

SEQ ID NO: 2732 - protein, 2096 aa, synthetic construct
MPAAKRVKLDGGDKKYSIGLDIGTNSVGWAVITDEYKVPSKKFKVLGNTDRHSIKKNLIGALLFDSGETAEATRLKRTARRRYTRRKNRICYLQEIFSNEMAKVDDSFFHRLEESFLVEEDKKHERHPIFGNIVDEVAYHEKYPTIYHLRKKLVDSTDKADLRLIYLALAHMIKFRGHFLIEGDLNPDNSDVDKLFIQLVQTYNQLFEENPINASGVDAKAILSARLSKSRRLENLIAQLPGEKKNGLFGNLIALSLGLTPNFKSNFDLAEDAKLQLSKDTYDDDLDNLLAQIGDQYADLFLAAKNLSDAILLSDILRVNTEITKAPLSASMIKRYDEHHQDLTLLKALVRQQLPEKYKEIFFDQSKNGYAGYIDGGASQEEFYKFIKPILEKMDGTEELLVKLNREDLLRKQRTFDNGSIPHQIHLGELHAILRRQEDFYPFLKDNREKIEKILTFRIPYYVGPLARGNSRFAWMTRKSEETITPWNFEEVVDKGASAQSFIERMTNFDKNLPNEKVLPKHSLLYEYFTVYNELTKVKYVTEGMRKPAFLSGEQKKAIVDLLFKTNRKVTVKQLKEDYFKKIECFDSVEISGVEDRFNASLGTYHDLLKIIKDKDFLDNEENEDILEDIVLTLTLFEDREMIEERLKTYAHLFDDKVMKQLKRRRYTGWGRLSRKLINGIRDKQSGKTILDFLKSDGFANRNFMQLIHDDSLTFKEDIQKAQVSGQGDSLHEHIANLAGSPAIKKGILQTVKVVDELVKVMGRHKPENIVIEMARENQTTQKGQKNSRERMKRIEEGIKELGSQILKEHPVENTQLQNEKLYLYYLQNGRDMYVDQELDINRLSDYDVDHIVPQSFLKDDSIDNKVLTRSDKARGKSDNVPSEEVVKKMKNYWRQLLNAKLITQRKFDNLTKAERGGLSELDKAGFIKRQLVETRQITKHVAQILDSRMNTKYDENDKLIREVKVITLKSKLVSDFRKDFQFYKVREINNYHHAHDAYLNAVVGTALIKKYPKLESEFVYGDYKVYDVRKMIAKSEQEIGKATAKYFFYSNIMNFFKTEITLANGEIRKRPLIETNGETGEIVWDKGRDFATVRKVLSMPQVNIVKKTEVQTGGFSKESILPKRNSDKLIARKKDWDPKKYGGFDSPTVAYSVLVVAKVEKGKSKKLKSVKELLGITIMERSSFEKNPIDFLEAKGYKEVKKDLIIKLPKYSLFELENGRKRMLASAGELQKGNELALPSKYVNFLYLASHYEKLKGSPEDNEQKQLFVEQHKHYLDEIIEQISEFSKRVILADANLDKVLSAYNKHRDKPIREQAENIIHLFTLTNLGAPAAFKYFDTTIDRKRYTSTKEVLDATLIHQSITGLYETRIDLSQLGGDGGGSSEAAAKGGGGGTLNIEDEHRLHETSKEPDVSLGSTWLSDFPQAWAETGGMGLAVRQAPLIIPLKATSTPVSIKQYPMSQEARLGIKPHIQRLLDQGILVPCQSPWNTPLLPVKKPGTNDYRPVQDLREVNKRVEDIHPTVPNPYNLLSGLPPSHQWYTVLDLKDAFFCLRLHPTSQPLFAFEWRDPEMGISGQLTWTRLPQGFKNSPTLFNEALHRDLADFRIQHPDLILLQYVDDLLLAATSELDCQQGTRALLQTLGNLGYRASAKKAQICQKQVKYLGYLLKEGQRWLTEARKETVMGQPTPKTPRQLREFLGTAGFCRLWIPGFAEMAAPLYPLTKPGTLFNWGPDQQKAYQEIKQALLTAPALGLPDLTKPFELFVDEKQGYAKGVLTQKLGPWRRPVAYLSKKLDPVAAGWPPCLRMVAAIAVLTKDAGKLTMGQPLVILAPHAVEALVKQPPDRWLSNARMTHYQALLLDTDRVQFGPVVALNPATLLPLPEEGLQHNCLDILAEAHGTRPDLTDQPLPDADHTWYTDGSSLLQEGQRKAGAAVTTETEVIWAKALPAGTSAQRAELIALTQALKMAEGKKLNVYTDSRYAFATAHIHGEIYRRRGWLTSEGKEIKNKDEILALLKALFLPKRLSIIHCPGHQKGHSAEARGNRMADQAARKAAITETPDTSTLLAGKRTADGSEFEKRTADGSEFESPKKKAKVE

SEQ ID NO: 2733 - protein, 2091 aa, synthetic construct
MPAAKRVKLDGGDKKYSIGLDIGTNSVGWAVITDEYKVPSKKFKVLGNTDRHSIKKNLIGALLFDSGETAEATRLKRTARRRYTRRKNRICYLQEIFSNEMAKVDDSFFHRLEESFLVEEDKKHERHPIFGNIVDEVAYHEKYPTIYHLRKKLVDSTDKADLRLIYLALAHMIKFRGHFLIEGDLNPDNSDVDKLFIQLVQTYNQLFEENPINASGVDAKAILSARLSKSRRLENLIAQLPGEKKNGLFGNLIALSLGLTPNFKSNFDLAEDAKLQLSKDTYDDDLDNLLAQIGDQYADLFLAAKNLSDAILLSDILRVNTEITKAPLSASMIKRYDEHHQDLTLLKALVRQQLPEKYKEIFFDQSKNGYAGYIDGGASQEEFYKFIKPILEKMDGTEELLVKLNREDLLRKQRTFDNGSIPHQIHLGELHAILRRQEDFYPFLKDNREKIEKILTFRIPYYVGPLARGNSRFAWMTRKSEETITPWNFEEVVDKGASAQSFIERMTNFDKNLPNEKVLPKHSLLYEYFTVYNELTKVKYVTEGMRKPAFLSGEQKKAIVDLLFKTNRKVTVKQLKEDYFKKIECFDSVEISGVEDRFNASLGTYHDLLKIIKDKDFLDNEENEDILEDIVLTLTLFEDREMIEERLKTYAHLFDDKVMKQLKRRRYTGWGRLSRKLINGIRDKQSGKTILDFLKSDGFANRNFMQLIHDDSLTFKEDIQKAQVSGQGDSLHEHIANLAGSPAIKKGILQTVKVVDELVKVMGRHKPENIVIEMARENQTTQKGQKNSRERMKRIEEGIKELGSQILKEHPVENTQLQNEKLYLYYLQNGRDMYVDQELDINRLSDYDVDHIVPQSFLKDDSIDNKVLTRSDKARGKSDNVPSEEVVKKMKNYWRQLLNAKLITQRKFDNLTKAERGGLSELDKAGFIKRQLVETRQITKHVAQILDSRMNTKYDENDKLIREVKVITLKSKLVSDFRKDFQFYKVREINNYHHAHDAYLNAVVGTALIKKYPKLESEFVYGDYKVYDVRKMIAKSEQEIGKATAKYFFYSNIMNFFKTEITLANGEIRKRPLIETNGETGEIVWDKGRDFATVRKVLSMPQVNIVKKTEVQTGGFSKESILPKRNSDKLIARKKDWDPKKYGGFDSPTVAYSVLVVAKVEKGKSKKLKSVKELLGITIMERSSFEKNPIDFLEAKGYKEVKKDLIIKLPKYSLFELENGRKRMLASAGELQKGNELALPSKYVNFLYLASHYEKLKGSPEDNEQKQLFVEQHKHYLDEIIEQISEFSKRVILADANLDKVLSAYNKHRDKPIREQAENIIHLFTLTNLGAPAAFKYFDTTIDRKRYTSTKEVLDATLIHQSITGLYETRIDLSQLGGDGGPAPGGSGGTLNIEDEHRLHETSKEPDVSLGSTWLSDFPQAWAETGGMGLAVRQAPLIIPLKATSTPVSIKQYPMSQEARLGIKPHIQRLLDQGILVPCQSPWNTPLLPVKKPGTNDYRPVQDLREVNKRVEDIHPTVPNPYNLLSGLPPSHQWYTVLDLKDAFFCLRLHPTSQPLFAFEWRDPEMGISGQLTWTRLPQGFKNSPTLFNEALHRDLADFRIQHPDLILLQYVDDLLLAATSELDCQQGTRALLQTLGNLGYRASAKKAQICQKQVKYLGYLLKEGQRWLTEARKETVMGQPTPKTPRQLREFLGTAGFCRLWIPGFAEMAAPLYPLTKPGTLFNWGPDQQKAYQEIKQALLTAPALGLPDLTKPFELFVDEKQGYAKGVLTQKLGPWRRPVAYLSKKLDPVAAGWPPCLRMVAAIAVLTKDAGKLTMGQPLVILAPHAVEALVKQPPDRWLSNARMTHYQALLLDTDRVQFGPVVALNPATLLPLPEEGLQHNCLDILAEAHGTRPDLTDQPLPDADHTWYTDGSSLLQEGQRKAGAAVTTETEVIWAKALPAGTSAQRAELIALTQALKMAEGKKLNVYTDSRYAFATAHIHGEIYRRRGWLTSEGKEIKNKDEILALLKALFLPKRLSIIHCPGHQKGHSAEARGNRMADQAARKAAITETPDTSTLLAGKRTADGSEFEKRTADGSEFESPKKKAKVE

SEQ ID NO: 2734 - protein, 2118 aa, synthetic construct
MPAAKRVKLDGGDKKYSIGLDIGTNSVGWAVITDEYKVPSKKFKVLGNTDRHSIKKNLIGALLFDSGETAEATRLKRTARRRYTRRKNRICYLQEIFSNEMAKVDDSFFHRLEESFLVEEDKKHERHPIFGNIVDEVAYHEKYPTIYHLRKKLVDSTDKADLRLIYLALAHMIKFRGHFLIEGDLNPDNSDVDKLFIQLVQTYNQLFEENPINASGVDAKAILSARLSKSRRLENLIAQLPGEKKNGLFGNLIALSLGLTPNFKSNFDLAEDAKLQLSKDTYDDDLDNLLAQIGDQYADLFLAAKNLSDAILLSDILRVNTEITKAPLSASMIKRYDEHHQDLTLLKALVRQQLPEKYKEIFFDQSKNGYAGYIDGGASQEEFYKFIKPILEKMDGTEELLVKLNREDLLRKQRTFDNGSIPHQIHLGELHAILRRQEDFYPFLKDNREKIEKILTFRIPYYVGPLARGNSRFAWMTRKSEETITPWNFEEVVDKGASAQSFIERMTNFDKNLPNEKVLPKHSLLYEYFTVYNELTKVKYVTEGMRKPAFLSGEQKKAIVDLLFKTNRKVTVKQLKEDYFKKIECFDSVEISGVEDRFNASLGTYHDLLKIIKDKDFLDNEENEDILEDIVLTLTLFEDREMIEERLKTYAHLFDDKVMKQLKRRRYTGWGRLSRKLINGIRDKQSGKTILDFLKSDGFANRNFMQLIHDDSLTFKEDIQKAQVSGQGDSLHEHIANLAGSPAIKKGILQTVKVVDELVKVMGRHKPENIVIEMARENQTTQKGQKNSRERMKRIEEGIKELGSQILKEHPVENTQLQNEKLYLYYLQNGRDMYVDQELDINRLSDYDVDHIVPQSFLKDDSIDNKVLTRSDKARGKSDNVPSEEVVKKMKNYWRQLLNAKLITQRKFDNLTKAERGGLSELDKAGFIKRQLVETRQITKHVAQILDSRMNTKYDENDKLIREVKVITLKSKLVSDFRKDFQFYKVREINNYHHAHDAYLNAVVGTALIKKYPKLESEFVYGDYKVYDVRKMIAKSEQEIGKATAKYFFYSNIMNFFKTEITLANGEIRKRPLIETNGETGEIVWDKGRDFATVRKVLSMPQVNIVKKTEVQTGGFSKESILPKRNSDKLIARKKDWDPKKYGGFDSPTVAYSVLVVAKVEKGKSKKLKSVKELLGITIMERSSFEKNPIDFLEAKGYKEVKKDLIIKLPKYSLFELENGRKRMLASAGELQKGNELALPSKYVNFLYLASHYEKLKGSPEDNEQKQLFVEQHKHYLDEIIEQISEFSKRVILADANLDKVLSAYNKHRDKPIREQAENIIHLFTLTNLGAPAAFKYFDTTIDRKRYTSTKEVLDATLIHQSITGLYETRIDLSQLGGDGGSGGSSGGSSGSETPGTSESATPESSGGSSGGSSGGTLNIEDEHRLHETSKEPDVSLGSTWLSDFPQAWAETGGMGLAVRQAPLIIPLKATSTPVSIKQYPMSQEARLGIKPHIQRLLDQGILVPCQSPWNTPLLPVKKPGTNDYRPVQDLREVNKRVEDIHPTVPNPYNLLSGLPPSHQWYTVLDLKDAFFCLRLHPTSQPLFAFEWRDPEMGISGQLTWTRLPQGFKNSPTLFNEALHRDLADFRIQHPDLILLQYVDDLLLAATSELDCQQGTRALLQTLGNLGYRASAKKAQICQKQVKYLGYLLKEGQRWLTEARKETVMGQPTPKTPRQLREFLGTAGFCRLWIPGFAEMAAPLYPLTKPGTLFNWGPDQQKAYQEIKQALLTAPALGLPDLTKPFELFVDEKQGYAKGVLTQKLGPWRRPVAYLSKKLDPVAAGWPPCLRMVAAIAVLTKDAGKLTMGQPLVILAPHAVEALVKQPPDRWLSNARMTHYQALLLDTDRVQFGPVVALNPATLLPLPEEGLQHNCLDILAEAHGTRPDLTDQPLPDADHTWYTDGSSLLQEGQRKAGAAVTTETEVIWAKALPAGTSAQRAELIALTQALKMAEGKKLNVYTDSRYAFATAHIHGEIYRRRGWLTSEGKEIKNKDEILALLKALFLPKRLSIIHCPGHQKGHSAEARGNRMADQAARKAAITETPDTSTLLAGKRTADGSEFEKRTADGSEFESPKKKAKVE

SEQ ID NO: 2735 - protein, 2091 aa, synthetic construct
MPAAKRVKLDGGDKKYSIGLDIGTNSVGWAVITDEYKVPSKKFKVLGNTDRHSIKKNLIGALLFDSGETAEATRLKRTARRRYTRRKNRICYLQEIFSNEMAKVDDSFFHRLEESFLVEEDKKHERHPIFGNIVDEVAYHEKYPTIYHLRKKLVDSTDKADLRLIYLALAHMIKFRGHFLIEGDLNPDNSDVDKLFIQLVQTYNQLFEENPINASGVDAKAILSARLSKSRRLENLIAQLPGEKKNGLFGNLIALSLGLTPNFKSNFDLAEDAKLQLSKDTYDDDLDNLLAQIGDQYADLFLAAKNLSDAILLSDILRVNTEITKAPLSASMIKRYDEHHQDLTLLKALVRQQLPEKYKEIFFDQSKNGYAGYIDGGASQEEFYKFIKPILEKMDGTEELLVKLNREDLLRKQRTFDNGSIPHQIHLGELHAILRRQEDFYPFLKDNREKIEKILTFRIPYYVGPLARGNSRFAWMTRKSEETITPWNFEEVVDKGASAQSFIERMTNFDKNLPNEKVLPKHSLLYEYFTVYNELTKVKYVTEGMRKPAFLSGEQKKAIVDLLFKTNRKVTVKQLKEDYFKKIECFDSVEISGVEDRFNASLGTYHDLLKIIKDKDFLDNEENEDILEDIVLTLTLFEDREMIEERLKTYAHLFDDKVMKQLKRRRYTGWGRLSRKLINGIRDKQSGKTILDFLKSDGFANRNFMQLIHDDSLTFKEDIQKAQVSGQGDSLHEHIANLAGSPAIKKGILQTVKVVDELVKVMGRHKPENIVIEMARENQTTQKGQKNSRERMKRIEEGIKELGSQILKEHPVENTQLQNEKLYLYYLQNGRDMYVDQELDINRLSDYDVDHIVPQSFLKDDSIDNKVLTRSDKARGKSDNVPSEEVVKKMKNYWRQLLNAKLITQRKFDNLTKAERGGLSELDKAGFIKRQLVETRQITKHVAQILDSRMNTKYDENDKLIREVKVITLKSKLVSDFRKDFQFYKVREINNYHHAHDAYLNAVVGTALIKKYPKLESEFVYGDYKVYDVRKMIAKSEQEIGKATAKYFFYSNIMNFFKTEITLANGEIRKRPLIETNGETGEIVWDKGRDFATVRKVLSMPQVNIVKKTEVQTGGFSKESILPKRNSDKLIARKKDWDPKKYGGFDSPTVAYSVLVVAKVEKGKSKKLKSVKELLGITIMERSSFEKNPIDFLEAKGYKEVKKDLIIKLPKYSLFELENGRKRMLASAGELQKGNELALPSKYVNFLYLASHYEKLKGSPEDNEQKQLFVEQHKHYLDEIIEQISEFSKRVILADANLDKVLSAYNKHRDKPIREQAENIIHLFTLTNLGAPAAFKYFDTTIDRKRYTSTKEVLDATLIHQSITGLYETRIDLSQLGGDGGGGSPAPGGTLNIEDEHRLHETSKEPDVSLGSTWLSDFPQAWAETGGMGLAVRQAPLIIPLKATSTPVSIKQYPMSQEARLGIKPHIQRLLDQGILVPCQSPWNTPLLPVKKPGTNDYRPVQDLREVNKRVEDIHPTVPNPYNLLSGLPPSHQWYTVLDLKDAFFCLRLHPTSQPLFAFEWRDPEMGISGQLTWTRLPQGFKNSPTLFNEALHRDLADFRIQHPDLILLQYVDDLLLAATSELDCQQGTRALLQTLGNLGYRASAKKAQICQKQVKYLGYLLKEGQRWLTEARKETVMGQPTPKTPRQLREFLGTAGFCRLWIPGFAEMAAPLYPLTKPGTLFNWGPDQQKAYQEIKQALLTAPALGLPDLTKPFELFVDEKQGYAKGVLTQKLGPWRRPVAYLSKKLDPVAAGWPPCLRMVAAIAVLTKDAGKLTMGQPLVILAPHAVEALVKQPPDRWLSNARMTHYQALLLDTDRVQFGPVVALNPATLLPLPEEGLQHNCLDILAEAHGTRPDLTDQPLPDADHTWYTDGSSLLQEGQRKAGAAVTTETEVIWAKALPAGTSAQRAELIALTQALKMAEGKKLNVYTDSRYAFATAHIHGEIYRRRGWLTSEGKEIKNKDEILALLKALFLPKRLSIIHCPGHQKGHSAEARGNRMADQAARKAAITETPDTSTLLAGKRTADGSEFEKRTADGSEFESPKKKAKVE

SEQ ID NO: 2736 - protein, 2100 aa, synthetic construct
MPAAKRVKLDGGDKKYSIGLDIGTNSVGWAVITDEYKVPSKKFKVLGNTDRHSIKKNLIGALLFDSGETAEATRLKRTARRRYTRRKNRICYLQEIFSNEMAKVDDSFFHRLEESFLVEEDKKHERHPIFGNIVDEVAYHEKYPTIYHLRKKLVDSTDKADLRLIYLALAHMIKFRGHFLIEGDLNPDNSDVDKLFIQLVQTYNQLFEENPINASGVDAKAILSARLSKSRRLENLIAQLPGEKKNGLFGNLIALSLGLTPNFKSNFDLAEDAKLQLSKDTYDDDLDNLLAQIGDQYADLFLAAKNLSDAILLSDILRVNTEITKAPLSASMIKRYDEHHQDLTLLKALVRQQLPEKYKEIFFDQSKNGYAGYIDGGASQEEFYKFIKPILEKMDGTEELLVKLNREDLLRKQRTFDNGSIPHQIHLGELHAILRRQEDFYPFLKDNREKIEKILTFRIPYYVGPLARGNSRFAWMTRKSEETITPWNFEEVVDKGASAQSFIERMTNFDKNLPNEKVLPKHSLLYEYFTVYNELTKVKYVTEGMRKPAFLSGEQKKAIVDLLFKTNRKVTVKQLKEDYFKKIECFDSVEISGVEDRFNASLGTYHDLLKIIKDKDFLDNEENEDILEDIVLTLTLFEDREMIEERLKTYAHLFDDKVMKQLKRRRYTGWGRLSRKLINGIRDKQSGKTILDFLKSDGFANRNFMQLIHDDSLTFKEDIQKAQVSGQGDSLHEHIANLAGSPAIKKGILQTVKVVDELVKVMGRHKPENIVIEMARENQTTQKGQKNSRERMKRIEEGIKELGSQILKEHPVENTQLQNEKLYLYYLQNGRDMYVDQELDINRLSDYDVDHIVPQSFLKDDSIDNKVLTRSDKARGKSDNVPSEEVVKKMKNYWRQLLNAKLITQRKFDNLTKAERGGLSELDKAGFIKRQLVETRQITKHVAQILDSRMNTKYDENDKLIREVKVITLKSKLVSDFRKDFQFYKVREINNYHHAHDAYLNAVVGTALIKKYPKLESEFVYGDYKVYDVRKMIAKSEQEIGKATAKYFFYSNIMNFFKTEITLANGEIRKRPLIETNGETGEIVWDKGRDFATVRKVLSMPQVNIVKKTEVQTGGFSKESILPKRNSDKLIARKKDWDPKKYGGFDSPTVAYSVLVVAKVEKGKSKKLKSVKELLGITIMERSSFEKNPIDFLEAKGYKEVKKDLIIKLPKYSLFELENGRKRMLASAGELQKGNELALPSKYVNFLYLASHYEKLKGSPEDNEQKQLFVEQHKHYLDEIIEQISEFSKRVILADANLDKVLSAYNKHRDKPIREQAENIIHLFTLTNLGAPAAFKYFDTTIDRKRYTSTKEVLDATLIHQSITGLYETRIDLSQLGGDGGGGGGSGGGGSGGGGSGGTLNIEDEHRLHETSKEPDVSLGSTWLSDFPQAWAETGGMGLAVRQAPLIIPLKATSTPVSIKQYPMSQEARLGIKPHIQRLLDQGILVPCQSPWNTPLLPVKKPGTNDYRPVQDLREVNKRVEDIHPTVPNPYNLLSGLPPSHQWYTVLDLKDAFFCLRLHPTSQPLFAFEWRDPEMGISGQLTWTRLPQGFKNSPTLFNEALHRDLADFRIQHPDLILLQYVDDLLLAATSELDCQQGTRALLQTLGNLGYRASAKKAQICQKQVKYLGYLLKEGQRWLTEARKETVMGQPTPKTPRQLREFLGTAGFCRLWIPGFAEMAAPLYPLTKPGTLFNWGPDQQKAYQEIKQALLTAPALGLPDLTKPFELFVDEKQGYAKGVLTQKLGPWRRPVAYLSKKLDPVAAGWPPCLRMVAAIAVLTKDAGKLTMGQPLVILAPHAVEALVKQPPDRWLSNARMTHYQALLLDTDRVQFGPVVALNPATLLPLPEEGLQHNCLDILAEAHGTRPDLTDQPLPDADHTWYTDGSSLLQEGQRKAGAAVTTETEVIWAKALPAGTSAQRAELIALTQALKMAEGKKLNVYTDSRYAFATAHIHGEIYRRRGWLTSEGKEIKNKDEILALLKALFLPKRLSIIHCPGHQKGHSAEARGNRMADQAARKAAITETPDTSTLLAGKRTADGSEFEKRTADGSEFESPKKKAKVE

SEQ ID NO: 2737 - protein, 2093 aa, synthetic construct
MPAAKRVKLDGGDKKYSIGLDIGTNSVGWAVITDEYKVPSKKFKVLGNTDRHSIKKNLIGALLFDSGETAEATRLKRTARRRYTRRKNRICYLQEIFSNEMAKVDDSFFHRLEESFLVEEDKKHERHPIFGNIVDEVAYHEKYPTIYHLRKKLVDSTDKADLRLIYLALAHMIKFRGHFLIEGDLNPDNSDVDKLFIQLVQTYNQLFEENPINASGVDAKAILSARLSKSRRLENLIAQLPGEKKNGLFGNLIALSLGLTPNFKSNFDLAEDAKLQLSKDTYDDDLDNLLAQIGDQYADLFLAAKNLSDAILLSDILRVNTEITKAPLSASMIKRYDEHHQDLTLLKALVRQQLPEKYKEIFFDQSKNGYAGYIDGGASQEEFYKFIKPILEKMDGTEELLVKLNREDLLRKQRTFDNGSIPHQIHLGELHAILRRQEDFYPFLKDNREKIEKILTFRIPYYVGPLARGNSRFAWMTRKSEETITPWNFEEVVDKGASAQSFIERMTNFDKNLPNEKVLPKHSLLYEYFTVYNELTKVKYVTEGMRKPAFLSGEQKKAIVDLLFKTNRKVTVKQLKEDYFKKIECFDSVEISGVEDRFNASLGTYHDLLKIIKDKDFLDNEENEDILEDIVLTLTLFEDREMIEERLKTYAHLFDDKVMKQLKRRRYTGWGRLSRKLINGIRDKQSGKTILDFLKSDGFANRNFMQLIHDDSLTFKEDIQKAQVSGQGDSLHEHIANLAGSPAIKKGILQTVKVVDELVKVMGRHKPENIVIEMARENQTTQKGQKNSRERMKRIEEGIKELGSQILKEHPVENTQLQNEKLYLYYLQNGRDMYVDQELDINRLSDYDVDHIVPQSFLKDDSIDNKVLTRSDKARGKSDNVPSEEVVKKMKNYWRQLLNAKLITQRKFDNLTKAERGGLSELDKAGFIKRQLVETRQITKHVAQILDSRMNTKYDENDKLIREVKVITLKSKLVSDFRKDFQFYKVREINNYHHAHDAYLNAVVGTALIKKYPKLESEFVYGDYKVYDVRKMIAKSEQEIGKATAKYFFYSNIMNFFKTEITLANGEIRKRPLIETNGETGEIVWDKGRDFATVRKVLSMPQVNIVKKTEVQTGGFSKESILPKRNSDKLIARKKDWDPKKYGGFDSPTVAYSVLVVAKVEKGKSKKLKSVKELLGITIMERSSFEKNPIDFLEAKGYKEVKKDLIIKLPKYSLFELENGRKRMLASAGELQKGNELALPSKYVNFLYLASHYEKLKGSPEDNEQKQLFVEQHKHYLDEIIEQISEFSKRVILADANLDKVLSAYNKHRDKPIREQAENIIHLFTLTNLGAPAAFKYFDTTIDRKRYTSTKEVLDATLIHQSITGLYETRIDLSQLGGDGGEAAAKGSSGGTLNIEDEHRLHETSKEPDVSLGSTWLSDFPQAWAETGGMGLAVRQAPLIIPLKATSTPVSIKQYPMSQEARLGIKPHIQRLLDQGILVPCQSPWNTPLLPVKKPGTNDYRPVQDLREVNKRVEDIHPTVPNPYNLLSGLPPSHQWYTVLDLKDAFFCLRLHPTSQPLFAFEWRDPEMGISGQLTWTRLPQGFKNSPTLFNEALHRDLADFRIQHPDLILLQYVDDLLLAATSELDCQQGTRALLQTLGNLGYRASAKKAQICQKQVKYLGYLLKEGQRWLTEARKETVMGQPTPKTPRQLREFLGTAGFCRLWIPGFAEMAAPLYPLTKPGTLFNWGPDQQKAYQEIKQALLTAPALGLPDLTKPFELFVDEKQGYAKGVLTQKLGPWRRPVAYLSKKLDPVAAGWPPCLRMVAAIAVLTKDAGKLTMGQPLVILAPHAVEALVKQPPDRWLSNARMTHYQALLLDTDRVQFGPVVALNPATLLPLPEEGLQHNCLDILAEAHGTRPDLTDQPLPDADHTWYTDGSSLLQEGQRKAGAAVTTETEVIWAKALPAGTSAQRAELIALTQALKMAEGKKLNVYTDSRYAFATAHIHGEIYRRRGWLTSEGKEIKNKDEILALLKALFLPKRLSIIHCPGHQKGHSAEARGNRMADQAARKAAITETPDTSTLLAGKRTADGSEFEKRTADGSEFESPKKKAKVE

SEQ ID NO: 2738 - protein, 2094 aa, synthetic construct
MPAAKRVKLDGGDKKYSIGLDIGTNSVGWAVITDEYKVPSKKFKVLGNTDRHSIKKNLIGALLFDSGETAEATRLKRTARRRYTRRKNRICYLQEIFSNEMAKVDDSFFHRLEESFLVEEDKKHERHPIFGNIVDEVAYHEKYPTIYHLRKKLVDSTDKADLRLIYLALAHMIKFRGHFLIEGDLNPDNSDVDKLFIQLVQTYNQLFEENPINASGVDAKAILSARLSKSRRLENLIAQLPGEKKNGLFGNLIALSLGLTPNFKSNFDLAEDAKLQLSKDTYDDDLDNLLAQIGDQYADLFLAAKNLSDAILLSDILRVNTEITKAPLSASMIKRYDEHHQDLTLLKALVRQQLPEKYKEIFFDQSKNGYAGYIDGGASQEEFYKFIKPILEKMDGTEELLVKLNREDLLRKQRTFDNGSIPHQIHLGELHAILRRQEDFYPFLKDNREKIEKILTFRIPYYVGPLARGNSRFAWMTRKSEETITPWNFEEVVDKGASAQSFIERMTNFDKNLPNEKVLPKHSLLYEYFTVYNELTKVKYVTEGMRKPAFLSGEQKKAIVDLLFKTNRKVTVKQLKEDYFKKIECFDSVEISGVEDRFNASLGTYHDLLKIIKDKDFLDNEENEDILEDIVLTLTLFEDREMIEERLKTYAHLFDDKVMKQLKRRRYTGWGRLSRKLINGIRDKQSGKTILDFLKSDGFANRNFMQLIHDDSLTFKEDIQKAQVSGQGDSLHEHIANLAGSPAIKKGILQTVKVVDELVKVMGRHKPENIVIEMARENQTTQKGQKNSRERMKRIEEGIKELGSQILKEHPVENTQLQNEKLYLYYLQNGRDMYVDQELDINRLSDYDVDHIVPQSFLKDDSIDNKVLTRSDKARGKSDNVPSEEVVKKMKNYWRQLLNAKLITQRKFDNLTKAERGGLSELDKAGFIKRQLVETRQITKHVAQILDSRMNTKYDENDKLIREVKVITLKSKLVSDFRKDFQFYKVREINNYHHAHDAYLNAVVGTALIKKYPKLESEFVYGDYKVYDVRKMIAKSEQEIGKATAKYFFYSNIMNFFKTEITLANGEIRKRPLIETNGETGEIVWDKGRDFATVRKVLSMPQVNIVKKTEVQTGGFSKESILPKRNSDKLIARKKDWDPKKYGGFDSPTVAYSVLVVAKVEKGKSKKLKSVKELLGITIMERSSFEKNPIDFLEAKGYKEVKKDLIIKLPKYSLFELENGRKRMLASAGELQKGNELALPSKYVNFLYLASHYEKLKGSPEDNEQKQLFVEQHKHYLDEIIEQISEFSKRVILADANLDKVLSAYNKHRDKPIREQAENIIHLFTLTNLGAPAAFKYFDTTIDRKRYTSTKEVLDATLIHQSITGLYETRIDLSQLGGDGGPAPGGGGGSGGTLNIEDEHRLHETSKEPDVSLGSTWLSDFPQAWAETGGMGLAVRQAPLIIPLKATSTPVSIKQYPMSQEARLGIKPHIQRLLDQGILVPCQSPWNTPLLPVKKPGTNDYRPVQDLREVNKRVEDIHPTVPNPYNLLSGLPPSHQWYTVLDLKDAFFCLRLHPTSQPLFAFEWRDPEMGISGQLTWTRLPQGFKNSPTLFNEALHRDLADFRIQHPDLILLQYVDDLLLAATSELDCQQGTRALLQTLGNLGYRASAKKAQICQKQVKYLGYLLKEGQRWLTEARKETVMGQPTPKTPRQLREFLGTAGFCRLWIPGFAEMAAPLYPLTKPGTLFNWGPDQQKAYQEIKQALLTAPALGLPDLTKPFELFVDEKQGYAKGVLTQKLGPWRRPVAYLSKKLDPVAAGWPPCLRMVAAIAVLTKDAGKLTMGQPLVILAPHAVEALVKQPPDRWLSNARMTHYQALLLDTDRVQFGPVVALNPATLLPLPEEGLQHNCLDILAEAHGTRPDLTDQPLPDADHTWYTDGSSLLQEGQRKAGAAVTTETEVIWAKALPAGTSAQRAELIALTQALKMAEGKKLNVYTDSRYAFATAHIHGEIYRRRGWLTSEGKEIKNKDEILALLKALFLPKRLSIIHCPGHQKGHSAEARGNRMADQAARKAAITETPDTSTLLAGKRTADGSEFEKRTADGSEFESPKKKAKVE

SEQ ID NO: 2739 - protein, 2093 aa, synthetic construct
MPAAKRVKLDGGDKKYSIGLDIGTNSVGWAVITDEYKVPSKKFKVLGNTDRHSIKKNLIGALLFDSGETAEATRLKRTARRRYTRRKNRICYLQEIFSNEMAKVDDSFFHRLEESFLVEEDKKHERHPIFGNIVDEVAYHEKYPTIYHLRKKLVDSTDKADLRLIYLALAHMIKFRGHFLIEGDLNPDNSDVDKLFIQLVQTYNQLFEENPINASGVDAKAILSARLSKSRRLENLIAQLPGEKKNGLFGNLIALSLGLTPNFKSNFDLAEDAKLQLSKDTYDDDLDNLLAQIGDQYADLFLAAKNLSDAILLSDILRVNTEITKAPLSASMIKRYDEHHQDLTLLKALVRQQLPEKYKEIFFDQSKNGYAGYIDGGASQEEFYKFIKPILEKMDGTEELLVKLNREDLLRKQRTFDNGSIPHQIHLGELHAILRRQEDFYPFLKDNREKIEKILTFRIPYYVGPLARGNSRFAWMTRKSEETITPWNFEEVVDKGASAQSFIERMTNFDKNLPNEKVLPKHSLLYEYFTVYNELTKVKYVTEGMRKPAFLSGEQKKAIVDLLFKTNRKVTVKQLKEDYFKKIECFDSVEISGVEDRFNASLGTYHDLLKIIKDKDFLDNEENEDILEDIVLTLTLFEDREMIEERLKTYAHLFDDKVMKQLKRRRYTGWGRLSRKLINGIRDKQSGKTILDFLKSDGFANRNFMQLIHDDSLTFKEDIQKAQVSGQGDSLHEHIANLAGSPAIKKGILQTVKVVDELVKVMGRHKPENIVIEMARENQTTQKGQKNSRERMKRIEEGIKELGSQILKEHPVENTQLQNEKLYLYYLQNGRDMYVDQELDINRLSDYDVDHIVPQSFLKDDSIDNKVLTRSDKARGKSDNVPSEEVVKKMKNYWRQLLNAKLITQRKFDNLTKAERGGLSELDKAGFIKRQLVETRQITKHVAQILDSRMNTKYDENDKLIREVKVITLKSKLVSDFRKDFQFYKVREINNYHHAHDAYLNAVVGTALIKKYPKLESEFVYGDYKVYDVRKMIAKSEQEIGKATAKYFFYSNIMNFFKTEITLANGEIRKRPLIETNGETGEIVWDKGRDFATVRKVLSMPQVNIVKKTEVQTGGFSKESILPKRNSDKLIARKKDWDPKKYGGFDSPTVAYSVLVVAKVEKGKSKKLKSVKELLGITIMERSSFEKNPIDFLEAKGYKEVKKDLIIKLPKYSLFELENGRKRMLASAGELQKGNELALPSKYVNFLYLASHYEKLKGSPEDNEQKQLFVEQHKHYLDEIIEQISEFSKRVILADANLDKVLSAYNKHRDKPIREQAENIIHLFTLTNLGAPAAFKYFDTTIDRKRYTSTKEVLDATLIHQSITGLYETRIDLSQLGGDGGGGGGGGGGGGTLNIEDEHRLHETSKEPDVSLGSTWLSDFPQAWAETGGMGLAVRQAPLIIPLKATSTPVSIKQYPMSQEARLGIKPHIQRLLDQGILVPCQSPWNTPLLPVKKPGTNDYRPVQDLREVNKRVEDIHPTVPNPYNLLSGLPPSHQWYTVLDLKDAFFCLRLHPTSQPLFAFEWRDPEMGISGQLTWTRLPQGFKNSPTLFNEALHRDLADFRIQHPDLILLQYVDDLLLAATSELDCQQGTRALLQTLGNLGYRASAKKAQICQKQVKYLGYLLKEGQRWLTEARKETVMGQPTPKTPRQLREFLGTAGFCRLWIPGFAEMAAPLYPLTKPGTLFNWGPDQQKAYQEIKQALLTAPALGLPDLTKPFELFVDEKQGYAKGVLTQKLGPWRRPVAYLSKKLDPVAAGWPPCLRMVAAIAVLTKDAGKLTMGQPLVILAPHAVEALVKQPPDRWLSNARMTHYQALLLDTDRVQFGPVVALNPATLLPLPEEGLQHNCLDILAEAHGTRPDLTDQPLPDADHTWYTDGSSLLQEGQRKAGAAVTTETEVIWAKALPAGTSAQRAELIALTQALKMAEGKKLNVYTDSRYAFATAHIHGEIYRRRGWLTSEGKEIKNKDEILALLKALFLPKRLSIIHCPGHQKGHSAEARGNRMADQAARKAAITETPDTSTLLAGKRTADGSEFEKRTADGSEFESPKKKAKVE

SEQ ID NO: 2740 - protein, 2093 aa, synthetic construct
MPAAKRVKLDGGDKKYSIGLDIGTNSVGWAVITDEYKVPSKKFKVLGNTDRHSIKKNLIGALLFDSGETAEATRLKRTARRRYTRRKNRICYLQEIFSNEMAKVDDSFFHRLEESFLVEEDKKHERHPIFGNIVDEVAYHEKYPTIYHLRKKLVDSTDKADLRLIYLALAHMIKFRGHFLIEGDLNPDNSDVDKLFIQLVQTYNQLFEENPINASGVDAKAILSARLSKSRRLENLIAQLPGEKKNGLFGNLIALSLGLTPNFKSNFDLAEDAKLQLSKDTYDDDLDNLLAQIGDQYADLFLAAKNLSDAILLSDILRVNTEITKAPLSASMIKRYDEHHQDLTLLKALVRQQLPEKYKEIFFDQSKNGYAGYIDGGASQEEFYKFIKPILEKMDGTEELLVKLNREDLLRKQRTFDNGSIPHQIHLGELHAILRRQEDFYPFLKDNREKIEKILTFRIPYYVGPLARGNSRFAWMTRKSEETITPWNFEEVVDKGASAQSFIERMTNFDKNLPNEKVLPKHSLLYEYFTVYNELTKVKYVTEGMRKPAFLSGEQKKAIVDLLFKTNRKVTVKQLKEDYFKKIECFDSVEISGVEDRFNASLGTYHDLLKIIKDKDFLDNEENEDILEDIVLTLTLFEDREMIEERLKTYAHLFDDKVMKQLKRRRYTGWGRLSRKLINGIRDKQSGKTILDFLKSDGFANRNFMQLIHDDSLTFKEDIQKAQVSGQGDSLHEHIANLAGSPAIKKGILQTVKVVDELVKVMGRHKPENIVIEMARENQTTQKGQKNSRERMKRIEEGIKELGSQILKEHPVENTQLQNEKLYLYYLQNGRDMYVDQELDINRLSDYDVDHIVPQSFLKDDSIDNKVLTRSDKARGKSDNVPSEEVVKKMKNYWRQLLNAKLITQRKFDNLTKAERGGLSELDKAGFIKRQLVETRQITKHVAQILDSRMNTKYDENDKLIREVKVITLKSKLVSDFRKDFQFYKVREINNYHHAHDAYLNAVVGTALIKKYPKLESEFVYGDYKVYDVRKMIAKSEQEIGKATAKYFFYSNIMNFFKTEITLANGEIRKRPLIETNGETGEIVWDKGRDFATVRKVLSMPQVNIVKKTEVQTGGFSKESILPKRNSDKLIARKKDWDPKKYGGFDSPTVAYSVLVVAKVEKGKSKKLKSVKELLGITIMERSSFEKNPIDFLEAKGYKEVKKDLIIKLPKYSLFELENGRKRMLASAGELQKGNELALPSKYVNFLYLASHYEKLKGSPEDNEQKQLFVEQHKHYLDEIIEQISEFSKRVILADANLDKVLSAYNKHRDKPIREQAENIIHLFTLTNLGAPAAFKYFDTTIDRKRYTSTKEVLDATLIHQSITGLYETRIDLSQLGGDGGPAPEAAAKGGTLNIEDEHRLHETSKEPDVSLGSTWLSDFPQAWAETGGMGLAVRQAPLIIPLKATSTPVSIKQYPMSQEARLGIKPHIQRLLDQGILVPCQSPWNTPLLPVKKPGTNDYRPVQDLREVNKRVEDIHPTVPNPYNLLSGLPPSHQWYTVLDLKDAFFCLRLHPTSQPLFAFEWRDPEMGISGQLTWTRLPQGFKNSPTLFNEALHRDLADFRIQHPDLILLQYVDDLLLAATSELDCQQGTRALLQTLGNLGYRASAKKAQICQKQVKYLGYLLKEGQRWLTEARKETVMGQPTPKTPRQLREFLGTAGFCRLWIPGFAEMAAPLYPLTKPGTLFNWGPDQQKAYQEIKQALLTAPALGLPDLTKPFELFVDEKQGYAKGVLTQKLGPWRRPVAYLSKKLDPVAAGWPPCLRMVAAIAVLTKDAGKLTMGQPLVILAPHAVEALVKQPPDRWLSNARMTHYQALLLDTDRVQFGPVVALNPATLLPLPEEGLQHNCLDILAEAHGTRPDLTDQPLPDADHTWYTDGSSLLQEGQRKAGAAVTTETEVIWAKALPAGTSAQRAELIALTQALKMAEGKKLNVYTDSRYAFATAHIHGEIYRRRGWLTSEGKEIKNKDEILALLKALFLPKRLSIIHCPGHQKGHSAEARGNRMADQAARKAAITETPDTSTLLAGKRTADGSEFEKRTADGSEFESPKKKAKVE

SEQ ID NO: 2741 - protein, 2115 aa, synthetic construct
MPAAKRVKLDGGDKKYSIGLDIGTNSVGWAVITDEYKVPSKKFKVLGNTDRHSIKKNLIGALLFDSGETAEATRLKRTARRRYTRRKNRICYLQEIFSNEMAKVDDSFFHRLEESFLVEEDKKHERHPIFGNIVDEVAYHEKYPTIYHLRKKLVDSTDKADLRLIYLALAHMIKFRGHFLIEGDLNPDNSDVDKLFIQLVQTYNQLFEENPINASGVDAKAILSARLSKSRRLENLIAQLPGEKKNGLFGNLIALSLGLTPNFKSNFDLAEDAKLQLSKDTYDDDLDNLLAQIGDQYADLFLAAKNLSDAILLSDILRVNTEITKAPLSASMIKRYDEHHQDLTLLKALVRQQLPEKYKEIFFDQSKNGYAGYIDGGASQEEFYKFIKPILEKMDGTEELLVKLNREDLLRKQRTFDNGSIPHQIHLGELHAILRRQEDFYPFLKDNREKIEKILTFRIPYYVGPLARGNSRFAWMTRKSEETITPWNFEEVVDKGASAQSFIERMTNFDKNLPNEKVLPKHSLLYEYFTVYNELTKVKYVTEGMRKPAFLSGEQKKAIVDLLFKTNRKVTVKQLKEDYFKKIECFDSVEISGVEDRFNASLGTYHDLLKIIKDKDFLDNEENEDILEDIVLTLTLFEDREMIEERLKTYAHLFDDKVMKQLKRRRYTGWGRLSRKLINGIRDKQSGKTILDFLKSDGFANRNFMQLIHDDSLTFKEDIQKAQVSGQGDSLHEHIANLAGSPAIKKGILQTVKVVDELVKVMGRHKPENIVIEMARENQTTQKGQKNSRERMKRIEEGIKELGSQILKEHPVENTQLQNEKLYLYYLQNGRDMYVDQELDINRLSDYDVDHIVPQSFLKDDSIDNKVLTRSDKARGKSDNVPSEEVVKKMKNYWRQLLNAKLITQRKFDNLTKAERGGLSELDKAGFIKRQLVETRQITKHVAQILDSRMNTKYDENDKLIREVKVITLKSKLVSDFRKDFQFYKVREINNYHHAHDAYLNAVVGTALIKKYPKLESEFVYGDYKVYDVRKMIAKSEQEIGKATAKYFFYSNIMNFFKTEITLANGEIRKRPLIETNGETGEIVWDKGRDFATVRKVLSMPQVNIVKKTEVQTGGFSKESILPKRNSDKLIARKKDWDPKKYGGFDSPTVAYSVLVVAKVEKGKSKKLKSVKELLGITIMERSSFEKNPIDFLEAKGYKEVKKDLIIKLPKYSLFELENGRKRMLASAGELQKGNELALPSKYVNFLYLASHYEKLKGSPEDNEQKQLFVEQHKHYLDEIIEQISEFSKRVILADANLDKVLSAYNKHRDKPIREQAENIIHLFTLTNLGAPAAFKYFDTTIDRKRYTSTKEVLDATLIHQSITGLYETRIDLSQLGGDGGGGGGSGGGGSGGGGSGGGGSGGGGSGGGGSGGTLNIEDEHRLHETSKEPDVSLGSTWLSDFPQAWAETGGMGLAVRQAPLIIPLKATSTPVSIKQYPMSQEARLGIKPHIQRLLDQGILVPCQSPWNTPLLPVKKPGTNDYRPVQDLREVNKRVEDIHPTVPNPYNLLSGLPPSHQWYTVLDLKDAFFCLRLHPTSQPLFAFEWRDPEMGISGQLTWTRLPQGFKNSPTLFNEALHRDLADFRIQHPDLILLQYVDDLLLAATSELDCQQGTRALLQTLGNLGYRASAKKAQICQKQVKYLGYLLKEGQRWLTEARKETVMGQPTPKTPRQLREFLGTAGFCRLWIPGFAEMAAPLYPLTKPGTLFNWGPDQQKAYQEIKQALLTAPALGLPDLTKPFELFVDEKQGYAKGVLTQKLGPWRRPVAYLSKKLDPVAAGWPPCLRMVAAIAVLTKDAGKLTMGQPLVILAPHAVEALVKQPPDRWLSNARMTHYQALLLDTDRVQFGPVVALNPATLLPLPEEGLQHNCLDILAEAHGTRPDLTDQPLPDADHTWYTDGSSLLQEGQRKAGAAVTTETEVIWAKALPAGTSAQRAELIALTQALKMAEGKKLNVYTDSRYAFATAHIHGEIYRRRGWLTSEGKEIKNKDEILALLKALFLPKRLSIIHCPGHQKGHSAEARGNRMADQAARKAAITETPDTSTLLAGKRTADGSEFEKRTADGSEFESPKKKAKVE

SEQ ID NO: 2742 - protein, 2094 aa, synthetic construct
MPAAKRVKLDGGDKKYSIGLDIGTNSVGWAVITDEYKVPSKKFKVLGNTDRHSIKKNLIGALLFDSGETAEATRLKRTARRRYTRRKNRICYLQEIFSNEMAKVDDSFFHRLEESFLVEEDKKHERHPIFGNIVDEVAYHEKYPTIYHLRKKLVDSTDKADLRLIYLALAHMIKFRGHFLIEGDLNPDNSDVDKLFIQLVQTYNQLFEENPINASGVDAKAILSARLSKSRRLENLIAQLPGEKKNGLFGNLIALSLGLTPNFKSNFDLAEDAKLQLSKDTYDDDLDNLLAQIGDQYADLFLAAKNLSDAILLSDILRVNTEITKAPLSASMIKRYDEHHQDLTLLKALVRQQLPEKYKEIFFDQSKNGYAGYIDGGASQEEFYKFIKPILEKMDGTEELLVKLNREDLLRKQRTFDNGSIPHQIHLGELHAILRRQEDFYPFLKDNREKIEKILTFRIPYYVGPLARGNSRFAWMTRKSEETITPWNFEEVVDKGASAQSFIERMTNFDKNLPNEKVLPKHSLLYEYFTVYNELTKVKYVTEGMRKPAFLSGEQKKAIVDLLFKTNRKVTVKQLKEDYFKKIECFDSVEISGVEDRFNASLGTYHDLLKIIKDKDFLDNEENEDILEDIVLTLTLFEDREMIEERLKTYAHLFDDKVMKQLKRRRYTGWGRLSRKLINGIRDKQSGKTILDFLKSDGFANRNFMQLIHDDSLTFKEDIQKAQVSGQGDSLHEHIANLAGSPAIKKGILQTVKVVDELVKVMGRHKPENIVIEMARENQTTQKGQKNSRERMKRIEEGIKELGSQILKEHPVENTQLQNEKLYLYYLQNGRDMYVDQELDINRLSDYDVDHIVPQSFLKDDSIDNKVLTRSDKARGKSDNVPSEEVVKKMKNYWRQLLNAKLITQRKFDNLTKAERGGLSELDKAGFIKRQLVETRQITKHVAQILDSRMNTKYDENDKLIREVKVITLKSKLVSDFRKDFQFYKVREINNYHHAHDAYLNAVVGTALIKKYPKLESEFVYGDYKVYDVRKMIAKSEQEIGKATAKYFFYSNIMNFFKTEITLANGEIRKRPLIETNGETGEIVWDKGRDFATVRKVLSMPQVNIVKKTEVQTGGFSKESILPKRNSDKLIARKKDWDPKKYGGFDSPTVAYSVLVVAKVEKGKSKKLKSVKELLGITIMERSSFEKNPIDFLEAKGYKEVKKDLIIKLPKYSLFELENGRKRMLASAGELQKGNELALPSKYVNFLYLASHYEKLKGSPEDNEQKQLFVEQHKHYLDEIIEQISEFSKRVILADANLDKVLSAYNKHRDKPIREQAENIIHLFTLTNLGAPAAFKYFDTTIDRKRYTSTKEVLDATLIHQSITGLYETRIDLSQLGGDGGGGGPAPGGSGGTLNIEDEHRLHETSKEPDVSLGSTWLSDFPQAWAETGGMGLAVRQAPLIIPLKATSTPVSIKQYPMSQEARLGIKPHIQRLLDQGILVPCQSPWNTPLLPVKKPGTNDYRPVQDLREVNKRVEDIHPTVPNPYNLLSGLPPSHQWYTVLDLKDAFFCLRLHPTSQPLFAFEWRDPEMGISGQLTWTRLPQGFKNSPTLFNEALHRDLADFRIQHPDLILLQYVDDLLLAATSELDCQQGTRALLQTLGNLGYRASAKKAQICQKQVKYLGYLLKEGQRWLTEARKETVMGQPTPKTPRQLREFLGTAGFCRLWIPGFAEMAAPLYPLTKPGTLFNWGPDQQKAYQEIKQALLTAPALGLPDLTKPFELFVDEKQGYAKGVLTQKLGPWRRPVAYLSKKLDPVAAGWPPCLRMVAAIAVLTKDAGKLTMGQPLVILAPHAVEALVKQPPDRWLSNARMTHYQALLLDTDRVQFGPVVALNPATLLPLPEEGLQHNCLDILAEAHGTRPDLTDQPLPDADHTWYTDGSSLLQEGQRKAGAAVTTETEVIWAKALPAGTSAQRAELIALTQALKMAEGKKLNVYTDSRYAFATAHIHGEIYRRRGWLTSEGKEIKNKDEILALLKALFLPKRLSIIHCPGHQKGHSAEARGNRMADQAARKAAITETPDTSTLLAGKRTADGSEFEKRTADGSEFESPKKKAKVE

SEQ ID NO: 2743 - protein, 2091 aa, synthetic construct
MPAAKRVKLDGGDKKYSIGLDIGTNSVGWAVITDEYKVPSKKFKVLGNTDRHSIKKNLIGALLFDSGETAEATRLKRTARRRYTRRKNRICYLQEIFSNEMAKVDDSFFHRLEESFLVEEDKKHERHPIFGNIVDEVAYHEKYPTIYHLRKKLVDSTDKADLRLIYLALAHMIKFRGHFLIEGDLNPDNSDVDKLFIQLVQTYNQLFEENPINASGVDAKAILSARLSKSRRLENLIAQLPGEKKNGLFGNLIALSLGLTPNFKSNFDLAEDAKLQLSKDTYDDDLDNLLAQIGDQYADLFLAAKNLSDAILLSDILRVNTEITKAPLSASMIKRYDEHHQDLTLLKALVRQQLPEKYKEIFFDQSKNGYAGYIDGGASQEEFYKFIKPILEKMDGTEELLVKLNREDLLRKQRTFDNGSIPHQIHLGELHAILRRQEDFYPFLKDNREKIEKILTFRIPYYVGPLARGNSRFAWMTRKSEETITPWNFEEVVDKGASAQSFIERMTNFDKNLPNEKVLPKHSLLYEYFTVYNELTKVKYVTEGMRKPAFLSGEQKKAIVDLLFKTNRKVTVKQLKEDYFKKIECFDSVEISGVEDRFNASLGTYHDLLKIIKDKDFLDNEENEDILEDIVLTLTLFEDREMIEERLKTYAHLFDDKVMKQLKRRRYTGWGRLSRKLINGIRDKQSGKTILDFLKSDGFANRNFMQLIHDDSLTFKEDIQKAQVSGQGDSLHEHIANLAGSPAIKKGILQTVKVVDELVKVMGRHKPENIVIEMARENQTTQKGQKNSRERMKRIEEGIKELGSQILKEHPVENTQLQNEKLYLYYLQNGRDMYVDQELDINRLSDYDVDHIVPQSFLKDDSIDNKVLTRSDKARGKSDNVPSEEVVKKMKNYWRQLLNAKLITQRKFDNLTKAERGGLSELDKAGFIKRQLVETRQITKHVAQILDSRMNTKYDENDKLIREVKVITLKSKLVSDFRKDFQFYKVREINNYHHAHDAYLNAVVGTALIKKYPKLESEFVYGDYKVYDVRKMIAKSEQEIGKATAKYFFYSNIMNFFKTEITLANGEIRKRPLIETNGETGEIVWDKGRDFATVRKVLSMPQVNIVKKTEVQTGGFSKESILPKRNSDKLIARKKDWDPKKYGGFDSPTVAYSVLVVAKVEKGKSKKLKSVKELLGITIMERSSFEKNPIDFLEAKGYKEVKKDLIIKLPKYSLFELENGRKRMLASAGELQKGNELALPSKYVNFLYLASHYEKLKGSPEDNEQKQLFVEQHKHYLDEIIEQISEFSKRVILADANLDKVLSAYNKHRDKPIREQAENIIHLFTLTNLGAPAAFKYFDTTIDRKRYTSTKEVLDATLIHQSITGLYETRIDLSQLGGDGGPAPGGGGGTLNIEDEHRLHETSKEPDVSLGSTWLSDFPQAWAETGGMGLAVRQAPLIIPLKATSTPVSIKQYPMSQEARLGIKPHIQRLLDQGILVPCQSPWNTPLLPVKKPGTNDYRPVQDLREVNKRVEDIHPTVPNPYNLLSGLPPSHQWYTVLDLKDAFFCLRLHPTSQPLFAFEWRDPEMGISGQLTWTRLPQGFKNSPTLFNEALHRDLADFRIQHPDLILLQYVDDLLLAATSELDCQQGTRALLQTLGNLGYRASAKKAQICQKQVKYLGYLLKEGQRWLTEARKETVMGQPTPKTPRQLREFLGTAGFCRLWIPGFAEMAAPLYPLTKPGTLFNWGPDQQKAYQEIKQALLTAPALGLPDLTKPFELFVDEKQGYAKGVLTQKLGPWRRPVAYLSKKLDPVAAGWPPCLRMVAAIAVLTKDAGKLTMGQPLVILAPHAVEALVKQPPDRWLSNARMTHYQALLLDTDRVQFGPVVALNPATLLPLPEEGLQHNCLDILAEAHGTRPDLTDQPLPDADHTWYTDGSSLLQEGQRKAGAAVTTETEVIWAKALPAGTSAQRAELIALTQALKMAEGKKLNVYTDSRYAFATAHIHGEIYRRRGWLTSEGKEIKNKDEILALLKALFLPKRLSIIHCPGHQKGHSAEARGNRMADQAARKAAITETPDTSTLLAGKRTADGSEFEKRTADGSEFESPKKKAKVE

SEQ ID NO: 2744 - protein, 2096 aa, synthetic construct
MPAAKRVKLDGGDKKYSIGLDIGTNSVGWAVITDEYKVPSKKFKVLGNTDRHSIKKNLIGALLFDSGETAEATRLKRTARRRYTRRKNRICYLQEIFSNEMAKVDDSFFHRLEESFLVEEDKKHERHPIFGNIVDEVAYHEKYPTIYHLRKKLVDSTDKADLRLIYLALAHMIKFRGHFLIEGDLNPDNSDVDKLFIQLVQTYNQLFEENPINASGVDAKAILSARLSKSRRLENLIAQLPGEKKNGLFGNLIALSLGLTPNFKSNFDLAEDAKLQLSKDTYDDDLDNLLAQIGDQYADLFLAAKNLSDAILLSDILRVNTEITKAPLSASMIKRYDEHHQDLTLLKALVRQQLPEKYKEIFFDQSKNGYAGYIDGGASQEEFYKFIKPILEKMDGTEELLVKLNREDLLRKQRTFDNGSIPHQIHLGELHAILRRQEDFYPFLKDNREKIEKILTFRIPYYVGPLARGNSRFAWMTRKSEETITPWNFEEVVDKGASAQSFIERMTNFDKNLPNEKVLPKHSLLYEYFTVYNELTKVKYVTEGMRKPAFLSGEQKKAIVDLLFKTNRKVTVKQLKEDYFKKIECFDSVEISGVEDRFNASLGTYHDLLKIIKDKDFLDNEENEDILEDIVLTLTLFEDREMIEERLKTYAHLFDDKVMKQLKRRRYTGWGRLSRKLINGIRDKQSGKTILDFLKSDGFANRNFMQLIHDDSLTFKEDIQKAQVSGQGDSLHEHIANLAGSPAIKKGILQTVKVVDELVKVMGRHKPENIVIEMARENQTTQKGQKNSRERMKRIEEGIKELGSQILKEHPVENTQLQNEKLYLYYLQNGRDMYVDQELDINRLSDYDVDHIVPQSFLKDDSIDNKVLTRSDKARGKSDNVPSEEVVKKMKNYWRQLLNAKLITQRKFDNLTKAERGGLSELDKAGFIKRQLVETRQITKHVAQILDSRMNTKYDENDKLIREVKVITLKSKLVSDFRKDFQFYKVREINNYHHAHDAYLNAVVGTALIKKYPKLESEFVYGDYKVYDVRKMIAKSEQEIGKATAKYFFYSNIMNFFKTEITLANGEIRKRPLIETNGETGEIVWDKGRDFATVRKVLSMPQVNIVKKTEVQTGGFSKESILPKRNSDKLIARKKDWDPKKYGGFDSPTVAYSVLVVAKVEKGKSKKLKSVKELLGITIMERSSFEKNPIDFLEAKGYKEVKKDLIIKLPKYSLFELENGRKRMLASAGELQKGNELALPSKYVNFLYLASHYEKLKGSPEDNEQKQLFVEQHKHYLDEIIEQISEFSKRVILADANLDKVLSAYNKHRDKPIREQAENIIHLFTLTNLGAPAAFKYFDTTIDRKRYTSTKEVLDATLIHQSITGLYETRIDLSQLGGDGGGGSEAAAKPAPGGTLNIEDEHRLHETSKEPDVSLGSTWLSDFPQAWAETGGMGLAVRQAPLIIPLKATSTPVSIKQYPMSQEARLGIKPHIQRLLDQGILVPCQSPWNTPLLPVKKPGTNDYRPVQDLREVNKRVEDIHPTVPNPYNLLSGLPPSHQWYTVLDLKDAFFCLRLHPTSQPLFAFEWRDPEMGISGQLTWTRLPQGFKNSPTLFNEALHRDLADFRIQHPDLILLQYVDDLLLAATSELDCQQGTRALLQTLGNLGYRASAKKAQICQKQVKYLGYLLKEGQRWLTEARKETVMGQPTPKTPRQLREFLGTAGFCRLWIPGFAEMAAPLYPLTKPGTLFNWGPDQQKAYQEIKQALLTAPALGLPDLTKPFELFVDEKQGYAKGVLTQKLGPWRRPVAYLSKKLDPVAAGWPPCLRMVAAIAVLTKDAGKLTMGQPLVILAPHAVEALVKQPPDRWLSNARMTHYQALLLDTDRVQFGPVVALNPATLLPLPEEGLQHNCLDILAEAHGTRPDLTDQPLPDADHTWYTDGSSLLQEGQRKAGAAVTTETEVIWAKALPAGTSAQRAELIALTQALKMAEGKKLNVYTDSRYAFATAHIHGEIYRRRGWLTSEGKEIKNKDEILALLKALFLPKRLSIIHCPGHQKGHSAEARGNRMADQAARKAAITETPDTSTLLAGKRTADGSEFEKRTADGSEFESPKKKAKVE

SEQ ID NO: 2745 - protein, 2096 aa, synthetic construct
MPAAKRVKLDGGDKKYSIGLDIGTNSVGWAVITDEYKVPSKKFKVLGNTDRHSIKKNLIGALLFDSGETAEATRLKRTARRRYTRRKNRICYLQEIFSNEMAKVDDSFFHRLEESFLVEEDKKHERHPIFGNIVDEVAYHEKYPTIYHLRKKLVDSTDKADLRLIYLALAHMIKFRGHFLIEGDLNPDNSDVDKLFIQLVQTYNQLFEENPINASGVDAKAILSARLSKSRRLENLIAQLPGEKKNGLFGNLIALSLGLTPNFKSNFDLAEDAKLQLSKDTYDDDLDNLLAQIGDQYADLFLAAKNLSDAILLSDILRVNTEITKAPLSASMIKRYDEHHQDLTLLKALVRQQLPEKYKEIFFDQSKNGYAGYIDGGASQEEFYKFIKPILEKMDGTEELLVKLNREDLLRKQRTFDNGSIPHQIHLGELHAILRRQEDFYPFLKDNREKIEKILTFRIPYYVGPLARGNSRFAWMTRKSEETITPWNFEEVVDKGASAQSFIERMTNFDKNLPNEKVLPKHSLLYEYFTVYNELTKVKYVTEGMRKPAFLSGEQKKAIVDLLFKTNRKVTVKQLKEDYFKKIECFDSVEISGVEDRFNASLGTYHDLLKIIKDKDFLDNEENEDILEDIVLTLTLFEDREMIEERLKTYAHLFDDKVMKQLKRRRYTGWGRLSRKLINGIRDKQSGKTILDFLKSDGFANRNFMQLIHDDSLTFKEDIQKAQVSGQGDSLHEHIANLAGSPAIKKGILQTVKVVDELVKVMGRHKPENIVIEMARENQTTQKGQKNSRERMKRIEEGIKELGSQILKEHPVENTQLQNEKLYLYYLQNGRDMYVDQELDINRLSDYDVDHIVPQSFLKDDSIDNKVLTRSDKARGKSDNVPSEEVVKKMKNYWRQLLNAKLITQRKFDNLTKAERGGLSELDKAGFIKRQLVETRQITKHVAQILDSRMNTKYDENDKLIREVKVITLKSKLVSDFRKDFQFYKVREINNYHHAHDAYLNAVVGTALIKKYPKLESEFVYGDYKVYDVRKMIAKSEQEIGKATAKYFFYSNIMNFFKTEITLANGEIRKRPLIETNGETGEIVWDKGRDFATVRKVLSMPQVNIVKKTEVQTGGFSKESILPKRNSDKLIARKKDWDPKKYGGFDSPTVAYSVLVVAKVEKGKSKKLKSVKELLGITIMERSSFEKNPIDFLEAKGYKEVKKDLIIKLPKYSLFELENGRKRMLASAGELQKGNELALPSKYVNFLYLASHYEKLKGSPEDNEQKQLFVEQHKHYLDEIIEQISEFSKRVILADANLDKVLSAYNKHRDKPIREQAENIIHLFTLTNLGAPAAFKYFDTTIDRKRYTSTKEVLDATLIHQSITGLYETRIDLSQLGGDGGEAAAKGGGGGSGGTLNIEDEHRLHETSKEPDVSLGSTWLSDFPQAWAETGGMGLAVRQAPLIIPLKATSTPVSIKQYPMSQEARLGIKPHIQRLLDQGILVPCQSPWNTPLLPVKKPGTNDYRPVQDLREVNKRVEDIHPTVPNPYNLLSGLPPSHQWYTVLDLKDAFFCLRLHPTSQPLFAFEWRDPEMGISGQLTWTRLPQGFKNSPTLFNEALHRDLADFRIQHPDLILLQYVDDLLLAATSELDCQQGTRALLQTLGNLGYRASAKKAQICQKQVKYLGYLLKEGQRWLTEARKETVMGQPTPKTPRQLREFLGTAGFCRLWIPGFAEMAAPLYPLTKPGTLFNWGPDQQKAYQEIKQALLTAPALGLPDLTKPFELFVDEKQGYAKGVLTQKLGPWRRPVAYLSKKLDPVAAGWPPCLRMVAAIAVLTKDAGKLTMGQPLVILAPHAVEALVKQPPDRWLSNARMTHYQALLLDTDRVQFGPVVALNPATLLPLPEEGLQHNCLDILAEAHGTRPDLTDQPLPDADHTWYTDGSSLLQEGQRKAGAAVTTETEVIWAKALPAGTSAQRAELIALTQALKMAEGKKLNVYTDSRYAFATAHIHGEIYRRRGWLTSEGKEIKNKDEILALLKALFLPKRLSIIHCPGHQKGHSAEARGNRMADQAARKAAITETPDTSTLLAGKRTADGSEFEKRTADGSEFESPKKKAKVE

SEQ ID NO: 2746 - protein, 2093 aa, synthetic construct
MPAAKRVKLDGGDKKYSIGLDIGTNSVGWAVITDEYKVPSKKFKVLGNTDRHSIKKNLIGALLFDSGETAEATRLKRTARRRYTRRKNRICYLQEIFSNEMAKVDDSFFHRLEESFLVEEDKKHERHPIFGNIVDEVAYHEKYPTIYHLRKKLVDSTDKADLRLIYLALAHMIKFRGHFLIEGDLNPDNSDVDKLFIQLVQTYNQLFEENPINASGVDAKAILSARLSKSRRLENLIAQLPGEKKNGLFGNLIALSLGLTPNFKSNFDLAEDAKLQLSKDTYDDDLDNLLAQIGDQYADLFLAAKNLSDAILLSDILRVNTEITKAPLSASMIKRYDEHHQDLTLLKALVRQQLPEKYKEIFFDQSKNGYAGYIDGGASQEEFYKFIKPILEKMDGTEELLVKLNREDLLRKQRTFDNGSIPHQIHLGELHAILRRQEDFYPFLKDNREKIEKILTFRIPYYVGPLARGNSRFAWMTRKSEETITPWNFEEVVDKGASAQSFIERMTNFDKNLPNEKVLPKHSLLYEYFTVYNELTKVKYVTEGMRKPAFLSGEQKKAIVDLLFKTNRKVTVKQLKEDYFKKIECFDSVEISGVEDRFNASLGTYHDLLKIIKDKDFLDNEENEDILEDIVLTLTLFEDREMIEERLKTYAHLFDDKVMKQLKRRRYTGWGRLSRKLINGIRDKQSGKTILDFLKSDGFANRNFMQLIHDDSLTFKEDIQKAQVSGQGDSLHEHIANLAGSPAIKKGILQTVKVVDELVKVMGRHKPENIVIEMARENQTTQKGQKNSRERMKRIEEGIKELGSQILKEHPVENTQLQNEKLYLYYLQNGRDMYVDQELDINRLSDYDVDHIVPQSFLKDDSIDNKVLTRSDKARGKSDNVPSEEVVKKMKNYWRQLLNAKLITQRKFDNLTKAERGGLSELDKAGFIKRQLVETRQITKHVAQILDSRMNTKYDENDKLIREVKVITLKSKLVSDFRKDFQFYKVREINNYHHAHDAYLNAVVGTALIKKYPKLESEFVYGDYKVYDVRKMIAKSEQEIGKATAKYFFYSNIMNFFKTEITLANGEIRKRPLIETNGETGEIVWDKGRDFATVRKVLSMPQVNIVKKTEVQTGGFSKESILPKRNSDKLIARKKDWDPKKYGGFDSPTVAYSVLVVAKVEKGKSKKLKSVKELLGITIMERSSFEKNPIDFLEAKGYKEVKKDLIIKLPKYSLFELENGRKRMLASAGELQKGNELALPSKYVNFLYLASHYEKLKGSPEDNEQKQLFVEQHKHYLDEIIEQISEFSKRVILADANLDKVLSAYNKHRDKPIREQAENIIHLFTLTNLGAPAAFKYFDTTIDRKRYTSTKEVLDATLIHQSITGLYETRIDLSQLGGDGGGGGEAAAKGGTLNIEDEHRLHETSKEPDVSLGSTWLSDFPQAWAETGGMGLAVRQAPLIIPLKATSTPVSIKQYPMSQEARLGIKPHIQRLLDQGILVPCQSPWNTPLLPVKKPGTNDYRPVQDLREVNKRVEDIHPTVPNPYNLLSGLPPSHQWYTVLDLKDAFFCLRLHPTSQPLFAFEWRDPEMGISGQLTWTRLPQGFKNSPTLFNEALHRDLADFRIQHPDLILLQYVDDLLLAATSELDCQQGTRALLQTLGNLGYRASAKKAQICQKQVKYLGYLLKEGQRWLTEARKETVMGQPTPKTPRQLREFLGTAGFCRLWIPGFAEMAAPLYPLTKPGTLFNWGPDQQKAYQEIKQALLTAPALGLPDLTKPFELFVDEKQGYAKGVLTQKLGPWRRPVAYLSKKLDPVAAGWPPCLRMVAAIAVLTKDAGKLTMGQPLVILAPHAVEALVKQPPDRWLSNARMTHYQALLLDTDRVQFGPVVALNPATLLPLPEEGLQHNCLDILAEAHGTRPDLTDQPLPDADHTWYTDGSSLLQEGQRKAGAAVTTETEVIWAKALPAGTSAQRAELIALTQALKMAEGKKLNVYTDSRYAFATAHIHGEIYRRRGWLTSEGKEIKNKDEILALLKALFLPKRLSIIHCPGHQKGHSAEARGNRMADQAARKAAITETPDTSTLLAGKRTADGSEFEKRTADGSEFESPKKKAKVE

SEQ ID NO: 2747 - protein, 2096 aa, synthetic construct
MPAAKRVKLDGGDKKYSIGLDIGTNSVGWAVITDEYKVPSKKFKVLGNTDRHSIKKNLIGALLFDSGETAEATRLKRTARRRYTRRKNRICYLQEIFSNEMAKVDDSFFHRLEESFLVEEDKKHERHPIFGNIVDEVAYHEKYPTIYHLRKKLVDSTDKADLRLIYLALAHMIKFRGHFLIEGDLNPDNSDVDKLFIQLVQTYNQLFEENPINASGVDAKAILSARLSKSRRLENLIAQLPGEKKNGLFGNLIALSLGLTPNFKSNFDLAEDAKLQLSKDTYDDDLDNLLAQIGDQYADLFLAAKNLSDAILLSDILRVNTEITKAPLSASMIKRYDEHHQDLTLLKALVRQQLPEKYKEIFFDQSKNGYAGYIDGGASQEEFYKFIKPILEKMDGTEELLVKLNREDLLRKQRTFDNGSIPHQIHLGELHAILRRQEDFYPFLKDNREKIEKILTFRIPYYVGPLARGNSRFAWMTRKSEETITPWNFEEVVDKGASAQSFIERMTNFDKNLPNEKVLPKHSLLYEYFTVYNELTKVKYVTEGMRKPAFLSGEQKKAIVDLLFKTNRKVTVKQLKEDYFKKIECFDSVEISGVEDRFNASLGTYHDLLKIIKDKDFLDNEENEDILEDIVLTLTLFEDREMIEERLKTYAHLFDDKVMKQLKRRRYTGWGRLSRKLINGIRDKQSGKTILDFLKSDGFANRNFMQLIHDDSLTFKEDIQKAQVSGQGDSLHEHIANLAGSPAIKKGILQTVKVVDELVKVMGRHKPENIVIEMARENQTTQKGQKNSRERMKRIEEGIKELGSQILKEHPVENTQLQNEKLYLYYLQNGRDMYVDQELDINRLSDYDVDHIVPQSFLKDDSIDNKVLTRSDKARGKSDNVPSEEVVKKMKNYWRQLLNAKLITQRKFDNLTKAERGGLSELDKAGFIKRQLVETRQITKHVAQILDSRMNTKYDENDKLIREVKVITLKSKLVSDFRKDFQFYKVREINNYHHAHDAYLNAVVGTALIKKYPKLESEFVYGDYKVYDVRKMIAKSEQEIGKATAKYFFYSNIMNFFKTEITLANGEIRKRPLIETNGETGEIVWDKGRDFATVRKVLSMPQVNIVKKTEVQTGGFSKESILPKRNSDKLIARKKDWDPKKYGGFDSPTVAYSVLVVAKVEKGKSKKLKSVKELLGITIMERSSFEKNPIDFLEAKGYKEVKKDLIIKLPKYSLFELENGRKRMLASAGELQKGNELALPSKYVNFLYLASHYEKLKGSPEDNEQKQLFVEQHKHYLDEIIEQISEFSKRVILADANLDKVLSAYNKHRDKPIREQAENIIHLFTLTNLGAPAAFKYFDTTIDRKRYTSTKEVLDATLIHQSITGLYETRIDLSQLGGDGGGGSGSSEAAAKGGTLNIEDEHRLHETSKEPDVSLGSTWLSDFPQAWAETGGMGLAVRQAPLIIPLKATSTPVSIKQYPMSQEARLGIKPHIQRLLDQGILVPCQSPWNTPLLPVKKPGTNDYRPVQDLREVNKRVEDIHPTVPNPYNLLSGLPPSHQWYTVLDLKDAFFCLRLHPTSQPLFAFEWRDPEMGISGQLTWTRLPQGFKNSPTLFNEALHRDLADFRIQHPDLILLQYVDDLLLAATSELDCQQGTRALLQTLGNLGYRASAKKAQICQKQVKYLGYLLKEGQRWLTEARKETVMGQPTPKTPRQLREFLGTAGFCRLWIPGFAEMAAPLYPLTKPGTLFNWGPDQQKAYQEIKQALLTAPALGLPDLTKPFELFVDEKQGYAKGVLTQKLGPWRRPVAYLSKKLDPVAAGWPPCLRMVAAIAVLTKDAGKLTMGQPLVILAPHAVEALVKQPPDRWLSNARMTHYQALLLDTDRVQFGPVVALNPATLLPLPEEGLQHNCLDILAEAHGTRPDLTDQPLPDADHTWYTDGSSLLQEGQRKAGAAVTTETEVIWAKALPAGTSAQRAELIALTQALKMAEGKKLNVYTDSRYAFATAHIHGEIYRRRGWLTSEGKEIKNKDEILALLKALFLPKRLSIIHCPGHQKGHSAEARGNRMADQAARKAAITETPDTSTLLAGKRTADGSEFEKRTADGSEFESPKKKAKVE

SEQ ID NO: 2748 - protein, 2096 aa, synthetic construct
MPAAKRVKLDGGDKKYSIGLDIGTNSVGWAVITDEYKVPSKKFKVLGNTDRHSIKKNLIGALLFDSGETAEATRLKRTARRRYTRRKNRICYLQEIFSNEMAKVDDSFFHRLEESFLVEEDKKHERHPIFGNIVDEVAYHEKYPTIYHLRKKLVDSTDKADLRLIYLALAHMIKFRGHFLIEGDLNPDNSDVDKLFIQLVQTYNQLFEENPINASGVDAKAILSARLSKSRRLENLIAQLPGEKKNGLFGNLIALSLGLTPNFKSNFDLAEDAKLQLSKDTYDDDLDNLLAQIGDQYADLFLAAKNLSDAILLSDILRVNTEITKAPLSASMIKRYDEHHQDLTLLKALVRQQLPEKYKEIFFDQSKNGYAGYIDGGASQEEFYKFIKPILEKMDGTEELLVKLNREDLLRKQRTFDNGSIPHQIHLGELHAILRRQEDFYPFLKDNREKIEKILTFRIPYYVGPLARGNSRFAWMTRKSEETITPWNFEEVVDKGASAQSFIERMTNFDKNLPNEKVLPKHSLLYEYFTVYNELTKVKYVTEGMRKPAFLSGEQKKAIVDLLFKTNRKVTVKQLKEDYFKKIECFDSVEISGVEDRFNASLGTYHDLLKIIKDKDFLDNEENEDILEDIVLTLTLFEDREMIEERLKTYAHLFDDKVMKQLKRRRYTGWGRLSRKLINGIRDKQSGKTILDFLKSDGFANRNFMQLIHDDSLTFKEDIQKAQVSGQGDSLHEHIANLAGSPAIKKGILQTVKVVDELVKVMGRHKPENIVIEMARENQTTQKGQKNSRERMKRIEEGIKELGSQILKEHPVENTQLQNEKLYLYYLQNGRDMYVDQELDINRLSDYDVDHIVPQSFLKDDSIDNKVLTRSDKARGKSDNVPSEEVVKKMKNYWRQLLNAKLITQRKFDNLTKAERGGLSELDKAGFIKRQLVETRQITKHVAQILDSRMNTKYDENDKLIREVKVITLKSKLVSDFRKDFQFYKVREINNYHHAHDAYLNAVVGTALIKKYPKLESEFVYGDYKVYDVRKMIAKSEQEIGKATAKYFFYSNIMNFFKTEITLANGEIRKRPLIETNGETGEIVWDKGRDFATVRKVLSMPQVNIVKKTEVQTGGFSKESILPKRNSDKLIARKKDWDPKKYGGFDSPTVAYSVLVVAKVEKGKSKKLKSVKELLGITIMERSSFEKNPIDFLEAKGYKEVKKDLIIKLPKYSLFELENGRKRMLASAGELQKGNELALPSKYVNFLYLASHYEKLKGSPEDNEQKQLFVEQHKHYLDEIIEQISEFSKRVILADANLDKVLSAYNKHRDKPIREQAENIIHLFTLTNLGAPAAFKYFDTTIDRKRYTSTKEVLDATLIHQSITGLYETRIDLSQLGGDGGPAPGSSEAAAKGGTLNIEDEHRLHETSKEPDVSLGSTWLSDFPQAWAETGGMGLAVRQAPLIIPLKATSTPVSIKQYPMSQEARLGIKPHIQRLLDQGILVPCQSPWNTPLLPVKKPGTNDYRPVQDLREVNKRVEDIHPTVPNPYNLLSGLPPSHQWYTVLDLKDAFFCLRLHPTSQPLFAFEWRDPEMGISGQLTWTRLPQGFKNSPTLFNEALHRDLADFRIQHPDLILLQYVDDLLLAATSELDCQQGTRALLQTLGNLGYRASAKKAQICQKQVKYLGYLLKEGQRWLTEARKETVMGQPTPKTPRQLREFLGTAGFCRLWIPGFAEMAAPLYPLTKPGTLFNWGPDQQKAYQEIKQALLTAPALGLPDLTKPFELFVDEKQGYAKGVLTQKLGPWRRPVAYLSKKLDPVAAGWPPCLRMVAAIAVLTKDAGKLTMGQPLVILAPHAVEALVKQPPDRWLSNARMTHYQALLLDTDRVQFGPVVALNPATLLPLPEEGLQHNCLDILAEAHGTRPDLTDQPLPDADHTWYTDGSSLLQEGQRKAGAAVTTETEVIWAKALPAGTSAQRAELIALTQALKMAEGKKLNVYTDSRYAFATAHIHGEIYRRRGWLTSEGKEIKNKDEILALLKALFLPKRLSIIHCPGHQKGHSAEARGNRMADQAARKAAITETPDTSTLLAGKRTADGSEFEKRTADGSEFESPKKKAKVE

SEQ ID NO: 2749 - protein, 2095 aa, synthetic construct
MPAAKRVKLDGGDKKYSIGLDIGTNSVGWAVITDEYKVPSKKFKVLGNTDRHSIKKNLIGALLFDSGETAEATRLKRTARRRYTRRKNRICYLQEIFSNEMAKVDDSFFHRLEESFLVEEDKKHERHPIFGNIVDEVAYHEKYPTIYHLRKKLVDSTDKADLRLIYLALAHMIKFRGHFLIEGDLNPDNSDVDKLFIQLVQTYNQLFEENPINASGVDAKAILSARLSKSRRLENLIAQLPGEKKNGLFGNLIALSLGLTPNFKSNFDLAEDAKLQLSKDTYDDDLDNLLAQIGDQYADLFLAAKNLSDAILLSDILRVNTEITKAPLSASMIKRYDEHHQDLTLLKALVRQQLPEKYKEIFFDQSKNGYAGYIDGGASQEEFYKFIKPILEKMDGTEELLVKLNREDLLRKQRTFDNGSIPHQIHLGELHAILRRQEDFYPFLKDNREKIEKILTFRIPYYVGPLARGNSRFAWMTRKSEETITPWNFEEVVDKGASAQSFIERMTNFDKNLPNEKVLPKHSLLYEYFTVYNELTKVKYVTEGMRKPAFLSGEQKKAIVDLLFKTNRKVTVKQLKEDYFKKIECFDSVEISGVEDRFNASLGTYHDLLKIIKDKDFLDNEENEDILEDIVLTLTLFEDREMIEERLKTYAHLFDDKVMKQLKRRRYTGWGRLSRKLINGIRDKQSGKTILDFLKSDGFANRNFMQLIHDDSLTFKEDIQKAQVSGQGDSLHEHIANLAGSPAIKKGILQTVKVVDELVKVMGRHKPENIVIEMARENQTTQKGQKNSRERMKRIEEGIKELGSQILKEHPVENTQLQNEKLYLYYLQNGRDMYVDQELDINRLSDYDVDHIVPQSFLKDDSIDNKVLTRSDKARGKSDNVPSEEVVKKMKNYWRQLLNAKLITQRKFDNLTKAERGGLSELDKAGFIKRQLVETRQITKHVAQILDSRMNTKYDENDKLIREVKVITLKSKLVSDFRKDFQFYKVREINNYHHAHDAYLNAVVGTALIKKYPKLESEFVYGDYKVYDVRKMIAKSEQEIGKATAKYFFYSNIMNFFKTEITLANGEIRKRPLIETNGETGEIVWDKGRDFATVRKVLSMPQVNIVKKTEVQTGGFSKESILPKRNSDKLIARKKDWDPKKYGGFDSPTVAYSVLVVAKVEKGKSKKLKSVKELLGITIMERSSFEKNPIDFLEAKGYKEVKKDLIIKLPKYSLFELENGRKRMLASAGELQKGNELALPSKYVNFLYLASHYEKLKGSPEDNEQKQLFVEQHKHYLDEIIEQISEFSKRVILADANLDKVLSAYNKHRDKPIREQAENIIHLFTLTNLGAPAAFKYFDTTIDRKRYTSTKEVLDATLIHQSITGLYETRIDLSQLGGDGGGGGGSGGGGSGGTLNIEDEHRLHETSKEPDVSLGSTWLSDFPQAWAETGGMGLAVRQAPLIIPLKATSTPVSIKQYPMSQEARLGIKPHIQRLLDQGILVPCQSPWNTPLLPVKKPGTNDYRPVQDLREVNKRVEDIHPTVPNPYNLLSGLPPSHQWYTVLDLKDAFFCLRLHPTSQPLFAFEWRDPEMGISGQLTWTRLPQGFKNSPTLFNEALHRDLADFRIQHPDLILLQYVDDLLLAATSELDCQQGTRALLQTLGNLGYRASAKKAQICQKQVKYLGYLLKEGQRWLTEARKETVMGQPTPKTPRQLREFLGTAGFCRLWIPGFAEMAAPLYPLTKPGTLFNWGPDQQKAYQEIKQALLTAPALGLPDLTKPFELFVDEKQGYAKGVLTQKLGPWRRPVAYLSKKLDPVAAGWPPCLRMVAAIAVLTKDAGKLTMGQPLVILAPHAVEALVKQPPDRWLSNARMTHYQALLLDTDRVQFGPVVALNPATLLPLPEEGLQHNCLDILAEAHGTRPDLTDQPLPDADHTWYTDGSSLLQEGQRKAGAAVTTETEVIWAKALPAGTSAQRAELIALTQALKMAEGKKLNVYTDSRYAFATAHIHGEIYRRRGWLTSEGKEIKNKDEILALLKALFLPKRLSIIHCPGHQKGHSAEARGNRMADQAARKAAITETPDTSTLLAGKRTADGSEFEKRTADGSEFESPKKKAKVE

SEQ ID NO: 2750 - protein, 2091 aa, synthetic construct
MPAAKRVKLDGGDKKYSIGLDIGTNSVGWAVITDEYKVPSKKFKVLGNTDRHSIKKNLIGALLFDSGETAEATRLKRTARRRYTRRKNRICYLQEIFSNEMAKVDDSFFHRLEESFLVEEDKKHERHPIFGNIVDEVAYHEKYPTIYHLRKKLVDSTDKADLRLIYLALAHMIKFRGHFLIEGDLNPDNSDVDKLFIQLVQTYNQLFEENPINASGVDAKAILSARLSKSRRLENLIAQLPGEKKNGLFGNLIALSLGLTPNFKSNFDLAEDAKLQLSKDTYDDDLDNLLAQIGDQYADLFLAAKNLSDAILLSDILRVNTEITKAPLSASMIKRYDEHHQDLTLLKALVRQQLPEKYKEIFFDQSKNGYAGYIDGGASQEEFYKFIKPILEKMDGTEELLVKLNREDLLRKQRTFDNGSIPHQIHLGELHAILRRQEDFYPFLKDNREKIEKILTFRIPYYVGPLARGNSRFAWMTRKSEETITPWNFEEVVDKGASAQSFIERMTNFDKNLPNEKVLPKHSLLYEYFTVYNELTKVKYVTEGMRKPAFLSGEQKKAIVDLLFKTNRKVTVKQLKEDYFKKIECFDSVEISGVEDRFNASLGTYHDLLKIIKDKDFLDNEENEDILEDIVLTLTLFEDREMIEERLKTYAHLFDDKVMKQLKRRRYTGWGRLSRKLINGIRDKQSGKTILDFLKSDGFANRNFMQLIHDDSLTFKEDIQKAQVSGQGDSLHEHIANLAGSPAIKKGILQTVKVVDELVKVMGRHKPENIVIEMARENQTTQKGQKNSRERMKRIEEGIKELGSQILKEHPVENTQLQNEKLYLYYLQNGRDMYVDQELDINRLSDYDVDHIVPQSFLKDDSIDNKVLTRSDKARGKSDNVPSEEVVKKMKNYWRQLLNAKLITQRKFDNLTKAERGGLSELDKAGFIKRQLVETRQITKHVAQILDSRMNTKYDENDKLIREVKVITLKSKLVSDFRKDFQFYKVREINNYHHAHDAYLNAVVGTALIKKYPKLESEFVYGDYKVYDVRKMIAKSEQEIGKATAKYFFYSNIMNFFKTEITLANGEIRKRPLIETNGETGEIVWDKGRDFATVRKVLSMPQVNIVKKTEVQTGGFSKESILPKRNSDKLIARKKDWDPKKYGGFDSPTVAYSVLVVAKVEKGKSKKLKSVKELLGITIMERSSFEKNPIDFLEAKGYKEVKKDLIIKLPKYSLFELENGRKRMLASAGELQKGNELALPSKYVNFLYLASHYEKLKGSPEDNEQKQLFVEQHKHYLDEIIEQISEFSKRVILADANLDKVLSAYNKHRDKPIREQAENIIHLFTLTNLGAPAAFKYFDTTIDRKRYTSTKEVLDATLIHQSITGLYETRIDLSQLGGDGGGSSPAPGGTLNIEDEHRLHETSKEPDVSLGSTWLSDFPQAWAETGGMGLAVRQAPLIIPLKATSTPVSIKQYPMSQEARLGIKPHIQRLLDQGILVPCQSPWNTPLLPVKKPGTNDYRPVQDLREVNKRVEDIHPTVPNPYNLLSGLPPSHQWYTVLDLKDAFFCLRLHPTSQPLFAFEWRDPEMGISGQLTWTRLPQGFKNSPTLFNEALHRDLADFRIQHPDLILLQYVDDLLLAATSELDCQQGTRALLQTLGNLGYRASAKKAQICQKQVKYLGYLLKEGQRWLTEARKETVMGQPTPKTPRQLREFLGTAGFCRLWIPGFAEMAAPLYPLTKPGTLFNWGPDQQKAYQEIKQALLTAPALGLPDLTKPFELFVDEKQGYAKGVLTQKLGPWRRPVAYLSKKLDPVAAGWPPCLRMVAAIAVLTKDAGKLTMGQPLVILAPHAVEALVKQPPDRWLSNARMTHYQALLLDTDRVQFGPVVALNPATLLPLPEEGLQHNCLDILAEAHGTRPDLTDQPLPDADHTWYTDGSSLLQEGQRKAGAAVTTETEVIWAKALPAGTSAQRAELIALTQALKMAEGKKLNVYTDSRYAFATAHIHGEIYRRRGWLTSEGKEIKNKDEILALLKALFLPKRLSIIHCPGHQKGHSAEARGNRMADQAARKAAITETPDTSTLLAGKRTADGSEFEKRTADGSEFESPKKKAKVE

SEQ ID NO: 2751 - protein, 2096 aa, synthetic construct
MPAAKRVKLDGGDKKYSIGLDIGTNSVGWAVITDEYKVPSKKFKVLGNTDRHSIKKNLIGALLFDSGETAEATRLKRTARRRYTRRKNRICYLQEIFSNEMAKVDDSFFHRLEESFLVEEDKKHERHPIFGNIVDEVAYHEKYPTIYHLRKKLVDSTDKADLRLIYLALAHMIKFRGHFLIEGDLNPDNSDVDKLFIQLVQTYNQLFEENPINASGVDAKAILSARLSKSRRLENLIAQLPGEKKNGLFGNLIALSLGLTPNFKSNFDLAEDAKLQLSKDTYDDDLDNLLAQIGDQYADLFLAAKNLSDAILLSDILRVNTEITKAPLSASMIKRYDEHHQDLTLLKALVRQQLPEKYKEIFFDQSKNGYAGYIDGGASQEEFYKFIKPILEKMDGTEELLVKLNREDLLRKQRTFDNGSIPHQIHLGELHAILRRQEDFYPFLKDNREKIEKILTFRIPYYVGPLARGNSRFAWMTRKSEETITPWNFEEVVDKGASAQSFIERMTNFDKNLPNEKVLPKHSLLYEYFTVYNELTKVKYVTEGMRKPAFLSGEQKKAIVDLLFKTNRKVTVKQLKEDYFKKIECFDSVEISGVEDRFNASLGTYHDLLKIIKDKDFLDNEENEDILEDIVLTLTLFEDREMIEERLKTYAHLFDDKVMKQLKRRRYTGWGRLSRKLINGIRDKQSGKTILDFLKSDGFANRNFMQLIHDDSLTFKEDIQKAQVSGQGDSLHEHIANLAGSPAIKKGILQTVKVVDELVKVMGRHKPENIVIEMARENQTTQKGQKNSRERMKRIEEGIKELGSQILKEHPVENTQLQNEKLYLYYLQNGRDMYVDQELDINRLSDYDVDHIVPQSFLKDDSIDNKVLTRSDKARGKSDNVPSEEVVKKMKNYWRQLLNAKLITQRKFDNLTKAERGGLSELDKAGFIKRQLVETRQITKHVAQILDSRMNTKYDENDKLIREVKVITLKSKLVSDFRKDFQFYKVREINNYHHAHDAYLNAVVGTALIKKYPKLESEFVYGDYKVYDVRKMIAKSEQEIGKATAKYFFYSNIMNFFKTEITLANGEIRKRPLIETNGETGEIVWDKGRDFATVRKVLSMPQVNIVKKTEVQTGGFSKESILPKRNSDKLIARKKDWDPKKYGGFDSPTVAYSVLVVAKVEKGKSKKLKSVKELLGITIMERSSFEKNPIDFLEAKGYKEVKKDLIIKLPKYSLFELENGRKRMLASAGELQKGNELALPSKYVNFLYLASHYEKLKGSPEDNEQKQLFVEQHKHYLDEIIEQISEFSKRVILADANLDKVLSAYNKHRDKPIREQAENIIHLFTLTNLGAPAAFKYFDTTIDRKRYTSTKEVLDATLIHQSITGLYETRIDLSQLGGDGGGGSGGGEAAAKGGTLNIEDEHRLHETSKEPDVSLGSTWLSDFPQAWAETGGMGLAVRQAPLIIPLKATSTPVSIKQYPMSQEARLGIKPHIQRLLDQGILVPCQSPWNTPLLPVKKPGTNDYRPVQDLREVNKRVEDIHPTVPNPYNLLSGLPPSHQWYTVLDLKDAFFCLRLHPTSQPLFAFEWRDPEMGISGQLTWTRLPQGFKNSPTLFNEALHRDLADFRIQHPDLILLQYVDDLLLAATSELDCQQGTRALLQTLGNLGYRASAKKAQICQKQVKYLGYLLKEGQRWLTEARKETVMGQPTPKTPRQLREFLGTAGFCRLWIPGFAEMAAPLYPLTKPGTLFNWGPDQQKAYQEIKQALLTAPALGLPDLTKPFELFVDEKQGYAKGVLTQKLGPWRRPVAYLSKKLDPVAAGWPPCLRMVAAIAVLTKDAGKLTMGQPLVILAPHAVEALVKQPPDRWLSNARMTHYQALLLDTDRVQFGPVVALNPATLLPLPEEGLQHNCLDILAEAHGTRPDLTDQPLPDADHTWYTDGSSLLQEGQRKAGAAVTTETEVIWAKALPAGTSAQRAELIALTQALKMAEGKKLNVYTDSRYAFATAHIHGEIYRRRGWLTSEGKEIKNKDEILALLKALFLPKRLSIIHCPGHQKGHSAEARGNRMADQAARKAAITETPDTSTLLAGKRTADGSEFEKRTADGSEFESPKKKAKVE

SEQ ID NO: 2752 - protein, 2094 aa, synthetic construct
MPAAKRVKLDGGDKKYSIGLDIGTNSVGWAVITDEYKVPSKKFKVLGNTDRHSIKKNLIGALLFDSGETAEATRLKRTARRRYTRRKNRICYLQEIFSNEMAKVDDSFFHRLEESFLVEEDKKHERHPIFGNIVDEVAYHEKYPTIYHLRKKLVDSTDKADLRLIYLALAHMIKFRGHFLIEGDLNPDNSDVDKLFIQLVQTYNQLFEENPINASGVDAKAILSARLSKSRRLENLIAQLPGEKKNGLFGNLIALSLGLTPNFKSNFDLAEDAKLQLSKDTYDDDLDNLLAQIGDQYADLFLAAKNLSDAILLSDILRVNTEITKAPLSASMIKRYDEHHQDLTLLKALVRQQLPEKYKEIFFDQSKNGYAGYIDGGASQEEFYKFIKPILEKMDGTEELLVKLNREDLLRKQRTFDNGSIPHQIHLGELHAILRRQEDFYPFLKDNREKIEKILTFRIPYYVGPLARGNSRFAWMTRKSEETITPWNFEEVVDKGASAQSFIERMTNFDKNLPNEKVLPKHSLLYEYFTVYNELTKVKYVTEGMRKPAFLSGEQKKAIVDLLFKTNRKVTVKQLKEDYFKKIECFDSVEISGVEDRFNASLGTYHDLLKIIKDKDFLDNEENEDILEDIVLTLTLFEDREMIEERLKTYAHLFDDKVMKQLKRRRYTGWGRLSRKLINGIRDKQSGKTILDFLKSDGFANRNFMQLIHDDSLTFKEDIQKAQVSGQGDSLHEHIANLAGSPAIKKGILQTVKVVDELVKVMGRHKPENIVIEMARENQTTQKGQKNSRERMKRIEEGIKELGSQILKEHPVENTQLQNEKLYLYYLQNGRDMYVDQELDINRLSDYDVDHIVPQSFLKDDSIDNKVLTRSDKARGKSDNVPSEEVVKKMKNYWRQLLNAKLITQRKFDNLTKAERGGLSELDKAGFIKRQLVETRQITKHVAQILDSRMNTKYDENDKLIREVKVITLKSKLVSDFRKDFQFYKVREINNYHHAHDAYLNAVVGTALIKKYPKLESEFVYGDYKVYDVRKMIAKSEQEIGKATAKYFFYSNIMNFFKTEITLANGEIRKRPLIETNGETGEIVWDKGRDFATVRKVLSMPQVNIVKKTEVQTGGFSKESILPKRNSDKLIARKKDWDPKKYGGFDSPTVAYSVLVVAKVEKGKSKKLKSVKELLGITIMERSSFEKNPIDFLEAKGYKEVKKDLIIKLPKYSLFELENGRKRMLASAGELQKGNELALPSKYVNFLYLASHYEKLKGSPEDNEQKQLFVEQHKHYLDEIIEQISEFSKRVILADANLDKVLSAYNKHRDKPIREQAENIIHLFTLTNLGAPAAFKYFDTTIDRKRYTSTKEVLDATLIHQSITGLYETRIDLSQLGGDGGGGSPAPGSSGGTLNIEDEHRLHETSKEPDVSLGSTWLSDFPQAWAETGGMGLAVRQAPLIIPLKATSTPVSIKQYPMSQEARLGIKPHIQRLLDQGILVPCQSPWNTPLLPVKKPGTNDYRPVQDLREVNKRVEDIHPTVPNPYNLLSGLPPSHQWYTVLDLKDAFFCLRLHPTSQPLFAFEWRDPEMGISGQLTWTRLPQGFKNSPTLFNEALHRDLADFRIQHPDLILLQYVDDLLLAATSELDCQQGTRALLQTLGNLGYRASAKKAQICQKQVKYLGYLLKEGQRWLTEARKETVMGQPTPKTPRQLREFLGTAGFCRLWIPGFAEMAAPLYPLTKPGTLFNWGPDQQKAYQEIKQALLTAPALGLPDLTKPFELFVDEKQGYAKGVLTQKLGPWRRPVAYLSKKLDPVAAGWPPCLRMVAAIAVLTKDAGKLTMGQPLVILAPHAVEALVKQPPDRWLSNARMTHYQALLLDTDRVQFGPVVALNPATLLPLPEEGLQHNCLDILAEAHGTRPDLTDQPLPDADHTWYTDGSSLLQEGQRKAGAAVTTETEVIWAKALPAGTSAQRAELIALTQALKMAEGKKLNVYTDSRYAFATAHIHGEIYRRRGWLTSEGKEIKNKDEILALLKALFLPKRLSIIHCPGHQKGHSAEARGNRMADQAARKAAITETPDTSTLLAGKRTADGSEFEKRTADGSEFESPKKKAKVE

SEQ ID NO: 2753 - protein, 2096 aa, synthetic construct
MPAAKRVKLDGGDKKYSIGLDIGTNSVGWAVITDEYKVPSKKFKVLGNTDRHSIKKNLIGALLFDSGETAEATRLKRTARRRYTRRKNRICYLQEIFSNEMAKVDDSFFHRLEESFLVEEDKKHERHPIFGNIVDEVAYHEKYPTIYHLRKKLVDSTDKADLRLIYLALAHMIKFRGHFLIEGDLNPDNSDVDKLFIQLVQTYNQLFEENPINASGVDAKAILSARLSKSRRLENLIAQLPGEKKNGLFGNLIALSLGLTPNFKSNFDLAEDAKLQLSKDTYDDDLDNLLAQIGDQYADLFLAAKNLSDAILLSDILRVNTEITKAPLSASMIKRYDEHHQDLTLLKALVRQQLPEKYKEIFFDQSKNGYAGYIDGGASQEEFYKFIKPILEKMDGTEELLVKLNREDLLRKQRTFDNGSIPHQIHLGELHAILRRQEDFYPFLKDNREKIEKILTFRIPYYVGPLARGNSRFAWMTRKSEETITPWNFEEVVDKGASAQSFIERMTNFDKNLPNEKVLPKHSLLYEYFTVYNELTKVKYVTEGMRKPAFLSGEQKKAIVDLLFKTNRKVTVKQLKEDYFKKIECFDSVEISGVEDRFNASLGTYHDLLKIIKDKDFLDNEENEDILEDIVLTLTLFEDREMIEERLKTYAHLFDDKVMKQLKRRRYTGWGRLSRKLINGIRDKQSGKTILDFLKSDGFANRNFMQLIHDDSLTFKEDIQKAQVSGQGDSLHEHIANLAGSPAIKKGILQTVKVVDELVKVMGRHKPENIVIEMARENQTTQKGQKNSRERMKRIEEGIKELGSQILKEHPVENTQLQNEKLYLYYLQNGRDMYVDQELDINRLSDYDVDHIVPQSFLKDDSIDNKVLTRSDKARGKSDNVPSEEVVKKMKNYWRQLLNAKLITQRKFDNLTKAERGGLSELDKAGFIKRQLVETRQITKHVAQILDSRMNTKYDENDKLIREVKVITLKSKLVSDFRKDFQFYKVREINNYHHAHDAYLNAVVGTALIKKYPKLESEFVYGDYKVYDVRKMIAKSEQEIGKATAKYFFYSNIMNFFKTEITLANGEIRKRPLIETNGETGEIVWDKGRDFATVRKVLSMPQVNIVKKTEVQTGGFSKESILPKRNSDKLIARKKDWDPKKYGGFDSPTVAYSVLVVAKVEKGKSKKLKSVKELLGITIMERSSFEKNPIDFLEAKGYKEVKKDLIIKLPKYSLFELENGRKRMLASAGELQKGNELALPSKYVNFLYLASHYEKLKGSPEDNEQKQLFVEQHKHYLDEIIEQISEFSKRVILADANLDKVLSAYNKHRDKPIREQAENIIHLFTLTNLGAPAAFKYFDTTIDRKRYTSTKEVLDATLIHQSITGLYETRIDLSQLGGDGGPAPGGSEAAAKGGTLNIEDEHRLHETSKEPDVSLGSTWLSDFPQAWAETGGMGLAVRQAPLIIPLKATSTPVSIKQYPMSQEARLGIKPHIQRLLDQGILVPCQSPWNTPLLPVKKPGTNDYRPVQDLREVNKRVEDIHPTVPNPYNLLSGLPPSHQWYTVLDLKDAFFCLRLHPTSQPLFAFEWRDPEMGISGQLTWTRLPQGFKNSPTLFNEALHRDLADFRIQHPDLILLQYVDDLLLAATSELDCQQGTRALLQTLGNLGYRASAKKAQICQKQVKYLGYLLKEGQRWLTEARKETVMGQPTPKTPRQLREFLGTAGFCRLWIPGFAEMAAPLYPLTKPGTLFNWGPDQQKAYQEIKQALLTAPALGLPDLTKPFELFVDEKQGYAKGVLTQKLGPWRRPVAYLSKKLDPVAAGWPPCLRMVAAIAVLTKDAGKLTMGQPLVILAPHAVEALVKQPPDRWLSNARMTHYQALLLDTDRVQFGPVVALNPATLLPLPEEGLQHNCLDILAEAHGTRPDLTDQPLPDADHTWYTDGSSLLQEGQRKAGAAVTTETEVIWAKALPAGTSAQRAELIALTQALKMAEGKKLNVYTDSRYAFATAHIHGEIYRRRGWLTSEGKEIKNKDEILALLKALFLPKRLSIIHCPGHQKGHSAEARGNRMADQAARKAAITETPDTSTLLAGKRTADGSEFEKRTADGSEFESPKKKAKVE

SEQ ID NO: 2754 - protein, 2090 aa, synthetic construct
MPAAKRVKLDGGDKKYSIGLDIGTNSVGWAVITDEYKVPSKKFKVLGNTDRHSIKKNLIGALLFDSGETAEATRLKRTARRRYTRRKNRICYLQEIFSNEMAKVDDSFFHRLEESFLVEEDKKHERHPIFGNIVDEVAYHEKYPTIYHLRKKLVDSTDKADLRLIYLALAHMIKFRGHFLIEGDLNPDNSDVDKLFIQLVQTYNQLFEENPINASGVDAKAILSARLSKSRRLENLIAQLPGEKKNGLFGNLIALSLGLTPNFKSNFDLAEDAKLQLSKDTYDDDLDNLLAQIGDQYADLFLAAKNLSDAILLSDILRVNTEITKAPLSASMIKRYDEHHQDLTLLKALVRQQLPEKYKEIFFDQSKNGYAGYIDGGASQEEFYKFIKPILEKMDGTEELLVKLNREDLLRKQRTFDNGSIPHQIHLGELHAILRRQEDFYPFLKDNREKIEKILTFRIPYYVGPLARGNSRFAWMTRKSEETITPWNFEEVVDKGASAQSFIERMTNFDKNLPNEKVLPKHSLLYEYFTVYNELTKVKYVTEGMRKPAFLSGEQKKAIVDLLFKTNRKVTVKQLKEDYFKKIECFDSVEISGVEDRFNASLGTYHDLLKIIKDKDFLDNEENEDILEDIVLTLTLFEDREMIEERLKTYAHLFDDKVMKQLKRRRYTGWGRLSRKLINGIRDKQSGKTILDFLKSDGFANRNFMQLIHDDSLTFKEDIQKAQVSGQGDSLHEHIANLAGSPAIKKGILQTVKVVDELVKVMGRHKPENIVIEMARENQTTQKGQKNSRERMKRIEEGIKELGSQILKEHPVENTQLQNEKLYLYYLQNGRDMYVDQELDINRLSDYDVDHIVPQSFLKDDSIDNKVLTRSDKARGKSDNVPSEEVVKKMKNYWRQLLNAKLITQRKFDNLTKAERGGLSELDKAGFIKRQLVETRQITKHVAQILDSRMNTKYDENDKLIREVKVITLKSKLVSDFRKDFQFYKVREINNYHHAHDAYLNAVVGTALIKKYPKLESEFVYGDYKVYDVRKMIAKSEQEIGKATAKYFFYSNIMNFFKTEITLANGEIRKRPLIETNGETGEIVWDKGRDFATVRKVLSMPQVNIVKKTEVQTGGFSKESILPKRNSDKLIARKKDWDPKKYGGFDSPTVAYSVLVVAKVEKGKSKKLKSVKELLGITIMERSSFEKNPIDFLEAKGYKEVKKDLIIKLPKYSLFELENGRKRMLASAGELQKGNELALPSKYVNFLYLASHYEKLKGSPEDNEQKQLFVEQHKHYLDEIIEQISEFSKRVILADANLDKVLSAYNKHRDKPIREQAENIIHLFTLTNLGAPAAFKYFDTTIDRKRYTSTKEVLDATLIHQSITGLYETRIDLSQLGGDGGGGGGSGGTLNIEDEHRLHETSKEPDVSLGSTWLSDFPQAWAETGGMGLAVRQAPLIIPLKATSTPVSIKQYPMSQEARLGIKPHIQRLLDQGILVPCQSPWNTPLLPVKKPGTNDYRPVQDLREVNKRVEDIHPTVPNPYNLLSGLPPSHQWYTVLDLKDAFFCLRLHPTSQPLFAFEWRDPEMGISGQLTWTRLPQGFKNSPTLFNEALHRDLADFRIQHPDLILLQYVDDLLLAATSELDCQQGTRALLQTLGNLGYRASAKKAQICQKQVKYLGYLLKEGQRWLTEARKETVMGQPTPKTPRQLREFLGTAGFCRLWIPGFAEMAAPLYPLTKPGTLFNWGPDQQKAYQEIKQALLTAPALGLPDLTKPFELFVDEKQGYAKGVLTQKLGPWRRPVAYLSKKLDPVAAGWPPCLRMVAAIAVLTKDAGKLTMGQPLVILAPHAVEALVKQPPDRWLSNARMTHYQALLLDTDRVQFGPVVALNPATLLPLPEEGLQHNCLDILAEAHGTRPDLTDQPLPDADHTWYTDGSSLLQEGQRKAGAAVTTETEVIWAKALPAGTSAQRAELIALTQALKMAEGKKLNVYTDSRYAFATAHIHGEIYRRRGWLTSEGKEIKNKDEILALLKALFLPKRLSIIHCPGHQKGHSAEARGNRMADQAARKAAITETPDTSTLLAGKRTADGSEFEKRTADGSEFESPKKKAKVE

SEQ ID NO: 2755 - protein, 2096 aa, synthetic construct
MPAAKRVKLDGGDKKYSIGLDIGTNSVGWAVITDEYKVPSKKFKVLGNTDRHSIKKNLIGALLFDSGETAEATRLKRTARRRYTRRKNRICYLQEIFSNEMAKVDDSFFHRLEESFLVEEDKKHERHPIFGNIVDEVAYHEKYPTIYHLRKKLVDSTDKADLRLIYLALAHMIKFRGHFLIEGDLNPDNSDVDKLFIQLVQTYNQLFEENPINASGVDAKAILSARLSKSRRLENLIAQLPGEKKNGLFGNLIALSLGLTPNFKSNFDLAEDAKLQLSKDTYDDDLDNLLAQIGDQYADLFLAAKNLSDAILLSDILRVNTEITKAPLSASMIKRYDEHHQDLTLLKALVRQQLPEKYKEIFFDQSKNGYAGYIDGGASQEEFYKFIKPILEKMDGTEELLVKLNREDLLRKQRTFDNGSIPHQIHLGELHAILRRQEDFYPFLKDNREKIEKILTFRIPYYVGPLARGNSRFAWMTRKSEETITPWNFEEVVDKGASAQSFIERMTNFDKNLPNEKVLPKHSLLYEYFTVYNELTKVKYVTEGMRKPAFLSGEQKKAIVDLLFKTNRKVTVKQLKEDYFKKIECFDSVEISGVEDRFNASLGTYHDLLKIIKDKDFLDNEENEDILEDIVLTLTLFEDREMIEERLKTYAHLFDDKVMKQLKRRRYTGWGRLSRKLINGIRDKQSGKTILDFLKSDGFANRNFMQLIHDDSLTFKEDIQKAQVSGQGDSLHEHIANLAGSPAIKKGILQTVKVVDELVKVMGRHKPENIVIEMARENQTTQKGQKNSRERMKRIEEGIKELGSQILKEHPVENTQLQNEKLYLYYLQNGRDMYVDQELDINRLSDYDVDHIVPQSFLKDDSIDNKVLTRSDKARGKSDNVPSEEVVKKMKNYWRQLLNAKLITQRKFDNLTKAERGGLSELDKAGFIKRQLVETRQITKHVAQILDSRMNTKYDENDKLIREVKVITLKSKLVSDFRKDFQFYKVREINNYHHAHDAYLNAVVGTALIKKYPKLESEFVYGDYKVYDVRKMIAKSEQEIGKATAKYFFYSNIMNFFKTEITLANGEIRKRPLIETNGETGEIVWDKGRDFATVRKVLSMPQVNIVKKTEVQTGGFSKESILPKRNSDKLIARKKDWDPKKYGGFDSPTVAYSVLVVAKVEKGKSKKLKSVKELLGITIMERSSFEKNPIDFLEAKGYKEVKKDLIIKLPKYSLFELENGRKRMLASAGELQKGNELALPSKYVNFLYLASHYEKLKGSPEDNEQKQLFVEQHKHYLDEIIEQISEFSKRVILADANLDKVLSAYNKHRDKPIREQAENIIHLFTLTNLGAPAAFKYFDTTIDRKRYTSTKEVLDATLIHQSITGLYETRIDLSQLGGDGGEAAAKGGSPAPGGTLNIEDEHRLHETSKEPDVSLGSTWLSDFPQAWAETGGMGLAVRQAPLIIPLKATSTPVSIKQYPMSQEARLGIKPHIQRLLDQGILVPCQSPWNTPLLPVKKPGTNDYRPVQDLREVNKRVEDIHPTVPNPYNLLSGLPPSHQWYTVLDLKDAFFCLRLHPTSQPLFAFEWRDPEMGISGQLTWTRLPQGFKNSPTLFNEALHRDLADFRIQHPDLILLQYVDDLLLAATSELDCQQGTRALLQTLGNLGYRASAKKAQICQKQVKYLGYLLKEGQRWLTEARKETVMGQPTPKTPRQLREFLGTAGFCRLWIPGFAEMAAPLYPLTKPGTLFNWGPDQQKAYQEIKQALLTAPALGLPDLTKPFELFVDEKQGYAKGVLTQKLGPWRRPVAYLSKKLDPVAAGWPPCLRMVAAIAVLTKDAGKLTMGQPLVILAPHAVEALVKQPPDRWLSNARMTHYQALLLDTDRVQFGPVVALNPATLLPLPEEGLQHNCLDILAEAHGTRPDLTDQPLPDADHTWYTDGSSLLQEGQRKAGAAVTTETEVIWAKALPAGTSAQRAELIALTQALKMAEGKKLNVYTDSRYAFATAHIHGEIYRRRGWLTSEGKEIKNKDEILALLKALFLPKRLSIIHCPGHQKGHSAEARGNRMADQAARKAAITETPDTSTLLAGKRTADGSEFEKRTADGSEFESPKKKAKVE

SEQ ID NO: 2756 - protein, 2096 aa, synthetic construct
MPAAKRVKLDGGDKKYSIGLDIGTNSVGWAVITDEYKVPSKKFKVLGNTDRHSIKKNLIGALLFDSGETAEATRLKRTARRRYTRRKNRICYLQEIFSNEMAKVDDSFFHRLEESFLVEEDKKHERHPIFGNIVDEVAYHEKYPTIYHLRKKLVDSTDKADLRLIYLALAHMIKFRGHFLIEGDLNPDNSDVDKLFIQLVQTYNQLFEENPINASGVDAKAILSARLSKSRRLENLIAQLPGEKKNGLFGNLIALSLGLTPNFKSNFDLAEDAKLQLSKDTYDDDLDNLLAQIGDQYADLFLAAKNLSDAILLSDILRVNTEITKAPLSASMIKRYDEHHQDLTLLKALVRQQLPEKYKEIFFDQSKNGYAGYIDGGASQEEFYKFIKPILEKMDGTEELLVKLNREDLLRKQRTFDNGSIPHQIHLGELHAILRRQEDFYPFLKDNREKIEKILTFRIPYYVGPLARGNSRFAWMTRKSEETITPWNFEEVVDKGASAQSFIERMTNFDKNLPNEKVLPKHSLLYEYFTVYNELTKVKYVTEGMRKPAFLSGEQKKAIVDLLFKTNRKVTVKQLKEDYFKKIECFDSVEISGVEDRFNASLGTYHDLLKIIKDKDFLDNEENEDILEDIVLTLTLFEDREMIEERLKTYAHLFDDKVMKQLKRRRYTGWGRLSRKLINGIRDKQSGKTILDFLKSDGFANRNFMQLIHDDSLTFKEDIQKAQVSGQGDSLHEHIANLAGSPAIKKGILQTVKVVDELVKVMGRHKPENIVIEMARENQTTQKGQKNSRERMKRIEEGIKELGSQILKEHPVENTQLQNEKLYLYYLQNGRDMYVDQELDINRLSDYDVDHIVPQSFLKDDSIDNKVLTRSDKARGKSDNVPSEEVVKKMKNYWRQLLNAKLITQRKFDNLTKAERGGLSELDKAGFIKRQLVETRQITKHVAQILDSRMNTKYDENDKLIREVKVITLKSKLVSDFRKDFQFYKVREINNYHHAHDAYLNAVVGTALIKKYPKLESEFVYGDYKVYDVRKMIAKSEQEIGKATAKYFFYSNIMNFFKTEITLANGEIRKRPLIETNGETGEIVWDKGRDFATVRKVLSMPQVNIVKKTEVQTGGFSKESILPKRNSDKLIARKKDWDPKKYGGFDSPTVAYSVLVVAKVEKGKSKKLKSVKELLGITIMERSSFEKNPIDFLEAKGYKEVKKDLIIKLPKYSLFELENGRKRMLASAGELQKGNELALPSKYVNFLYLASHYEKLKGSPEDNEQKQLFVEQHKHYLDEIIEQISEFSKRVILADANLDKVLSAYNKHRDKPIREQAENIIHLFTLTNLGAPAAFKYFDTTIDRKRYTSTKEVLDATLIHQSITGLYETRIDLSQLGGDGGPAPEAAAKGGSGGTLNIEDEHRLHETSKEPDVSLGSTWLSDFPQAWAETGGMGLAVRQAPLIIPLKATSTPVSIKQYPMSQEARLGIKPHIQRLLDQGILVPCQSPWNTPLLPVKKPGTNDYRPVQDLREVNKRVEDIHPTVPNPYNLLSGLPPSHQWYTVLDLKDAFFCLRLHPTSQPLFAFEWRDPEMGISGQLTWTRLPQGFKNSPTLFNEALHRDLADFRIQHPDLILLQYVDDLLLAATSELDCQQGTRALLQTLGNLGYRASAKKAQICQKQVKYLGYLLKEGQRWLTEARKETVMGQPTPKTPRQLREFLGTAGFCRLWIPGFAEMAAPLYPLTKPGTLFNWGPDQQKAYQEIKQALLTAPALGLPDLTKPFELFVDEKQGYAKGVLTQKLGPWRRPVAYLSKKLDPVAAGWPPCLRMVAAIAVLTKDAGKLTMGQPLVILAPHAVEALVKQPPDRWLSNARMTHYQALLLDTDRVQFGPVVALNPATLLPLPEEGLQHNCLDILAEAHGTRPDLTDQPLPDADHTWYTDGSSLLQEGQRKAGAAVTTETEVIWAKALPAGTSAQRAELIALTQALKMAEGKKLNVYTDSRYAFATAHIHGEIYRRRGWLTSEGKEIKNKDEILALLKALFLPKRLSIIHCPGHQKGHSAEARGNRMADQAARKAAITETPDTSTLLAGKRTADGSEFEKRTADGSEFESPKKKAKVE

SEQ ID NO: 2757 - protein, 2094 aa, synthetic construct
MPAAKRVKLDGGDKKYSIGLDIGTNSVGWAVITDEYKVPSKKFKVLGNTDRHSIKKNLIGALLFDSGETAEATRLKRTARRRYTRRKNRICYLQEIFSNEMAKVDDSFFHRLEESFLVEEDKKHERHPIFGNIVDEVAYHEKYPTIYHLRKKLVDSTDKADLRLIYLALAHMIKFRGHFLIEGDLNPDNSDVDKLFIQLVQTYNQLFEENPINASGVDAKAILSARLSKSRRLENLIAQLPGEKKNGLFGNLIALSLGLTPNFKSNFDLAEDAKLQLSKDTYDDDLDNLLAQIGDQYADLFLAAKNLSDAILLSDILRVNTEITKAPLSASMIKRYDEHHQDLTLLKALVRQQLPEKYKEIFFDQSKNGYAGYIDGGASQEEFYKFIKPILEKMDGTEELLVKLNREDLLRKQRTFDNGSIPHQIHLGELHAILRRQEDFYPFLKDNREKIEKILTFRIPYYVGPLARGNSRFAWMTRKSEETITPWNFEEVVDKGASAQSFIERMTNFDKNLPNEKVLPKHSLLYEYFTVYNELTKVKYVTEGMRKPAFLSGEQKKAIVDLLFKTNRKVTVKQLKEDYFKKIECFDSVEISGVEDRFNASLGTYHDLLKIIKDKDFLDNEENEDILEDIVLTLTLFEDREMIEERLKTYAHLFDDKVMKQLKRRRYTGWGRLSRKLINGIRDKQSGKTILDFLKSDGFANRNFMQLIHDDSLTFKEDIQKAQVSGQGDSLHEHIANLAGSPAIKKGILQTVKVVDELVKVMGRHKPENIVIEMARENQTTQKGQKNSRERMKRIEEGIKELGSQILKEHPVENTQLQNEKLYLYYLQNGRDMYVDQELDINRLSDYDVDHIVPQSFLKDDSIDNKVLTRSDKARGKSDNVPSEEVVKKMKNYWRQLLNAKLITQRKFDNLTKAERGGLSELDKAGFIKRQLVETRQITKHVAQILDSRMNTKYDENDKLIREVKVITLKSKLVSDFRKDFQFYKVREINNYHHAHDAYLNAVVGTALIKKYPKLESEFVYGDYKVYDVRKMIAKSEQEIGKATAKYFFYSNIMNFFKTEITLANGEIRKRPLIETNGETGEIVWDKGRDFATVRKVLSMPQVNIVKKTEVQTGGFSKESILPKRNSDKLIARKKDWDPKKYGGFDSPTVAYSVLVVAKVEKGKSKKLKSVKELLGITIMERSSFEKNPIDFLEAKGYKEVKKDLIIKLPKYSLFELENGRKRMLASAGELQKGNELALPSKYVNFLYLASHYEKLKGSPEDNEQKQLFVEQHKHYLDEIIEQISEFSKRVILADANLDKVLSAYNKHRDKPIREQAENIIHLFTLTNLGAPAAFKYFDTTIDRKRYTSTKEVLDATLIHQSITGLYETRIDLSQLGGDGGPAPGSSGGSGGTLNIEDEHRLHETSKEPDVSLGSTWLSDFPQAWAETGGMGLAVRQAPLIIPLKATSTPVSIKQYPMSQEARLGIKPHIQRLLDQGILVPCQSPWNTPLLPVKKPGTNDYRPVQDLREVNKRVEDIHPTVPNPYNLLSGLPPSHQWYTVLDLKDAFFCLRLHPTSQPLFAFEWRDPEMGISGQLTWTRLPQGFKNSPTLFNEALHRDLADFRIQHPDLILLQYVDDLLLAATSELDCQQGTRALLQTLGNLGYRASAKKAQICQKQVKYLGYLLKEGQRWLTEARKETVMGQPTPKTPRQLREFLGTAGFCRLWIPGFAEMAAPLYPLTKPGTLFNWGPDQQKAYQEIKQALLTAPALGLPDLTKPFELFVDEKQGYAKGVLTQKLGPWRRPVAYLSKKLDPVAAGWPPCLRMVAAIAVLTKDAGKLTMGQPLVILAPHAVEALVKQPPDRWLSNARMTHYQALLLDTDRVQFGPVVALNPATLLPLPEEGLQHNCLDILAEAHGTRPDLTDQPLPDADHTWYTDGSSLLQEGQRKAGAAVTTETEVIWAKALPAGTSAQRAELIALTQALKMAEGKKLNVYTDSRYAFATAHIHGEIYRRRGWLTSEGKEIKNKDEILALLKALFLPKRLSIIHCPGHQKGHSAEARGNRMADQAARKAAITETPDTSTLLAGKRTADGSEFEKRTADGSEFESPKKKAKVE

SEQ ID NO: 2758 - protein, 2096 aa, synthetic construct
MPAAKRVKLDGGDKKYSIGLDIGTNSVGWAVITDEYKVPSKKFKVLGNTDRHSIKKNLIGALLFDSGETAEATRLKRTARRRYTRRKNRICYLQEIFSNEMAKVDDSFFHRLEESFLVEEDKKHERHPIFGNIVDEVAYHEKYPTIYHLRKKLVDSTDKADLRLIYLALAHMIKFRGHFLIEGDLNPDNSDVDKLFIQLVQTYNQLFEENPINASGVDAKAILSARLSKSRRLENLIAQLPGEKKNGLFGNLIALSLGLTPNFKSNFDLAEDAKLQLSKDTYDDDLDNLLAQIGDQYADLFLAAKNLSDAILLSDILRVNTEITKAPLSASMIKRYDEHHQDLTLLKALVRQQLPEKYKEIFFDQSKNGYAGYIDGGASQEEFYKFIKPILEKMDGTEELLVKLNREDLLRKQRTFDNGSIPHQIHLGELHAILRRQEDFYPFLKDNREKIEKILTFRIPYYVGPLARGNSRFAWMTRKSEETITPWNFEEVVDKGASAQSFIERMTNFDKNLPNEKVLPKHSLLYEYFTVYNELTKVKYVTEGMRKPAFLSGEQKKAIVDLLFKTNRKVTVKQLKEDYFKKIECFDSVEISGVEDRFNASLGTYHDLLKIIKDKDFLDNEENEDILEDIVLTLTLFEDREMIEERLKTYAHLFDDKVMKQLKRRRYTGWGRLSRKLINGIRDKQSGKTILDFLKSDGFANRNFMQLIHDDSLTFKEDIQKAQVSGQGDSLHEHIANLAGSPAIKKGILQTVKVVDELVKVMGRHKPENIVIEMARENQTTQKGQKNSRERMKRIEEGIKELGSQILKEHPVENTQLQNEKLYLYYLQNGRDMYVDQELDINRLSDYDVDHIVPQSFLKDDSIDNKVLTRSDKARGKSDNVPSEEVVKKMKNYWRQLLNAKLITQRKFDNLTKAERGGLSELDKAGFIKRQLVETRQITKHVAQILDSRMNTKYDENDKLIREVKVITLKSKLVSDFRKDFQFYKVREINNYHHAHDAYLNAVVGTALIKKYPKLESEFVYGDYKVYDVRKMIAKSEQEIGKATAKYFFYSNIMNFFKTEITLANGEIRKRPLIETNGETGEIVWDKGRDFATVRKVLSMPQVNIVKKTEVQTGGFSKESILPKRNSDKLIARKKDWDPKKYGGFDSPTVAYSVLVVAKVEKGKSKKLKSVKELLGITIMERSSFEKNPIDFLEAKGYKEVKKDLIIKLPKYSLFELENGRKRMLASAGELQKGNELALPSKYVNFLYLASHYEKLKGSPEDNEQKQLFVEQHKHYLDEIIEQISEFSKRVILADANLDKVLSAYNKHRDKPIREQAENIIHLFTLTNLGAPAAFKYFDTTIDRKRYTSTKEVLDATLIHQSITGLYETRIDLSQLGGDGGGSSPAPEAAAKGGTLNIEDEHRLHETSKEPDVSLGSTWLSDFPQAWAETGGMGLAVRQAPLIIPLKATSTPVSIKQYPMSQEARLGIKPHIQRLLDQGILVPCQSPWNTPLLPVKKPGTNDYRPVQDLREVNKRVEDIHPTVPNPYNLLSGLPPSHQWYTVLDLKDAFFCLRLHPTSQPLFAFEWRDPEMGISGQLTWTRLPQGFKNSPTLFNEALHRDLADFRIQHPDLILLQYVDDLLLAATSELDCQQGTRALLQTLGNLGYRASAKKAQICQKQVKYLGYLLKEGQRWLTEARKETVMGQPTPKTPRQLREFLGTAGFCRLWIPGFAEMAAPLYPLTKPGTLFNWGPDQQKAYQEIKQALLTAPALGLPDLTKPFELFVDEKQGYAKGVLTQKLGPWRRPVAYLSKKLDPVAAGWPPCLRMVAAIAVLTKDAGKLTMGQPLVILAPHAVEALVKQPPDRWLSNARMTHYQALLLDTDRVQFGPVVALNPATLLPLPEEGLQHNCLDILAEAHGTRPDLTDQPLPDADHTWYTDGSSLLQEGQRKAGAAVTTETEVIWAKALPAGTSAQRAELIALTQALKMAEGKKLNVYTDSRYAFATAHIHGEIYRRRGWLTSEGKEIKNKDEILALLKALFLPKRLSIIHCPGHQKGHSAEARGNRMADQAARKAAITETPDTSTLLAGKRTADGSEFEKRTADGSEFESPKKKAKVE

SEQ ID NO: 2759 - protein, 2096 aa, synthetic construct
MPAAKRVKLDGGDKKYSIGLDIGTNSVGWAVITDEYKVPSKKFKVLGNTDRHSIKKNLIGALLFDSGETAEATRLKRTARRRYTRRKNRICYLQEIFSNEMAKVDDSFFHRLEESFLVEEDKKHERHPIFGNIVDEVAYHEKYPTIYHLRKKLVDSTDKADLRLIYLALAHMIKFRGHFLIEGDLNPDNSDVDKLFIQLVQTYNQLFEENPINASGVDAKAILSARLSKSRRLENLIAQLPGEKKNGLFGNLIALSLGLTPNFKSNFDLAEDAKLQLSKDTYDDDLDNLLAQIGDQYADLFLAAKNLSDAILLSDILRVNTEITKAPLSASMIKRYDEHHQDLTLLKALVRQQLPEKYKEIFFDQSKNGYAGYIDGGASQEEFYKFIKPILEKMDGTEELLVKLNREDLLRKQRTFDNGSIPHQIHLGELHAILRRQEDFYPFLKDNREKIEKILTFRIPYYVGPLARGNSRFAWMTRKSEETITPWNFEEVVDKGASAQSFIERMTNFDKNLPNEKVLPKHSLLYEYFTVYNELTKVKYVTEGMRKPAFLSGEQKKAIVDLLFKTNRKVTVKQLKEDYFKKIECFDSVEISGVEDRFNASLGTYHDLLKIIKDKDFLDNEENEDILEDIVLTLTLFEDREMIEERLKTYAHLFDDKVMKQLKRRRYTGWGRLSRKLINGIRDKQSGKTILDFLKSDGFANRNFMQLIHDDSLTFKEDIQKAQVSGQGDSLHEHIANLAGSPAIKKGILQTVKVVDELVKVMGRHKPENIVIEMARENQTTQKGQKNSRERMKRIEEGIKELGSQILKEHPVENTQLQNEKLYLYYLQNGRDMYVDQELDINRLSDYDVDHIVPQSFLKDDSIDNKVLTRSDKARGKSDNVPSEEVVKKMKNYWRQLLNAKLITQRKFDNLTKAERGGLSELDKAGFIKRQLVETRQITKHVAQILDSRMNTKYDENDKLIREVKVITLKSKLVSDFRKDFQFYKVREINNYHHAHDAYLNAVVGTALIKKYPKLESEFVYGDYKVYDVRKMIAKSEQEIGKATAKYFFYSNIMNFFKTEITLANGEIRKRPLIETNGETGEIVWDKGRDFATVRKVLSMPQVNIVKKTEVQTGGFSKESILPKRNSDKLIARKKDWDPKKYGGFDSPTVAYSVLVVAKVEKGKSKKLKSVKELLGITIMERSSFEKNPIDFLEAKGYKEVKKDLIIKLPKYSLFELENGRKRMLASAGELQKGNELALPSKYVNFLYLASHYEKLKGSPEDNEQKQLFVEQHKHYLDEIIEQISEFSKRVILADANLDKVLSAYNKHRDKPIREQAENIIHLFTLTNLGAPAAFKYFDTTIDRKRYTSTKEVLDATLIHQSITGLYETRIDLSQLGGDGGPAPEAAAKGSSGGTLNIEDEHRLHETSKEPDVSLGSTWLSDFPQAWAETGGMGLAVRQAPLIIPLKATSTPVSIKQYPMSQEARLGIKPHIQRLLDQGILVPCQSPWNTPLLPVKKPGTNDYRPVQDLREVNKRVEDIHPTVPNPYNLLSGLPPSHQWYTVLDLKDAFFCLRLHPTSQPLFAFEWRDPEMGISGQLTWTRLPQGFKNSPTLFNEALHRDLADFRIQHPDLILLQYVDDLLLAATSELDCQQGTRALLQTLGNLGYRASAKKAQICQKQVKYLGYLLKEGQRWLTEARKETVMGQPTPKTPRQLREFLGTAGFCRLWIPGFAEMAAPLYPLTKPGTLFNWGPDQQKAYQEIKQALLTAPALGLPDLTKPFELFVDEKQGYAKGVLTQKLGPWRRPVAYLSKKLDPVAAGWPPCLRMVAAIAVLTKDAGKLTMGQPLVILAPHAVEALVKQPPDRWLSNARMTHYQALLLDTDRVQFGPVVALNPATLLPLPEEGLQHNCLDILAEAHGTRPDLTDQPLPDADHTWYTDGSSLLQEGQRKAGAAVTTETEVIWAKALPAGTSAQRAELIALTQALKMAEGKKLNVYTDSRYAFATAHIHGEIYRRRGWLTSEGKEIKNKDEILALLKALFLPKRLSIIHCPGHQKGHSAEARGNRMADQAARKAAITETPDTSTLLAGKRTADGSEFEKRTADGSEFESPKKKAKVE

SEQ ID NO: 2760 - protein, 2096 aa, synthetic construct
MPAAKRVKLDGGDKKYSIGLDIGTNSVGWAVITDEYKVPSKKFKVLGNTDRHSIKKNLIGALLFDSGETAEATRLKRTARRRYTRRKNRICYLQEIFSNEMAKVDDSFFHRLEESFLVEEDKKHERHPIFGNIVDEVAYHEKYPTIYHLRKKLVDSTDKADLRLIYLALAHMIKFRGHFLIEGDLNPDNSDVDKLFIQLVQTYNQLFEENPINASGVDAKAILSARLSKSRRLENLIAQLPGEKKNGLFGNLIALSLGLTPNFKSNFDLAEDAKLQLSKDTYDDDLDNLLAQIGDQYADLFLAAKNLSDAILLSDILRVNTEITKAPLSASMIKRYDEHHQDLTLLKALVRQQLPEKYKEIFFDQSKNGYAGYIDGGASQEEFYKFIKPILEKMDGTEELLVKLNREDLLRKQRTFDNGSIPHQIHLGELHAILRRQEDFYPFLKDNREKIEKILTFRIPYYVGPLARGNSRFAWMTRKSEETITPWNFEEVVDKGASAQSFIERMTNFDKNLPNEKVLPKHSLLYEYFTVYNELTKVKYVTEGMRKPAFLSGEQKKAIVDLLFKTNRKVTVKQLKEDYFKKIECFDSVEISGVEDRFNASLGTYHDLLKIIKDKDFLDNEENEDILEDIVLTLTLFEDREMIEERLKTYAHLFDDKVMKQLKRRRYTGWGRLSRKLINGIRDKQSGKTILDFLKSDGFANRNFMQLIHDDSLTFKEDIQKAQVSGQGDSLHEHIANLAGSPAIKKGILQTVKVVDELVKVMGRHKPENIVIEMARENQTTQKGQKNSRERMKRIEEGIKELGSQILKEHPVENTQLQNEKLYLYYLQNGRDMYVDQELDINRLSDYDVDHIVPQSFLKDDSIDNKVLTRSDKARGKSDNVPSEEVVKKMKNYWRQLLNAKLITQRKFDNLTKAERGGLSELDKAGFIKRQLVETRQITKHVAQILDSRMNTKYDENDKLIREVKVITLKSKLVSDFRKDFQFYKVREINNYHHAHDAYLNAVVGTALIKKYPKLESEFVYGDYKVYDVRKMIAKSEQEIGKATAKYFFYSNIMNFFKTEITLANGEIRKRPLIETNGETGEIVWDKGRDFATVRKVLSMPQVNIVKKTEVQTGGFSKESILPKRNSDKLIARKKDWDPKKYGGFDSPTVAYSVLVVAKVEKGKSKKLKSVKELLGITIMERSSFEKNPIDFLEAKGYKEVKKDLIIKLPKYSLFELENGRKRMLASAGELQKGNELALPSKYVNFLYLASHYEKLKGSPEDNEQKQLFVEQHKHYLDEIIEQISEFSKRVILADANLDKVLSAYNKHRDKPIREQAENIIHLFTLTNLGAPAAFKYFDTTIDRKRYTSTKEVLDATLIHQSITGLYETRIDLSQLGGDGGGSSGGSEAAAKGGTLNIEDEHRLHETSKEPDVSLGSTWLSDFPQAWAETGGMGLAVRQAPLIIPLKATSTPVSIKQYPMSQEARLGIKPHIQRLLDQGILVPCQSPWNTPLLPVKKPGTNDYRPVQDLREVNKRVEDIHPTVPNPYNLLSGLPPSHQWYTVLDLKDAFFCLRLHPTSQPLFAFEWRDPEMGISGQLTWTRLPQGFKNSPTLFNEALHRDLADFRIQHPDLILLQYVDDLLLAATSELDCQQGTRALLQTLGNLGYRASAKKAQICQKQVKYLGYLLKEGQRWLTEARKETVMGQPTPKTPRQLREFLGTAGFCRLWIPGFAEMAAPLYPLTKPGTLFNWGPDQQKAYQEIKQALLTAPALGLPDLTKPFELFVDEKQGYAKGVLTQKLGPWRRPVAYLSKKLDPVAAGWPPCLRMVAAIAVLTKDAGKLTMGQPLVILAPHAVEALVKQPPDRWLSNARMTHYQALLLDTDRVQFGPVVALNPATLLPLPEEGLQHNCLDILAEAHGTRPDLTDQPLPDADHTWYTDGSSLLQEGQRKAGAAVTTETEVIWAKALPAGTSAQRAELIALTQALKMAEGKKLNVYTDSRYAFATAHIHGEIYRRRGWLTSEGKEIKNKDEILALLKALFLPKRLSIIHCPGHQKGHSAEARGNRMADQAARKAAITETPDTSTLLAGKRTADGSEFEKRTADGSEFESPKKKAKVE

SEQ ID NO: 2761 - protein, 2096 aa, synthetic construct
MPAAKRVKLDGGDKKYSIGLDIGTNSVGWAVITDEYKVPSKKFKVLGNTDRHSIKKNLIGALLFDSGETAEATRLKRTARRRYTRRKNRICYLQEIFSNEMAKVDDSFFHRLEESFLVEEDKKHERHPIFGNIVDEVAYHEKYPTIYHLRKKLVDSTDKADLRLIYLALAHMIKFRGHFLIEGDLNPDNSDVDKLFIQLVQTYNQLFEENPINASGVDAKAILSARLSKSRRLENLIAQLPGEKKNGLFGNLIALSLGLTPNFKSNFDLAEDAKLQLSKDTYDDDLDNLLAQIGDQYADLFLAAKNLSDAILLSDILRVNTEITKAPLSASMIKRYDEHHQDLTLLKALVRQQLPEKYKEIFFDQSKNGYAGYIDGGASQEEFYKFIKPILEKMDGTEELLVKLNREDLLRKQRTFDNGSIPHQIHLGELHAILRRQEDFYPFLKDNREKIEKILTFRIPYYVGPLARGNSRFAWMTRKSEETITPWNFEEVVDKGASAQSFIERMTNFDKNLPNEKVLPKHSLLYEYFTVYNELTKVKYVTEGMRKPAFLSGEQKKAIVDLLFKTNRKVTVKQLKEDYFKKIECFDSVEISGVEDRFNASLGTYHDLLKIIKDKDFLDNEENEDILEDIVLTLTLFEDREMIEERLKTYAHLFDDKVMKQLKRRRYTGWGRLSRKLINGIRDKQSGKTILDFLKSDGFANRNFMQLIHDDSLTFKEDIQKAQVSGQGDSLHEHIANLAGSPAIKKGILQTVKVVDELVKVMGRHKPENIVIEMARENQTTQKGQKNSRERMKRIEEGIKELGSQILKEHPVENTQLQNEKLYLYYLQNGRDMYVDQELDINRLSDYDVDHIVPQSFLKDDSIDNKVLTRSDKARGKSDNVPSEEVVKKMKNYWRQLLNAKLITQRKFDNLTKAERGGLSELDKAGFIKRQLVETRQITKHVAQILDSRMNTKYDENDKLIREVKVITLKSKLVSDFRKDFQFYKVREINNYHHAHDAYLNAVVGTALIKKYPKLESEFVYGDYKVYDVRKMIAKSEQEIGKATAKYFFYSNIMNFFKTEITLANGEIRKRPLIETNGETGEIVWDKGRDFATVRKVLSMPQVNIVKKTEVQTGGFSKESILPKRNSDKLIARKKDWDPKKYGGFDSPTVAYSVLVVAKVEKGKSKKLKSVKELLGITIMERSSFEKNPIDFLEAKGYKEVKKDLIIKLPKYSLFELENGRKRMLASAGELQKGNELALPSKYVNFLYLASHYEKLKGSPEDNEQKQLFVEQHKHYLDEIIEQISEFSKRVILADANLDKVLSAYNKHRDKPIREQAENIIHLFTLTNLGAPAAFKYFDTTIDRKRYTSTKEVLDATLIHQSITGLYETRIDLSQLGGDGGGGSEAAAKGSSGGTLNIEDEHRLHETSKEPDVSLGSTWLSDFPQAWAETGGMGLAVRQAPLIIPLKATSTPVSIKQYPMSQEARLGIKPHIQRLLDQGILVPCQSPWNTPLLPVKKPGTNDYRPVQDLREVNKRVEDIHPTVPNPYNLLSGLPPSHQWYTVLDLKDAFFCLRLHPTSQPLFAFEWRDPEMGISGQLTWTRLPQGFKNSPTLFNEALHRDLADFRIQHPDLILLQYVDDLLLAATSELDCQQGTRALLQTLGNLGYRASAKKAQICQKQVKYLGYLLKEGQRWLTEARKETVMGQPTPKTPRQLREFLGTAGFCRLWIPGFAEMAAPLYPLTKPGTLFNWGPDQQKAYQEIKQALLTAPALGLPDLTKPFELFVDEKQGYAKGVLTQKLGPWRRPVAYLSKKLDPVAAGWPPCLRMVAAIAVLTKDAGKLTMGQPLVILAPHAVEALVKQPPDRWLSNARMTHYQALLLDTDRVQFGPVVALNPATLLPLPEEGLQHNCLDILAEAHGTRPDLTDQPLPDADHTWYTDGSSLLQEGQRKAGAAVTTETEVIWAKALPAGTSAQRAELIALTQALKMAEGKKLNVYTDSRYAFATAHIHGEIYRRRGWLTSEGKEIKNKDEILALLKALFLPKRLSIIHCPGHQKGHSAEARGNRMADQAARKAAITETPDTSTLLAGKRTADGSEFEKRTADGSEFESPKKKAKVE

SEQ ID NO: 2762 - protein, 2094 aa, synthetic construct
MPAAKRVKLDGGDKKYSIGLDIGTNSVGWAVITDEYKVPSKKFKVLGNTDRHSIKKNLIGALLFDSGETAEATRLKRTARRRYTRRKNRICYLQEIFSNEMAKVDDSFFHRLEESFLVEEDKKHERHPIFGNIVDEVAYHEKYPTIYHLRKKLVDSTDKADLRLIYLALAHMIKFRGHFLIEGDLNPDNSDVDKLFIQLVQTYNQLFEENPINASGVDAKAILSARLSKSRRLENLIAQLPGEKKNGLFGNLIALSLGLTPNFKSNFDLAEDAKLQLSKDTYDDDLDNLLAQIGDQYADLFLAAKNLSDAILLSDILRVNTEITKAPLSASMIKRYDEHHQDLTLLKALVRQQLPEKYKEIFFDQSKNGYAGYIDGGASQEEFYKFIKPILEKMDGTEELLVKLNREDLLRKQRTFDNGSIPHQIHLGELHAILRRQEDFYPFLKDNREKIEKILTFRIPYYVGPLARGNSRFAWMTRKSEETITPWNFEEVVDKGASAQSFIERMTNFDKNLPNEKVLPKHSLLYEYFTVYNELTKVKYVTEGMRKPAFLSGEQKKAIVDLLFKTNRKVTVKQLKEDYFKKIECFDSVEISGVEDRFNASLGTYHDLLKIIKDKDFLDNEENEDILEDIVLTLTLFEDREMIEERLKTYAHLFDDKVMKQLKRRRYTGWGRLSRKLINGIRDKQSGKTILDFLKSDGFANRNFMQLIHDDSLTFKEDIQKAQVSGQGDSLHEHIANLAGSPAIKKGILQTVKVVDELVKVMGRHKPENIVIEMARENQTTQKGQKNSRERMKRIEEGIKELGSQILKEHPVENTQLQNEKLYLYYLQNGRDMYVDQELDINRLSDYDVDHIVPQSFLKDDSIDNKVLTRSDKARGKSDNVPSEEVVKKMKNYWRQLLNAKLITQRKFDNLTKAERGGLSELDKAGFIKRQLVETRQITKHVAQILDSRMNTKYDENDKLIREVKVITLKSKLVSDFRKDFQFYKVREINNYHHAHDAYLNAVVGTALIKKYPKLESEFVYGDYKVYDVRKMIAKSEQEIGKATAKYFFYSNIMNFFKTEITLANGEIRKRPLIETNGETGEIVWDKGRDFATVRKVLSMPQVNIVKKTEVQTGGFSKESILPKRNSDKLIARKKDWDPKKYGGFDSPTVAYSVLVVAKVEKGKSKKLKSVKELLGITIMERSSFEKNPIDFLEAKGYKEVKKDLIIKLPKYSLFELENGRKRMLASAGELQKGNELALPSKYVNFLYLASHYEKLKGSPEDNEQKQLFVEQHKHYLDEIIEQISEFSKRVILADANLDKVLSAYNKHRDKPIREQAENIIHLFTLTNLGAPAAFKYFDTTIDRKRYTSTKEVLDATLIHQSITGLYETRIDLSQLGGDGGGGSPAPGGGGGTLNIEDEHRLHETSKEPDVSLGSTWLSDFPQAWAETGGMGLAVRQAPLIIPLKATSTPVSIKQYPMSQEARLGIKPHIQRLLDQGILVPCQSPWNTPLLPVKKPGTNDYRPVQDLREVNKRVEDIHPTVPNPYNLLSGLPPSHQWYTVLDLKDAFFCLRLHPTSQPLFAFEWRDPEMGISGQLTWTRLPQGFKNSPTLFNEALHRDLADFRIQHPDLILLQYVDDLLLAATSELDCQQGTRALLQTLGNLGYRASAKKAQICQKQVKYLGYLLKEGQRWLTEARKETVMGQPTPKTPRQLREFLGTAGFCRLWIPGFAEMAAPLYPLTKPGTLFNWGPDQQKAYQEIKQALLTAPALGLPDLTKPFELFVDEKQGYAKGVLTQKLGPWRRPVAYLSKKLDPVAAGWPPCLRMVAAIAVLTKDAGKLTMGQPLVILAPHAVEALVKQPPDRWLSNARMTHYQALLLDTDRVQFGPVVALNPATLLPLPEEGLQHNCLDILAEAHGTRPDLTDQPLPDADHTWYTDGSSLLQEGQRKAGAAVTTETEVIWAKALPAGTSAQRAELIALTQALKMAEGKKLNVYTDSRYAFATAHIHGEIYRRRGWLTSEGKEIKNKDEILALLKALFLPKRLSIIHCPGHQKGHSAEARGNRMADQAARKAAITETPDTSTLLAGKRTADGSEFEKRTADGSEFESPKKKAKVE

SEQ ID NO: 2763 - protein, 2097 aa, synthetic construct
MPAAKRVKLDGGDKKYSIGLDIGTNSVGWAVITDEYKVPSKKFKVLGNTDRHSIKKNLIGALLFDSGETAEATRLKRTARRRYTRRKNRICYLQEIFSNEMAKVDDSFFHRLEESFLVEEDKKHERHPIFGNIVDEVAYHEKYPTIYHLRKKLVDSTDKADLRLIYLALAHMIKFRGHFLIEGDLNPDNSDVDKLFIQLVQTYNQLFEENPINASGVDAKAILSARLSKSRRLENLIAQLPGEKKNGLFGNLIALSLGLTPNFKSNFDLAEDAKLQLSKDTYDDDLDNLLAQIGDQYADLFLAAKNLSDAILLSDILRVNTEITKAPLSASMIKRYDEHHQDLTLLKALVRQQLPEKYKEIFFDQSKNGYAGYIDGGASQEEFYKFIKPILEKMDGTEELLVKLNREDLLRKQRTFDNGSIPHQIHLGELHAILRRQEDFYPFLKDNREKIEKILTFRIPYYVGPLARGNSRFAWMTRKSEETITPWNFEEVVDKGASAQSFIERMTNFDKNLPNEKVLPKHSLLYEYFTVYNELTKVKYVTEGMRKPAFLSGEQKKAIVDLLFKTNRKVTVKQLKEDYFKKIECFDSVEISGVEDRFNASLGTYHDLLKIIKDKDFLDNEENEDILEDIVLTLTLFEDREMIEERLKTYAHLFDDKVMKQLKRRRYTGWGRLSRKLINGIRDKQSGKTILDFLKSDGFANRNFMQLIHDDSLTFKEDIQKAQVSGQGDSLHEHIANLAGSPAIKKGILQTVKVVDELVKVMGRHKPENIVIEMARENQTTQKGQKNSRERMKRIEEGIKELGSQILKEHPVENTQLQNEKLYLYYLQNGRDMYVDQELDINRLSDYDVDHIVPQSFLKDDSIDNKVLTRSDKARGKSDNVPSEEVVKKMKNYWRQLLNAKLITQRKFDNLTKAERGGLSELDKAGFIKRQLVETRQITKHVAQILDSRMNTKYDENDKLIREVKVITLKSKLVSDFRKDFQFYKVREINNYHHAHDAYLNAVVGTALIKKYPKLESEFVYGDYKVYDVRKMIAKSEQEIGKATAKYFFYSNIMNFFKTEITLANGEIRKRPLIETNGETGEIVWDKGRDFATVRKVLSMPQVNIVKKTEVQTGGFSKESILPKRNSDKLIARKKDWDPKKYGGFDSPTVAYSVLVVAKVEKGKSKKLKSVKELLGITIMERSSFEKNPIDFLEAKGYKEVKKDLIIKLPKYSLFELENGRKRMLASAGELQKGNELALPSKYVNFLYLASHYEKLKGSPEDNEQKQLFVEQHKHYLDEIIEQISEFSKRVILADANLDKVLSAYNKHRDKPIREQAENIIHLFTLTNLGAPAAFKYFDTTIDRKRYTSTKEVLDATLIHQSITGLYETRIDLSQLGGDGGGGSGGSGGSGGSGGTLNIEDEHRLHETSKEPDVSLGSTWLSDFPQAWAETGGMGLAVRQAPLIIPLKATSTPVSIKQYPMSQEARLGIKPHIQRLLDQGILVPCQSPWNTPLLPVKKPGTNDYRPVQDLREVNKRVEDIHPTVPNPYNLLSGLPPSHQWYTVLDLKDAFFCLRLHPTSQPLFAFEWRDPEMGISGQLTWTRLPQGFKNSPTLFNEALHRDLADFRIQHPDLILLQYVDDLLLAATSELDCQQGTRALLQTLGNLGYRASAKKAQICQKQVKYLGYLLKEGQRWLTEARKETVMGQPTPKTPRQLREFLGTAGFCRLWIPGFAEMAAPLYPLTKPGTLFNWGPDQQKAYQEIKQALLTAPALGLPDLTKPFELFVDEKQGYAKGVLTQKLGPWRRPVAYLSKKLDPVAAGWPPCLRMVAAIAVLTKDAGKLTMGQPLVILAPHAVEALVKQPPDRWLSNARMTHYQALLLDTDRVQFGPVVALNPATLLPLPEEGLQHNCLDILAEAHGTRPDLTDQPLPDADHTWYTDGSSLLQEGQRKAGAAVTTETEVIWAKALPAGTSAQRAELIALTQALKMAEGKKLNVYTDSRYAFATAHIHGEIYRRRGWLTSEGKEIKNKDEILALLKALFLPKRLSIIHCPGHQKGHSAEARGNRMADQAARKAAITETPDTSTLLAGKRTADGSEFEKRTADGSEFESPKKKAKVE

SEQ ID NO: 2764 - protein, 2096 aa, synthetic construct
MPAAKRVKLDGGDKKYSIGLDIGTNSVGWAVITDEYKVPSKKFKVLGNTDRHSIKKNLIGALLFDSGETAEATRLKRTARRRYTRRKNRICYLQEIFSNEMAKVDDSFFHRLEESFLVEEDKKHERHPIFGNIVDEVAYHEKYPTIYHLRKKLVDSTDKADLRLIYLALAHMIKFRGHFLIEGDLNPDNSDVDKLFIQLVQTYNQLFEENPINASGVDAKAILSARLSKSRRLENLIAQLPGEKKNGLFGNLIALSLGLTPNFKSNFDLAEDAKLQLSKDTYDDDLDNLLAQIGDQYADLFLAAKNLSDAILLSDILRVNTEITKAPLSASMIKRYDEHHQDLTLLKALVRQQLPEKYKEIFFDQSKNGYAGYIDGGASQEEFYKFIKPILEKMDGTEELLVKLNREDLLRKQRTFDNGSIPHQIHLGELHAILRRQEDFYPFLKDNREKIEKILTFRIPYYVGPLARGNSRFAWMTRKSEETITPWNFEEVVDKGASAQSFIERMTNFDKNLPNEKVLPKHSLLYEYFTVYNELTKVKYVTEGMRKPAFLSGEQKKAIVDLLFKTNRKVTVKQLKEDYFKKIECFDSVEISGVEDRFNASLGTYHDLLKIIKDKDFLDNEENEDILEDIVLTLTLFEDREMIEERLKTYAHLFDDKVMKQLKRRRYTGWGRLSRKLINGIRDKQSGKTILDFLKSDGFANRNFMQLIHDDSLTFKEDIQKAQVSGQGDSLHEHIANLAGSPAIKKGILQTVKVVDELVKVMGRHKPENIVIEMARENQTTQKGQKNSRERMKRIEEGIKELGSQILKEHPVENTQLQNEKLYLYYLQNGRDMYVDQELDINRLSDYDVDHIVPQSFLKDDSIDNKVLTRSDKARGKSDNVPSEEVVKKMKNYWRQLLNAKLITQRKFDNLTKAERGGLSELDKAGFIKRQLVETRQITKHVAQILDSRMNTKYDENDKLIREVKVITLKSKLVSDFRKDFQFYKVREINNYHHAHDAYLNAVVGTALIKKYPKLESEFVYGDYKVYDVRKMIAKSEQEIGKATAKYFFYSNIMNFFKTEITLANGEIRKRPLIETNGETGEIVWDKGRDFATVRKVLSMPQVNIVKKTEVQTGGFSKESILPKRNSDKLIARKKDWDPKKYGGFDSPTVAYSVLVVAKVEKGKSKKLKSVKELLGITIMERSSFEKNPIDFLEAKGYKEVKKDLIIKLPKYSLFELENGRKRMLASAGELQKGNELALPSKYVNFLYLASHYEKLKGSPEDNEQKQLFVEQHKHYLDEIIEQISEFSKRVILADANLDKVLSAYNKHRDKPIREQAENIIHLFTLTNLGAPAAFKYFDTTIDRKRYTSTKEVLDATLIHQSITGLYETRIDLSQLGGDGGGGGGSSEAAAKGGTLNIEDEHRLHETSKEPDVSLGSTWLSDFPQAWAETGGMGLAVRQAPLIIPLKATSTPVSIKQYPMSQEARLGIKPHIQRLLDQGILVPCQSPWNTPLLPVKKPGTNDYRPVQDLREVNKRVEDIHPTVPNPYNLLSGLPPSHQWYTVLDLKDAFFCLRLHPTSQPLFAFEWRDPEMGISGQLTWTRLPQGFKNSPTLFNEALHRDLADFRIQHPDLILLQYVDDLLLAATSELDCQQGTRALLQTLGNLGYRASAKKAQICQKQVKYLGYLLKEGQRWLTEARKETVMGQPTPKTPRQLREFLGTAGFCRLWIPGFAEMAAPLYPLTKPGTLFNWGPDQQKAYQEIKQALLTAPALGLPDLTKPFELFVDEKQGYAKGVLTQKLGPWRRPVAYLSKKLDPVAAGWPPCLRMVAAIAVLTKDAGKLTMGQPLVILAPHAVEALVKQPPDRWLSNARMTHYQALLLDTDRVQFGPVVALNPATLLPLPEEGLQHNCLDILAEAHGTRPDLTDQPLPDADHTWYTDGSSLLQEGQRKAGAAVTTETEVIWAKALPAGTSAQRAELIALTQALKMAEGKKLNVYTDSRYAFATAHIHGEIYRRRGWLTSEGKEIKNKDEILALLKALFLPKRLSIIHCPGHQKGHSAEARGNRMADQAARKAAITETPDTSTLLAGKRTADGSEFEKRTADGSEFESPKKKAKVE

SEQ ID NO: 2765 - protein, 2096 aa, synthetic construct
MPAAKRVKLDGGDKKYSIGLDIGTNSVGWAVITDEYKVPSKKFKVLGNTDRHSIKKNLIGALLFDSGETAEATRLKRTARRRYTRRKNRICYLQEIFSNEMAKVDDSFFHRLEESFLVEEDKKHERHPIFGNIVDEVAYHEKYPTIYHLRKKLVDSTDKADLRLIYLALAHMIKFRGHFLIEGDLNPDNSDVDKLFIQLVQTYNQLFEENPINASGVDAKAILSARLSKSRRLENLIAQLPGEKKNGLFGNLIALSLGLTPNFKSNFDLAEDAKLQLSKDTYDDDLDNLLAQIGDQYADLFLAAKNLSDAILLSDILRVNTEITKAPLSASMIKRYDEHHQDLTLLKALVRQQLPEKYKEIFFDQSKNGYAGYIDGGASQEEFYKFIKPILEKMDGTEELLVKLNREDLLRKQRTFDNGSIPHQIHLGELHAILRRQEDFYPFLKDNREKIEKILTFRIPYYVGPLARGNSRFAWMTRKSEETITPWNFEEVVDKGASAQSFIERMTNFDKNLPNEKVLPKHSLLYEYFTVYNELTKVKYVTEGMRKPAFLSGEQKKAIVDLLFKTNRKVTVKQLKEDYFKKIECFDSVEISGVEDRFNASLGTYHDLLKIIKDKDFLDNEENEDILEDIVLTLTLFEDREMIEERLKTYAHLFDDKVMKQLKRRRYTGWGRLSRKLINGIRDKQSGKTILDFLKSDGFANRNFMQLIHDDSLTFKEDIQKAQVSGQGDSLHEHIANLAGSPAIKKGILQTVKVVDELVKVMGRHKPENIVIEMARENQTTQKGQKNSRERMKRIEEGIKELGSQILKEHPVENTQLQNEKLYLYYLQNGRDMYVDQELDINRLSDYDVDHIVPQSFLKDDSIDNKVLTRSDKARGKSDNVPSEEVVKKMKNYWRQLLNAKLITQRKFDNLTKAERGGLSELDKAGFIKRQLVETRQITKHVAQILDSRMNTKYDENDKLIREVKVITLKSKLVSDFRKDFQFYKVREINNYHHAHDAYLNAVVGTALIKKYPKLESEFVYGDYKVYDVRKMIAKSEQEIGKATAKYFFYSNIMNFFKTEITLANGEIRKRPLIETNGETGEIVWDKGRDFATVRKVLSMPQVNIVKKTEVQTGGFSKESILPKRNSDKLIARKKDWDPKKYGGFDSPTVAYSVLVVAKVEKGKSKKLKSVKELLGITIMERSSFEKNPIDFLEAKGYKEVKKDLIIKLPKYSLFELENGRKRMLASAGELQKGNELALPSKYVNFLYLASHYEKLKGSPEDNEQKQLFVEQHKHYLDEIIEQISEFSKRVILADANLDKVLSAYNKHRDKPIREQAENIIHLFTLTNLGAPAAFKYFDTTIDRKRYTSTKEVLDATLIHQSITGLYETRIDLSQLGGDGGEAAAKPAPGGGGGTLNIEDEHRLHETSKEPDVSLGSTWLSDFPQAWAETGGMGLAVRQAPLIIPLKATSTPVSIKQYPMSQEARLGIKPHIQRLLDQGILVPCQSPWNTPLLPVKKPGTNDYRPVQDLREVNKRVEDIHPTVPNPYNLLSGLPPSHQWYTVLDLKDAFFCLRLHPTSQPLFAFEWRDPEMGISGQLTWTRLPQGFKNSPTLFNEALHRDLADFRIQHPDLILLQYVDDLLLAATSELDCQQGTRALLQTLGNLGYRASAKKAQICQKQVKYLGYLLKEGQRWLTEARKETVMGQPTPKTPRQLREFLGTAGFCRLWIPGFAEMAAPLYPLTKPGTLFNWGPDQQKAYQEIKQALLTAPALGLPDLTKPFELFVDEKQGYAKGVLTQKLGPWRRPVAYLSKKLDPVAAGWPPCLRMVAAIAVLTKDAGKLTMGQPLVILAPHAVEALVKQPPDRWLSNARMTHYQALLLDTDRVQFGPVVALNPATLLPLPEEGLQHNCLDILAEAHGTRPDLTDQPLPDADHTWYTDGSSLLQEGQRKAGAAVTTETEVIWAKALPAGTSAQRAELIALTQALKMAEGKKLNVYTDSRYAFATAHIHGEIYRRRGWLTSEGKEIKNKDEILALLKALFLPKRLSIIHCPGHQKGHSAEARGNRMADQAARKAAITETPDTSTLLAGKRTADGSEFEKRTADGSEFESPKKKAKVE

SEQ ID NO: 2766 - protein, 2094 aa, synthetic construct
MPAAKRVKLDGGDKKYSIGLDIGTNSVGWAVITDEYKVPSKKFKVLGNTDRHSIKKNLIGALLFDSGETAEATRLKRTARRRYTRRKNRICYLQEIFSNEMAKVDDSFFHRLEESFLVEEDKKHERHPIFGNIVDEVAYHEKYPTIYHLRKKLVDSTDKADLRLIYLALAHMIKFRGHFLIEGDLNPDNSDVDKLFIQLVQTYNQLFEENPINASGVDAKAILSARLSKSRRLENLIAQLPGEKKNGLFGNLIALSLGLTPNFKSNFDLAEDAKLQLSKDTYDDDLDNLLAQIGDQYADLFLAAKNLSDAILLSDILRVNTEITKAPLSASMIKRYDEHHQDLTLLKALVRQQLPEKYKEIFFDQSKNGYAGYIDGGASQEEFYKFIKPILEKMDGTEELLVKLNREDLLRKQRTFDNGSIPHQIHLGELHAILRRQEDFYPFLKDNREKIEKILTFRIPYYVGPLARGNSRFAWMTRKSEETITPWNFEEVVDKGASAQSFIERMTNFDKNLPNEKVLPKHSLLYEYFTVYNELTKVKYVTEGMRKPAFLSGEQKKAIVDLLFKTNRKVTVKQLKEDYFKKIECFDSVEISGVEDRFNASLGTYHDLLKIIKDKDFLDNEENEDILEDIVLTLTLFEDREMIEERLKTYAHLFDDKVMKQLKRRRYTGWGRLSRKLINGIRDKQSGKTILDFLKSDGFANRNFMQLIHDDSLTFKEDIQKAQVSGQGDSLHEHIANLAGSPAIKKGILQTVKVVDELVKVMGRHKPENIVIEMARENQTTQKGQKNSRERMKRIEEGIKELGSQILKEHPVENTQLQNEKLYLYYLQNGRDMYVDQELDINRLSDYDVDHIVPQSFLKDDSIDNKVLTRSDKARGKSDNVPSEEVVKKMKNYWRQLLNAKLITQRKFDNLTKAERGGLSELDKAGFIKRQLVETRQITKHVAQILDSRMNTKYDENDKLIREVKVITLKSKLVSDFRKDFQFYKVREINNYHHAHDAYLNAVVGTALIKKYPKLESEFVYGDYKVYDVRKMIAKSEQEIGKATAKYFFYSNIMNFFKTEITLANGEIRKRPLIETNGETGEIVWDKGRDFATVRKVLSMPQVNIVKKTEVQTGGFSKESILPKRNSDKLIARKKDWDPKKYGGFDSPTVAYSVLVVAKVEKGKSKKLKSVKELLGITIMERSSFEKNPIDFLEAKGYKEVKKDLIIKLPKYSLFELENGRKRMLASAGELQKGNELALPSKYVNFLYLASHYEKLKGSPEDNEQKQLFVEQHKHYLDEIIEQISEFSKRVILADANLDKVLSAYNKHRDKPIREQAENIIHLFTLTNLGAPAAFKYFDTTIDRKRYTSTKEVLDATLIHQSITGLYETRIDLSQLGGDGGGGSGGGPAPGGTLNIEDEHRLHETSKEPDVSLGSTWLSDFPQAWAETGGMGLAVRQAPLIIPLKATSTPVSIKQYPMSQEARLGIKPHIQRLLDQGILVPCQSPWNTPLLPVKKPGTNDYRPVQDLREVNKRVEDIHPTVPNPYNLLSGLPPSHQWYTVLDLKDAFFCLRLHPTSQPLFAFEWRDPEMGISGQLTWTRLPQGFKNSPTLFNEALHRDLADFRIQHPDLILLQYVDDLLLAATSELDCQQGTRALLQTLGNLGYRASAKKAQICQKQVKYLGYLLKEGQRWLTEARKETVMGQPTPKTPRQLREFLGTAGFCRLWIPGFAEMAAPLYPLTKPGTLFNWGPDQQKAYQEIKQALLTAPALGLPDLTKPFELFVDEKQGYAKGVLTQKLGPWRRPVAYLSKKLDPVAAGWPPCLRMVAAIAVLTKDAGKLTMGQPLVILAPHAVEALVKQPPDRWLSNARMTHYQALLLDTDRVQFGPVVALNPATLLPLPEEGLQHNCLDILAEAHGTRPDLTDQPLPDADHTWYTDGSSLLQEGQRKAGAAVTTETEVIWAKALPAGTSAQRAELIALTQALKMAEGKKLNVYTDSRYAFATAHIHGEIYRRRGWLTSEGKEIKNKDEILALLKALFLPKRLSIIHCPGHQKGHSAEARGNRMADQAARKAAITETPDTSTLLAGKRTADGSEFEKRTADGSEFESPKKKAKVE

SEQ ID NO: 2767 - protein, 2096 aa, synthetic construct
MPAAKRVKLDGGDKKYSIGLDIGTNSVGWAVITDEYKVPSKKFKVLGNTDRHSIKKNLIGALLFDSGETAEATRLKRTARRRYTRRKNRICYLQEIFSNEMAKVDDSFFHRLEESFLVEEDKKHERHPIFGNIVDEVAYHEKYPTIYHLRKKLVDSTDKADLRLIYLALAHMIKFRGHFLIEGDLNPDNSDVDKLFIQLVQTYNQLFEENPINASGVDAKAILSARLSKSRRLENLIAQLPGEKKNGLFGNLIALSLGLTPNFKSNFDLAEDAKLQLSKDTYDDDLDNLLAQIGDQYADLFLAAKNLSDAILLSDILRVNTEITKAPLSASMIKRYDEHHQDLTLLKALVRQQLPEKYKEIFFDQSKNGYAGYIDGGASQEEFYKFIKPILEKMDGTEELLVKLNREDLLRKQRTFDNGSIPHQIHLGELHAILRRQEDFYPFLKDNREKIEKILTFRIPYYVGPLARGNSRFAWMTRKSEETITPWNFEEVVDKGASAQSFIERMTNFDKNLPNEKVLPKHSLLYEYFTVYNELTKVKYVTEGMRKPAFLSGEQKKAIVDLLFKTNRKVTVKQLKEDYFKKIECFDSVEISGVEDRFNASLGTYHDLLKIIKDKDFLDNEENEDILEDIVLTLTLFEDREMIEERLKTYAHLFDDKVMKQLKRRRYTGWGRLSRKLINGIRDKQSGKTILDFLKSDGFANRNFMQLIHDDSLTFKEDIQKAQVSGQGDSLHEHIANLAGSPAIKKGILQTVKVVDELVKVMGRHKPENIVIEMARENQTTQKGQKNSRERMKRIEEGIKELGSQILKEHPVENTQLQNEKLYLYYLQNGRDMYVDQELDINRLSDYDVDHIVPQSFLKDDSIDNKVLTRSDKARGKSDNVPSEEVVKKMKNYWRQLLNAKLITQRKFDNLTKAERGGLSELDKAGFIKRQLVETRQITKHVAQILDSRMNTKYDENDKLIREVKVITLKSKLVSDFRKDFQFYKVREINNYHHAHDAYLNAVVGTALIKKYPKLESEFVYGDYKVYDVRKMIAKSEQEIGKATAKYFFYSNIMNFFKTEITLANGEIRKRPLIETNGETGEIVWDKGRDFATVRKVLSMPQVNIVKKTEVQTGGFSKESILPKRNSDKLIARKKDWDPKKYGGFDSPTVAYSVLVVAKVEKGKSKKLKSVKELLGITIMERSSFEKNPIDFLEAKGYKEVKKDLIIKLPKYSLFELENGRKRMLASAGELQKGNELALPSKYVNFLYLASHYEKLKGSPEDNEQKQLFVEQHKHYLDEIIEQISEFSKRVILADANLDKVLSAYNKHRDKPIREQAENIIHLFTLTNLGAPAAFKYFDTTIDRKRYTSTKEVLDATLIHQSITGLYETRIDLSQLGGDGGEAAAKGGSGGGGGTLNIEDEHRLHETSKEPDVSLGSTWLSDFPQAWAETGGMGLAVRQAPLIIPLKATSTPVSIKQYPMSQEARLGIKPHIQRLLDQGILVPCQSPWNTPLLPVKKPGTNDYRPVQDLREVNKRVEDIHPTVPNPYNLLSGLPPSHQWYTVLDLKDAFFCLRLHPTSQPLFAFEWRDPEMGISGQLTWTRLPQGFKNSPTLFNEALHRDLADFRIQHPDLILLQYVDDLLLAATSELDCQQGTRALLQTLGNLGYRASAKKAQICQKQVKYLGYLLKEGQRWLTEARKETVMGQPTPKTPRQLREFLGTAGFCRLWIPGFAEMAAPLYPLTKPGTLFNWGPDQQKAYQEIKQALLTAPALGLPDLTKPFELFVDEKQGYAKGVLTQKLGPWRRPVAYLSKKLDPVAAGWPPCLRMVAAIAVLTKDAGKLTMGQPLVILAPHAVEALVKQPPDRWLSNARMTHYQALLLDTDRVQFGPVVALNPATLLPLPEEGLQHNCLDILAEAHGTRPDLTDQPLPDADHTWYTDGSSLLQEGQRKAGAAVTTETEVIWAKALPAGTSAQRAELIALTQALKMAEGKKLNVYTDSRYAFATAHIHGEIYRRRGWLTSEGKEIKNKDEILALLKALFLPKRLSIIHCPGHQKGHSAEARGNRMADQAARKAAITETPDTSTLLAGKRTADGSEFEKRTADGSEFESPKKKAKVE

SEQ ID NO: 2768 - protein, 2094 aa, synthetic construct
MPAAKRVKLDGGDKKYSIGLDIGTNSVGWAVITDEYKVPSKKFKVLGNTDRHSIKKNLIGALLFDSGETAEATRLKRTARRRYTRRKNRICYLQEIFSNEMAKVDDSFFHRLEESFLVEEDKKHERHPIFGNIVDEVAYHEKYPTIYHLRKKLVDSTDKADLRLIYLALAHMIKFRGHFLIEGDLNPDNSDVDKLFIQLVQTYNQLFEENPINASGVDAKAILSARLSKSRRLENLIAQLPGEKKNGLFGNLIALSLGLTPNFKSNFDLAEDAKLQLSKDTYDDDLDNLLAQIGDQYADLFLAAKNLSDAILLSDILRVNTEITKAPLSASMIKRYDEHHQDLTLLKALVRQQLPEKYKEIFFDQSKNGYAGYIDGGASQEEFYKFIKPILEKMDGTEELLVKLNREDLLRKQRTFDNGSIPHQIHLGELHAILRRQEDFYPFLKDNREKIEKILTFRIPYYVGPLARGNSRFAWMTRKSEETITPWNFEEVVDKGASAQSFIERMTNFDKNLPNEKVLPKHSLLYEYFTVYNELTKVKYVTEGMRKPAFLSGEQKKAIVDLLFKTNRKVTVKQLKEDYFKKIECFDSVEISGVEDRFNASLGTYHDLLKIIKDKDFLDNEENEDILEDIVLTLTLFEDREMIEERLKTYAHLFDDKVMKQLKRRRYTGWGRLSRKLINGIRDKQSGKTILDFLKSDGFANRNFMQLIHDDSLTFKEDIQKAQVSGQGDSLHEHIANLAGSPAIKKGILQTVKVVDELVKVMGRHKPENIVIEMARENQTTQKGQKNSRERMKRIEEGIKELGSQILKEHPVENTQLQNEKLYLYYLQNGRDMYVDQELDINRLSDYDVDHIVPQSFLKDDSIDNKVLTRSDKARGKSDNVPSEEVVKKMKNYWRQLLNAKLITQRKFDNLTKAERGGLSELDKAGFIKRQLVETRQITKHVAQILDSRMNTKYDENDKLIREVKVITLKSKLVSDFRKDFQFYKVREINNYHHAHDAYLNAVVGTALIKKYPKLESEFVYGDYKVYDVRKMIAKSEQEIGKATAKYFFYSNIMNFFKTEITLANGEIRKRPLIETNGETGEIVWDKGRDFATVRKVLSMPQVNIVKKTEVQTGGFSKESILPKRNSDKLIARKKDWDPKKYGGFDSPTVAYSVLVVAKVEKGKSKKLKSVKELLGITIMERSSFEKNPIDFLEAKGYKEVKKDLIIKLPKYSLFELENGRKRMLASAGELQKGNELALPSKYVNFLYLASHYEKLKGSPEDNEQKQLFVEQHKHYLDEIIEQISEFSKRVILADANLDKVLSAYNKHRDKPIREQAENIIHLFTLTNLGAPAAFKYFDTTIDRKRYTSTKEVLDATLIHQSITGLYETRIDLSQLGGDGGGSSGGSPAPGGTLNIEDEHRLHETSKEPDVSLGSTWLSDFPQAWAETGGMGLAVRQAPLIIPLKATSTPVSIKQYPMSQEARLGIKPHIQRLLDQGILVPCQSPWNTPLLPVKKPGTNDYRPVQDLREVNKRVEDIHPTVPNPYNLLSGLPPSHQWYTVLDLKDAFFCLRLHPTSQPLFAFEWRDPEMGISGQLTWTRLPQGFKNSPTLFNEALHRDLADFRIQHPDLILLQYVDDLLLAATSELDCQQGTRALLQTLGNLGYRASAKKAQICQKQVKYLGYLLKEGQRWLTEARKETVMGQPTPKTPRQLREFLGTAGFCRLWIPGFAEMAAPLYPLTKPGTLFNWGPDQQKAYQEIKQALLTAPALGLPDLTKPFELFVDEKQGYAKGVLTQKLGPWRRPVAYLSKKLDPVAAGWPPCLRMVAAIAVLTKDAGKLTMGQPLVILAPHAVEALVKQPPDRWLSNARMTHYQALLLDTDRVQFGPVVALNPATLLPLPEEGLQHNCLDILAEAHGTRPDLTDQPLPDADHTWYTDGSSLLQEGQRKAGAAVTTETEVIWAKALPAGTSAQRAELIALTQALKMAEGKKLNVYTDSRYAFATAHIHGEIYRRRGWLTSEGKEIKNKDEILALLKALFLPKRLSIIHCPGHQKGHSAEARGNRMADQAARKAAITETPDTSTLLAGKRTADGSEFEKRTADGSEFESPKKKAKVE

SEQ ID NO: 2769 - protein, 2094 aa, synthetic construct
MPAAKRVKLDGGDKKYSIGLDIGTNSVGWAVITDEYKVPSKKFKVLGNTDRHSIKKNLIGALLFDSGETAEATRLKRTARRRYTRRKNRICYLQEIFSNEMAKVDDSFFHRLEESFLVEEDKKHERHPIFGNIVDEVAYHEKYPTIYHLRKKLVDSTDKADLRLIYLALAHMIKFRGHFLIEGDLNPDNSDVDKLFIQLVQTYNQLFEENPINASGVDAKAILSARLSKSRRLENLIAQLPGEKKNGLFGNLIALSLGLTPNFKSNFDLAEDAKLQLSKDTYDDDLDNLLAQIGDQYADLFLAAKNLSDAILLSDILRVNTEITKAPLSASMIKRYDEHHQDLTLLKALVRQQLPEKYKEIFFDQSKNGYAGYIDGGASQEEFYKFIKPILEKMDGTEELLVKLNREDLLRKQRTFDNGSIPHQIHLGELHAILRRQEDFYPFLKDNREKIEKILTFRIPYYVGPLARGNSRFAWMTRKSEETITPWNFEEVVDKGASAQSFIERMTNFDKNLPNEKVLPKHSLLYEYFTVYNELTKVKYVTEGMRKPAFLSGEQKKAIVDLLFKTNRKVTVKQLKEDYFKKIECFDSVEISGVEDRFNASLGTYHDLLKIIKDKDFLDNEENEDILEDIVLTLTLFEDREMIEERLKTYAHLFDDKVMKQLKRRRYTGWGRLSRKLINGIRDKQSGKTILDFLKSDGFANRNFMQLIHDDSLTFKEDIQKAQVSGQGDSLHEHIANLAGSPAIKKGILQTVKVVDELVKVMGRHKPENIVIEMARENQTTQKGQKNSRERMKRIEEGIKELGSQILKEHPVENTQLQNEKLYLYYLQNGRDMYVDQELDINRLSDYDVDHIVPQSFLKDDSIDNKVLTRSDKARGKSDNVPSEEVVKKMKNYWRQLLNAKLITQRKFDNLTKAERGGLSELDKAGFIKRQLVETRQITKHVAQILDSRMNTKYDENDKLIREVKVITLKSKLVSDFRKDFQFYKVREINNYHHAHDAYLNAVVGTALIKKYPKLESEFVYGDYKVYDVRKMIAKSEQEIGKATAKYFFYSNIMNFFKTEITLANGEIRKRPLIETNGETGEIVWDKGRDFATVRKVLSMPQVNIVKKTEVQTGGFSKESILPKRNSDKLIARKKDWDPKKYGGFDSPTVAYSVLVVAKVEKGKSKKLKSVKELLGITIMERSSFEKNPIDFLEAKGYKEVKKDLIIKLPKYSLFELENGRKRMLASAGELQKGNELALPSKYVNFLYLASHYEKLKGSPEDNEQKQLFVEQHKHYLDEIIEQISEFSKRVILADANLDKVLSAYNKHRDKPIREQAENIIHLFTLTNLGAPAAFKYFDTTIDRKRYTSTKEVLDATLIHQSITGLYETRIDLSQLGGDGGGGGGGSPAPGGTLNIEDEHRLHETSKEPDVSLGSTWLSDFPQAWAETGGMGLAVRQAPLIIPLKATSTPVSIKQYPMSQEARLGIKPHIQRLLDQGILVPCQSPWNTPLLPVKKPGTNDYRPVQDLREVNKRVEDIHPTVPNPYNLLSGLPPSHQWYTVLDLKDAFFCLRLHPTSQPLFAFEWRDPEMGISGQLTWTRLPQGFKNSPTLFNEALHRDLADFRIQHPDLILLQYVDDLLLAATSELDCQQGTRALLQTLGNLGYRASAKKAQICQKQVKYLGYLLKEGQRWLTEARKETVMGQPTPKTPRQLREFLGTAGFCRLWIPGFAEMAAPLYPLTKPGTLFNWGPDQQKAYQEIKQALLTAPALGLPDLTKPFELFVDEKQGYAKGVLTQKLGPWRRPVAYLSKKLDPVAAGWPPCLRMVAAIAVLTKDAGKLTMGQPLVILAPHAVEALVKQPPDRWLSNARMTHYQALLLDTDRVQFGPVVALNPATLLPLPEEGLQHNCLDILAEAHGTRPDLTDQPLPDADHTWYTDGSSLLQEGQRKAGAAVTTETEVIWAKALPAGTSAQRAELIALTQALKMAEGKKLNVYTDSRYAFATAHIHGEIYRRRGWLTSEGKEIKNKDEILALLKALFLPKRLSIIHCPGHQKGHSAEARGNRMADQAARKAAITETPDTSTLLAGKRTADGSEFEKRTADGSEFESPKKKAKVE

SEQ ID NO: 2770 - protein, 2094 aa, synthetic construct
MPAAKRVKLDGGDKKYSIGLDIGTNSVGWAVITDEYKVPSKKFKVLGNTDRHSIKKNLIGALLFDSGETAEATRLKRTARRRYTRRKNRICYLQEIFSNEMAKVDDSFFHRLEESFLVEEDKKHERHPIFGNIVDEVAYHEKYPTIYHLRKKLVDSTDKADLRLIYLALAHMIKFRGHFLIEGDLNPDNSDVDKLFIQLVQTYNQLFEENPINASGVDAKAILSARLSKSRRLENLIAQLPGEKKNGLFGNLIALSLGLTPNFKSNFDLAEDAKLQLSKDTYDDDLDNLLAQIGDQYADLFLAAKNLSDAILLSDILRVNTEITKAPLSASMIKRYDEHHQDLTLLKALVRQQLPEKYKEIFFDQSKNGYAGYIDGGASQEEFYKFIKPILEKMDGTEELLVKLNREDLLRKQRTFDNGSIPHQIHLGELHAILRRQEDFYPFLKDNREKIEKILTFRIPYYVGPLARGNSRFAWMTRKSEETITPWNFEEVVDKGASAQSFIERMTNFDKNLPNEKVLPKHSLLYEYFTVYNELTKVKYVTEGMRKPAFLSGEQKKAIVDLLFKTNRKVTVKQLKEDYFKKIECFDSVEISGVEDRFNASLGTYHDLLKIIKDKDFLDNEENEDILEDIVLTLTLFEDREMIEERLKTYAHLFDDKVMKQLKRRRYTGWGRLSRKLINGIRDKQSGKTILDFLKSDGFANRNFMQLIHDDSLTFKEDIQKAQVSGQGDSLHEHIANLAGSPAIKKGILQTVKVVDELVKVMGRHKPENIVIEMARENQTTQKGQKNSRERMKRIEEGIKELGSQILKEHPVENTQLQNEKLYLYYLQNGRDMYVDQELDINRLSDYDVDHIVPQSFLKDDSIDNKVLTRSDKARGKSDNVPSEEVVKKMKNYWRQLLNAKLITQRKFDNLTKAERGGLSELDKAGFIKRQLVETRQITKHVAQILDSRMNTKYDENDKLIREVKVITLKSKLVSDFRKDFQFYKVREINNYHHAHDAYLNAVVGTALIKKYPKLESEFVYGDYKVYDVRKMIAKSEQEIGKATAKYFFYSNIMNFFKTEITLANGEIRKRPLIETNGETGEIVWDKGRDFATVRKVLSMPQVNIVKKTEVQTGGFSKESILPKRNSDKLIARKKDWDPKKYGGFDSPTVAYSVLVVAKVEKGKSKKLKSVKELLGITIMERSSFEKNPIDFLEAKGYKEVKKDLIIKLPKYSLFELENGRKRMLASAGELQKGNELALPSKYVNFLYLASHYEKLKGSPEDNEQKQLFVEQHKHYLDEIIEQISEFSKRVILADANLDKVLSAYNKHRDKPIREQAENIIHLFTLTNLGAPAAFKYFDTTIDRKRYTSTKEVLDATLIHQSITGLYETRIDLSQLGGDGGGGGGSSPAPGGTLNIEDEHRLHETSKEPDVSLGSTWLSDFPQAWAETGGMGLAVRQAPLIIPLKATSTPVSIKQYPMSQEARLGIKPHIQRLLDQGILVPCQSPWNTPLLPVKKPGTNDYRPVQDLREVNKRVEDIHPTVPNPYNLLSGLPPSHQWYTVLDLKDAFFCLRLHPTSQPLFAFEWRDPEMGISGQLTWTRLPQGFKNSPTLFNEALHRDLADFRIQHPDLILLQYVDDLLLAATSELDCQQGTRALLQTLGNLGYRASAKKAQICQKQVKYLGYLLKEGQRWLTEARKETVMGQPTPKTPRQLREFLGTAGFCRLWIPGFAEMAAPLYPLTKPGTLFNWGPDQQKAYQEIKQALLTAPALGLPDLTKPFELFVDEKQGYAKGVLTQKLGPWRRPVAYLSKKLDPVAAGWPPCLRMVAAIAVLTKDAGKLTMGQPLVILAPHAVEALVKQPPDRWLSNARMTHYQALLLDTDRVQFGPVVALNPATLLPLPEEGLQHNCLDILAEAHGTRPDLTDQPLPDADHTWYTDGSSLLQEGQRKAGAAVTTETEVIWAKALPAGTSAQRAELIALTQALKMAEGKKLNVYTDSRYAFATAHIHGEIYRRRGWLTSEGKEIKNKDEILALLKALFLPKRLSIIHCPGHQKGHSAEARGNRMADQAARKAAITETPDTSTLLAGKRTADGSEFEKRTADGSEFESPKKKAKVE

SEQ ID NO: 2771 - protein, 2105 aa, synthetic construct
MPAAKRVKLDGGDKKYSIGLDIGTNSVGWAVITDEYKVPSKKFKVLGNTDRHSIKKNLIGALLFDSGETAEATRLKRTARRRYTRRKNRICYLQEIFSNEMAKVDDSFFHRLEESFLVEEDKKHERHPIFGNIVDEVAYHEKYPTIYHLRKKLVDSTDKADLRLIYLALAHMIKFRGHFLIEGDLNPDNSDVDKLFIQLVQTYNQLFEENPINASGVDAKAILSARLSKSRRLENLIAQLPGEKKNGLFGNLIALSLGLTPNFKSNFDLAEDAKLQLSKDTYDDDLDNLLAQIGDQYADLFLAAKNLSDAILLSDILRVNTEITKAPLSASMIKRYDEHHQDLTLLKALVRQQLPEKYKEIFFDQSKNGYAGYIDGGASQEEFYKFIKPILEKMDGTEELLVKLNREDLLRKQRTFDNGSIPHQIHLGELHAILRRQEDFYPFLKDNREKIEKILTFRIPYYVGPLARGNSRFAWMTRKSEETITPWNFEEVVDKGASAQSFIERMTNFDKNLPNEKVLPKHSLLYEYFTVYNELTKVKYVTEGMRKPAFLSGEQKKAIVDLLFKTNRKVTVKQLKEDYFKKIECFDSVEISGVEDRFNASLGTYHDLLKIIKDKDFLDNEENEDILEDIVLTLTLFEDREMIEERLKTYAHLFDDKVMKQLKRRRYTGWGRLSRKLINGIRDKQSGKTILDFLKSDGFANRNFMQLIHDDSLTFKEDIQKAQVSGQGDSLHEHIANLAGSPAIKKGILQTVKVVDELVKVMGRHKPENIVIEMARENQTTQKGQKNSRERMKRIEEGIKELGSQILKEHPVENTQLQNEKLYLYYLQNGRDMYVDQELDINRLSDYDVDHIVPQSFLKDDSIDNKVLTRSDKARGKSDNVPSEEVVKKMKNYWRQLLNAKLITQRKFDNLTKAERGGLSELDKAGFIKRQLVETRQITKHVAQILDSRMNTKYDENDKLIREVKVITLKSKLVSDFRKDFQFYKVREINNYHHAHDAYLNAVVGTALIKKYPKLESEFVYGDYKVYDVRKMIAKSEQEIGKATAKYFFYSNIMNFFKTEITLANGEIRKRPLIETNGETGEIVWDKGRDFATVRKVLSMPQVNIVKKTEVQTGGFSKESILPKRNSDKLIARKKDWDPKKYGGFDSPTVAYSVLVVAKVEKGKSKKLKSVKELLGITIMERSSFEKNPIDFLEAKGYKEVKKDLIIKLPKYSLFELENGRKRMLASAGELQKGNELALPSKYVNFLYLASHYEKLKGSPEDNEQKQLFVEQHKHYLDEIIEQISEFSKRVILADANLDKVLSAYNKHRDKPIREQAENIIHLFTLTNLGAPAAFKYFDTTIDRKRYTSTKEVLDATLIHQSITGLYETRIDLSQLGGDGGGGGGSGGGGSGGGGSGGGGSGGTLNIEDEHRLHETSKEPDVSLGSTWLSDFPQAWAETGGMGLAVRQAPLIIPLKATSTPVSIKQYPMSQEARLGIKPHIQRLLDQGILVPCQSPWNTPLLPVKKPGTNDYRPVQDLREVNKRVEDIHPTVPNPYNLLSGLPPSHQWYTVLDLKDAFFCLRLHPTSQPLFAFEWRDPEMGISGQLTWTRLPQGFKNSPTLFNEALHRDLADFRIQHPDLILLQYVDDLLLAATSELDCQQGTRALLQTLGNLGYRASAKKAQICQKQVKYLGYLLKEGQRWLTEARKETVMGQPTPKTPRQLREFLGTAGFCRLWIPGFAEMAAPLYPLTKPGTLFNWGPDQQKAYQEIKQALLTAPALGLPDLTKPFELFVDEKQGYAKGVLTQKLGPWRRPVAYLSKKLDPVAAGWPPCLRMVAAIAVLTKDAGKLTMGQPLVILAPHAVEALVKQPPDRWLSNARMTHYQALLLDTDRVQFGPVVALNPATLLPLPEEGLQHNCLDILAEAHGTRPDLTDQPLPDADHTWYTDGSSLLQEGQRKAGAAVTTETEVIWAKALPAGTSAQRAELIALTQALKMAEGKKLNVYTDSRYAFATAHIHGEIYRRRGWLTSEGKEIKNKDEILALLKALFLPKRLSIIHCPGHQKGHSAEARGNRMADQAARKAAITETPDTSTLLAGKRTADGSEFEKRTADGSEFESPKKKAKVE

SEQ ID NO: 2772 - protein, 2100 aa, synthetic construct
MPAAKRVKLDGGDKKYSIGLDIGTNSVGWAVITDEYKVPSKKFKVLGNTDRHSIKKNLIGALLFDSGETAEATRLKRTARRRYTRRKNRICYLQEIFSNEMAKVDDSFFHRLEESFLVEEDKKHERHPIFGNIVDEVAYHEKYPTIYHLRKKLVDSTDKADLRLIYLALAHMIKFRGHFLIEGDLNPDNSDVDKLFIQLVQTYNQLFEENPINASGVDAKAILSARLSKSRRLENLIAQLPGEKKNGLFGNLIALSLGLTPNFKSNFDLAEDAKLQLSKDTYDDDLDNLLAQIGDQYADLFLAAKNLSDAILLSDILRVNTEITKAPLSASMIKRYDEHHQDLTLLKALVRQQLPEKYKEIFFDQSKNGYAGYIDGGASQEEFYKFIKPILEKMDGTEELLVKLNREDLLRKQRTFDNGSIPHQIHLGELHAILRRQEDFYPFLKDNREKIEKILTFRIPYYVGPLARGNSRFAWMTRKSEETITPWNFEEVVDKGASAQSFIERMTNFDKNLPNEKVLPKHSLLYEYFTVYNELTKVKYVTEGMRKPAFLSGEQKKAIVDLLFKTNRKVTVKQLKEDYFKKIECFDSVEISGVEDRFNASLGTYHDLLKIIKDKDFLDNEENEDILEDIVLTLTLFEDREMIEERLKTYAHLFDDKVMKQLKRRRYTGWGRLSRKLINGIRDKQSGKTILDFLKSDGFANRNFMQLIHDDSLTFKEDIQKAQVSGQGDSLHEHIANLAGSPAIKKGILQTVKVVDELVKVMGRHKPENIVIEMARENQTTQKGQKNSRERMKRIEEGIKELGSQILKEHPVENTQLQNEKLYLYYLQNGRDMYVDQELDINRLSDYDVDHIVPQSFLKDDSIDNKVLTRSDKARGKSDNVPSEEVVKKMKNYWRQLLNAKLITQRKFDNLTKAERGGLSELDKAGFIKRQLVETRQITKHVAQILDSRMNTKYDENDKLIREVKVITLKSKLVSDFRKDFQFYKVREINNYHHAHDAYLNAVVGTALIKKYPKLESEFVYGDYKVYDVRKMIAKSEQEIGKATAKYFFYSNIMNFFKTEITLANGEIRKRPLIETNGETGEIVWDKGRDFATVRKVLSMPQVNIVKKTEVQTGGFSKESILPKRNSDKLIARKKDWDPKKYGGFDSPTVAYSVLVVAKVEKGKSKKLKSVKELLGITIMERSSFEKNPIDFLEAKGYKEVKKDLIIKLPKYSLFELENGRKRMLASAGELQKGNELALPSKYVNFLYLASHYEKLKGSPEDNEQKQLFVEQHKHYLDEIIEQISEFSKRVILADANLDKVLSAYNKHRDKPIREQAENIIHLFTLTNLGAPAAFKYFDTTIDRKRYTSTKEVLDATLIHQSITGLYETRIDLSQLGGDGGEAAAKEAAAKEAAAKGGTLNIEDEHRLHETSKEPDVSLGSTWLSDFPQAWAETGGMGLAVRQAPLIIPLKATSTPVSIKQYPMSQEARLGIKPHIQRLLDQGILVPCQSPWNTPLLPVKKPGTNDYRPVQDLREVNKRVEDIHPTVPNPYNLLSGLPPSHQWYTVLDLKDAFFCLRLHPTSQPLFAFEWRDPEMGISGQLTWTRLPQGFKNSPTLFNEALHRDLADFRIQHPDLILLQYVDDLLLAATSELDCQQGTRALLQTLGNLGYRASAKKAQICQKQVKYLGYLLKEGQRWLTEARKETVMGQPTPKTPRQLREFLGTAGFCRLWIPGFAEMAAPLYPLTKPGTLFNWGPDQQKAYQEIKQALLTAPALGLPDLTKPFELFVDEKQGYAKGVLTQKLGPWRRPVAYLSKKLDPVAAGWPPCLRMVAAIAVLTKDAGKLTMGQPLVILAPHAVEALVKQPPDRWLSNARMTHYQALLLDTDRVQFGPVVALNPATLLPLPEEGLQHNCLDILAEAHGTRPDLTDQPLPDADHTWYTDGSSLLQEGQRKAGAAVTTETEVIWAKALPAGTSAQRAELIALTQALKMAEGKKLNVYTDSRYAFATAHIHGEIYRRRGWLTSEGKEIKNKDEILALLKALFLPKRLSIIHCPGHQKGHSAEARGNRMADQAARKAAITETPDTSTLLAGKRTADGSEFEKRTADGSEFESPKKKAKVE

SEQ ID NO: 2773 - protein, 2094 aa, synthetic construct
MPAAKRVKLDGGDKKYSIGLDIGTNSVGWAVITDEYKVPSKKFKVLGNTDRHSIKKNLIGALLFDSGETAEATRLKRTARRRYTRRKNRICYLQEIFSNEMAKVDDSFFHRLEESFLVEEDKKHERHPIFGNIVDEVAYHEKYPTIYHLRKKLVDSTDKADLRLIYLALAHMIKFRGHFLIEGDLNPDNSDVDKLFIQLVQTYNQLFEENPINASGVDAKAILSARLSKSRRLENLIAQLPGEKKNGLFGNLIALSLGLTPNFKSNFDLAEDAKLQLSKDTYDDDLDNLLAQIGDQYADLFLAAKNLSDAILLSDILRVNTEITKAPLSASMIKRYDEHHQDLTLLKALVRQQLPEKYKEIFFDQSKNGYAGYIDGGASQEEFYKFIKPILEKMDGTEELLVKLNREDLLRKQRTFDNGSIPHQIHLGELHAILRRQEDFYPFLKDNREKIEKILTFRIPYYVGPLARGNSRFAWMTRKSEETITPWNFEEVVDKGASAQSFIERMTNFDKNLPNEKVLPKHSLLYEYFTVYNELTKVKYVTEGMRKPAFLSGEQKKAIVDLLFKTNRKVTVKQLKEDYFKKIECFDSVEISGVEDRFNASLGTYHDLLKIIKDKDFLDNEENEDILEDIVLTLTLFEDREMIEERLKTYAHLFDDKVMKQLKRRRYTGWGRLSRKLINGIRDKQSGKTILDFLKSDGFANRNFMQLIHDDSLTFKEDIQKAQVSGQGDSLHEHIANLAGSPAIKKGILQTVKVVDELVKVMGRHKPENIVIEMARENQTTQKGQKNSRERMKRIEEGIKELGSQILKEHPVENTQLQNEKLYLYYLQNGRDMYVDQELDINRLSDYDVDHIVPQSFLKDDSIDNKVLTRSDKARGKSDNVPSEEVVKKMKNYWRQLLNAKLITQRKFDNLTKAERGGLSELDKAGFIKRQLVETRQITKHVAQILDSRMNTKYDENDKLIREVKVITLKSKLVSDFRKDFQFYKVREINNYHHAHDAYLNAVVGTALIKKYPKLESEFVYGDYKVYDVRKMIAKSEQEIGKATAKYFFYSNIMNFFKTEITLANGEIRKRPLIETNGETGEIVWDKGRDFATVRKVLSMPQVNIVKKTEVQTGGFSKESILPKRNSDKLIARKKDWDPKKYGGFDSPTVAYSVLVVAKVEKGKSKKLKSVKELLGITIMERSSFEKNPIDFLEAKGYKEVKKDLIIKLPKYSLFELENGRKRMLASAGELQKGNELALPSKYVNFLYLASHYEKLKGSPEDNEQKQLFVEQHKHYLDEIIEQISEFSKRVILADANLDKVLSAYNKHRDKPIREQAENIIHLFTLTNLGAPAAFKYFDTTIDRKRYTSTKEVLDATLIHQSITGLYETRIDLSQLGGDGGGGGPAPGSSGGTLNIEDEHRLHETSKEPDVSLGSTWLSDFPQAWAETGGMGLAVRQAPLIIPLKATSTPVSIKQYPMSQEARLGIKPHIQRLLDQGILVPCQSPWNTPLLPVKKPGTNDYRPVQDLREVNKRVEDIHPTVPNPYNLLSGLPPSHQWYTVLDLKDAFFCLRLHPTSQPLFAFEWRDPEMGISGQLTWTRLPQGFKNSPTLFNEALHRDLADFRIQHPDLILLQYVDDLLLAATSELDCQQGTRALLQTLGNLGYRASAKKAQICQKQVKYLGYLLKEGQRWLTEARKETVMGQPTPKTPRQLREFLGTAGFCRLWIPGFAEMAAPLYPLTKPGTLFNWGPDQQKAYQEIKQALLTAPALGLPDLTKPFELFVDEKQGYAKGVLTQKLGPWRRPVAYLSKKLDPVAAGWPPCLRMVAAIAVLTKDAGKLTMGQPLVILAPHAVEALVKQPPDRWLSNARMTHYQALLLDTDRVQFGPVVALNPATLLPLPEEGLQHNCLDILAEAHGTRPDLTDQPLPDADHTWYTDGSSLLQEGQRKAGAAVTTETEVIWAKALPAGTSAQRAELIALTQALKMAEGKKLNVYTDSRYAFATAHIHGEIYRRRGWLTSEGKEIKNKDEILALLKALFLPKRLSIIHCPGHQKGHSAEARGNRMADQAARKAAITETPDTSTLLAGKRTADGSEFEKRTADGSEFESPKKKAKVE

SEQ ID NO: 2774 - protein, 2093 aa, synthetic construct
MPAAKRVKLDGGDKKYSIGLDIGTNSVGWAVITDEYKVPSKKFKVLGNTDRHSIKKNLIGALLFDSGETAEATRLKRTARRRYTRRKNRICYLQEIFSNEMAKVDDSFFHRLEESFLVEEDKKHERHPIFGNIVDEVAYHEKYPTIYHLRKKLVDSTDKADLRLIYLALAHMIKFRGHFLIEGDLNPDNSDVDKLFIQLVQTYNQLFEENPINASGVDAKAILSARLSKSRRLENLIAQLPGEKKNGLFGNLIALSLGLTPNFKSNFDLAEDAKLQLSKDTYDDDLDNLLAQIGDQYADLFLAAKNLSDAILLSDILRVNTEITKAPLSASMIKRYDEHHQDLTLLKALVRQQLPEKYKEIFFDQSKNGYAGYIDGGASQEEFYKFIKPILEKMDGTEELLVKLNREDLLRKQRTFDNGSIPHQIHLGELHAILRRQEDFYPFLKDNREKIEKILTFRIPYYVGPLARGNSRFAWMTRKSEETITPWNFEEVVDKGASAQSFIERMTNFDKNLPNEKVLPKHSLLYEYFTVYNELTKVKYVTEGMRKPAFLSGEQKKAIVDLLFKTNRKVTVKQLKEDYFKKIECFDSVEISGVEDRFNASLGTYHDLLKIIKDKDFLDNEENEDILEDIVLTLTLFEDREMIEERLKTYAHLFDDKVMKQLKRRRYTGWGRLSRKLINGIRDKQSGKTILDFLKSDGFANRNFMQLIHDDSLTFKEDIQKAQVSGQGDSLHEHIANLAGSPAIKKGILQTVKVVDELVKVMGRHKPENIVIEMARENQTTQKGQKNSRERMKRIEEGIKELGSQILKEHPVENTQLQNEKLYLYYLQNGRDMYVDQELDINRLSDYDVDHIVPQSFLKDDSIDNKVLTRSDKARGKSDNVPSEEVVKKMKNYWRQLLNAKLITQRKFDNLTKAERGGLSELDKAGFIKRQLVETRQITKHVAQILDSRMNTKYDENDKLIREVKVITLKSKLVSDFRKDFQFYKVREINNYHHAHDAYLNAVVGTALIKKYPKLESEFVYGDYKVYDVRKMIAKSEQEIGKATAKYFFYSNIMNFFKTEITLANGEIRKRPLIETNGETGEIVWDKGRDFATVRKVLSMPQVNIVKKTEVQTGGFSKESILPKRNSDKLIARKKDWDPKKYGGFDSPTVAYSVLVVAKVEKGKSKKLKSVKELLGITIMERSSFEKNPIDFLEAKGYKEVKKDLIIKLPKYSLFELENGRKRMLASAGELQKGNELALPSKYVNFLYLASHYEKLKGSPEDNEQKQLFVEQHKHYLDEIIEQISEFSKRVILADANLDKVLSAYNKHRDKPIREQAENIIHLFTLTNLGAPAAFKYFDTTIDRKRYTSTKEVLDATLIHQSITGLYETRIDLSQLGGDGGGGSEAAAKGGTLNIEDEHRLHETSKEPDVSLGSTWLSDFPQAWAETGGMGLAVRQAPLIIPLKATSTPVSIKQYPMSQEARLGIKPHIQRLLDQGILVPCQSPWNTPLLPVKKPGTNDYRPVQDLREVNKRVEDIHPTVPNPYNLLSGLPPSHQWYTVLDLKDAFFCLRLHPTSQPLFAFEWRDPEMGISGQLTWTRLPQGFKNSPTLFNEALHRDLADFRIQHPDLILLQYVDDLLLAATSELDCQQGTRALLQTLGNLGYRASAKKAQICQKQVKYLGYLLKEGQRWLTEARKETVMGQPTPKTPRQLREFLGTAGFCRLWIPGFAEMAAPLYPLTKPGTLFNWGPDQQKAYQEIKQALLTAPALGLPDLTKPFELFVDEKQGYAKGVLTQKLGPWRRPVAYLSKKLDPVAAGWPPCLRMVAAIAVLTKDAGKLTMGQPLVILAPHAVEALVKQPPDRWLSNARMTHYQALLLDTDRVQFGPVVALNPATLLPLPEEGLQHNCLDILAEAHGTRPDLTDQPLPDADHTWYTDGSSLLQEGQRKAGAAVTTETEVIWAKALPAGTSAQRAELIALTQALKMAEGKKLNVYTDSRYAFATAHIHGEIYRRRGWLTSEGKEIKNKDEILALLKALFLPKRLSIIHCPGHQKGHSAEARGNRMADQAARKAAITETPDTSTLLAGKRTADGSEFEKRTADGSEFESPKKKAKVE

SEQ ID NO: 2775 - protein, 2096 aa, synthetic construct
MPAAKRVKLDGGDKKYSIGLDIGTNSVGWAVITDEYKVPSKKFKVLGNTDRHSIKKNLIGALLFDSGETAEATRLKRTARRRYTRRKNRICYLQEIFSNEMAKVDDSFFHRLEESFLVEEDKKHERHPIFGNIVDEVAYHEKYPTIYHLRKKLVDSTDKADLRLIYLALAHMIKFRGHFLIEGDLNPDNSDVDKLFIQLVQTYNQLFEENPINASGVDAKAILSARLSKSRRLENLIAQLPGEKKNGLFGNLIALSLGLTPNFKSNFDLAEDAKLQLSKDTYDDDLDNLLAQIGDQYADLFLAAKNLSDAILLSDILRVNTEITKAPLSASMIKRYDEHHQDLTLLKALVRQQLPEKYKEIFFDQSKNGYAGYIDGGASQEEFYKFIKPILEKMDGTEELLVKLNREDLLRKQRTFDNGSIPHQIHLGELHAILRRQEDFYPFLKDNREKIEKILTFRIPYYVGPLARGNSRFAWMTRKSEETITPWNFEEVVDKGASAQSFIERMTNFDKNLPNEKVLPKHSLLYEYFTVYNELTKVKYVTEGMRKPAFLSGEQKKAIVDLLFKTNRKVTVKQLKEDYFKKIECFDSVEISGVEDRFNASLGTYHDLLKIIKDKDFLDNEENEDILEDIVLTLTLFEDREMIEERLKTYAHLFDDKVMKQLKRRRYTGWGRLSRKLINGIRDKQSGKTILDFLKSDGFANRNFMQLIHDDSLTFKEDIQKAQVSGQGDSLHEHIANLAGSPAIKKGILQTVKVVDELVKVMGRHKPENIVIEMARENQTTQKGQKNSRERMKRIEEGIKELGSQILKEHPVENTQLQNEKLYLYYLQNGRDMYVDQELDINRLSDYDVDHIVPQSFLKDDSIDNKVLTRSDKARGKSDNVPSEEVVKKMKNYWRQLLNAKLITQRKFDNLTKAERGGLSELDKAGFIKRQLVETRQITKHVAQILDSRMNTKYDENDKLIREVKVITLKSKLVSDFRKDFQFYKVREINNYHHAHDAYLNAVVGTALIKKYPKLESEFVYGDYKVYDVRKMIAKSEQEIGKATAKYFFYSNIMNFFKTEITLANGEIRKRPLIETNGETGEIVWDKGRDFATVRKVLSMPQVNIVKKTEVQTGGFSKESILPKRNSDKLIARKKDWDPKKYGGFDSPTVAYSVLVVAKVEKGKSKKLKSVKELLGITIMERSSFEKNPIDFLEAKGYKEVKKDLIIKLPKYSLFELENGRKRMLASAGELQKGNELALPSKYVNFLYLASHYEKLKGSPEDNEQKQLFVEQHKHYLDEIIEQISEFSKRVILADANLDKVLSAYNKHRDKPIREQAENIIHLFTLTNLGAPAAFKYFDTTIDRKRYTSTKEVLDATLIHQSITGLYETRIDLSQLGGDGGGSSEAAAKPAPGGTLNIEDEHRLHETSKEPDVSLGSTWLSDFPQAWAETGGMGLAVRQAPLIIPLKATSTPVSIKQYPMSQEARLGIKPHIQRLLDQGILVPCQSPWNTPLLPVKKPGTNDYRPVQDLREVNKRVEDIHPTVPNPYNLLSGLPPSHQWYTVLDLKDAFFCLRLHPTSQPLFAFEWRDPEMGISGQLTWTRLPQGFKNSPTLFNEALHRDLADFRIQHPDLILLQYVDDLLLAATSELDCQQGTRALLQTLGNLGYRASAKKAQICQKQVKYLGYLLKEGQRWLTEARKETVMGQPTPKTPRQLREFLGTAGFCRLWIPGFAEMAAPLYPLTKPGTLFNWGPDQQKAYQEIKQALLTAPALGLPDLTKPFELFVDEKQGYAKGVLTQKLGPWRRPVAYLSKKLDPVAAGWPPCLRMVAAIAVLTKDAGKLTMGQPLVILAPHAVEALVKQPPDRWLSNARMTHYQALLLDTDRVQFGPVVALNPATLLPLPEEGLQHNCLDILAEAHGTRPDLTDQPLPDADHTWYTDGSSLLQEGQRKAGAAVTTETEVIWAKALPAGTSAQRAELIALTQALKMAEGKKLNVYTDSRYAFATAHIHGEIYRRRGWLTSEGKEIKNKDEILALLKALFLPKRLSIIHCPGHQKGHSAEARGNRMADQAARKAAITETPDTSTLLAGKRTADGSEFEKRTADGSEFESPKKKAKVE

SEQ ID NO: 2776 - protein, 2096 aa, synthetic construct
MPAAKRVKLDGGDKKYSIGLDIGTNSVGWAVITDEYKVPSKKFKVLGNTDRHSIKKNLIGALLFDSGETAEATRLKRTARRRYTRRKNRICYLQEIFSNEMAKVDDSFFHRLEESFLVEEDKKHERHPIFGNIVDEVAYHEKYPTIYHLRKKLVDSTDKADLRLIYLALAHMIKFRGHFLIEGDLNPDNSDVDKLFIQLVQTYNQLFEENPINASGVDAKAILSARLSKSRRLENLIAQLPGEKKNGLFGNLIALSLGLTPNFKSNFDLAEDAKLQLSKDTYDDDLDNLLAQIGDQYADLFLAAKNLSDAILLSDILRVNTEITKAPLSASMIKRYDEHHQDLTLLKALVRQQLPEKYKEIFFDQSKNGYAGYIDGGASQEEFYKFIKPILEKMDGTEELLVKLNREDLLRKQRTFDNGSIPHQIHLGELHAILRRQEDFYPFLKDNREKIEKILTFRIPYYVGPLARGNSRFAWMTRKSEETITPWNFEEVVDKGASAQSFIERMTNFDKNLPNEKVLPKHSLLYEYFTVYNELTKVKYVTEGMRKPAFLSGEQKKAIVDLLFKTNRKVTVKQLKEDYFKKIECFDSVEISGVEDRFNASLGTYHDLLKIIKDKDFLDNEENEDILEDIVLTLTLFEDREMIEERLKTYAHLFDDKVMKQLKRRRYTGWGRLSRKLINGIRDKQSGKTILDFLKSDGFANRNFMQLIHDDSLTFKEDIQKAQVSGQGDSLHEHIANLAGSPAIKKGILQTVKVVDELVKVMGRHKPENIVIEMARENQTTQKGQKNSRERMKRIEEGIKELGSQILKEHPVENTQLQNEKLYLYYLQNGRDMYVDQELDINRLSDYDVDHIVPQSFLKDDSIDNKVLTRSDKARGKSDNVPSEEVVKKMKNYWRQLLNAKLITQRKFDNLTKAERGGLSELDKAGFIKRQLVETRQITKHVAQILDSRMNTKYDENDKLIREVKVITLKSKLVSDFRKDFQFYKVREINNYHHAHDAYLNAVVGTALIKKYPKLESEFVYGDYKVYDVRKMIAKSEQEIGKATAKYFFYSNIMNFFKTEITLANGEIRKRPLIETNGETGEIVWDKGRDFATVRKVLSMPQVNIVKKTEVQTGGFSKESILPKRNSDKLIARKKDWDPKKYGGFDSPTVAYSVLVVAKVEKGKSKKLKSVKELLGITIMERSSFEKNPIDFLEAKGYKEVKKDLIIKLPKYSLFELENGRKRMLASAGELQKGNELALPSKYVNFLYLASHYEKLKGSPEDNEQKQLFVEQHKHYLDEIIEQISEFSKRVILADANLDKVLSAYNKHRDKPIREQAENIIHLFTLTNLGAPAAFKYFDTTIDRKRYTSTKEVLDATLIHQSITGLYETRIDLSQLGGDGGGGSPAPEAAAKGGTLNIEDEHRLHETSKEPDVSLGSTWLSDFPQAWAETGGMGLAVRQAPLIIPLKATSTPVSIKQYPMSQEARLGIKPHIQRLLDQGILVPCQSPWNTPLLPVKKPGTNDYRPVQDLREVNKRVEDIHPTVPNPYNLLSGLPPSHQWYTVLDLKDAFFCLRLHPTSQPLFAFEWRDPEMGISGQLTWTRLPQGFKNSPTLFNEALHRDLADFRIQHPDLILLQYVDDLLLAATSELDCQQGTRALLQTLGNLGYRASAKKAQICQKQVKYLGYLLKEGQRWLTEARKETVMGQPTPKTPRQLREFLGTAGFCRLWIPGFAEMAAPLYPLTKPGTLFNWGPDQQKAYQEIKQALLTAPALGLPDLTKPFELFVDEKQGYAKGVLTQKLGPWRRPVAYLSKKLDPVAAGWPPCLRMVAAIAVLTKDAGKLTMGQPLVILAPHAVEALVKQPPDRWLSNARMTHYQALLLDTDRVQFGPVVALNPATLLPLPEEGLQHNCLDILAEAHGTRPDLTDQPLPDADHTWYTDGSSLLQEGQRKAGAAVTTETEVIWAKALPAGTSAQRAELIALTQALKMAEGKKLNVYTDSRYAFATAHIHGEIYRRRGWLTSEGKEIKNKDEILALLKALFLPKRLSIIHCPGHQKGHSAEARGNRMADQAARKAAITETPDTSTLLAGKRTADGSEFEKRTADGSEFESPKKKAKVE

SEQ ID NO: 2777 - protein, 2096 aa, synthetic construct
MPAAKRVKLDGGDKKYSIGLDIGTNSVGWAVITDEYKVPSKKFKVLGNTDRHSIKKNLIGALLFDSGETAEATRLKRTARRRYTRRKNRICYLQEIFSNEMAKVDDSFFHRLEESFLVEEDKKHERHPIFGNIVDEVAYHEKYPTIYHLRKKLVDSTDKADLRLIYLALAHMIKFRGHFLIEGDLNPDNSDVDKLFIQLVQTYNQLFEENPINASGVDAKAILSARLSKSRRLENLIAQLPGEKKNGLFGNLIALSLGLTPNFKSNFDLAEDAKLQLSKDTYDDDLDNLLAQIGDQYADLFLAAKNLSDAILLSDILRVNTEITKAPLSASMIKRYDEHHQDLTLLKALVRQQLPEKYKEIFFDQSKNGYAGYIDGGASQEEFYKFIKPILEKMDGTEELLVKLNREDLLRKQRTFDNGSIPHQIHLGELHAILRRQEDFYPFLKDNREKIEKILTFRIPYYVGPLARGNSRFAWMTRKSEETITPWNFEEVVDKGASAQSFIERMTNFDKNLPNEKVLPKHSLLYEYFTVYNELTKVKYVTEGMRKPAFLSGEQKKAIVDLLFKTNRKVTVKQLKEDYFKKIECFDSVEISGVEDRFNASLGTYHDLLKIIKDKDFLDNEENEDILEDIVLTLTLFEDREMIEERLKTYAHLFDDKVMKQLKRRRYTGWGRLSRKLINGIRDKQSGKTILDFLKSDGFANRNFMQLIHDDSLTFKEDIQKAQVSGQGDSLHEHIANLAGSPAIKKGILQTVKVVDELVKVMGRHKPENIVIEMARENQTTQKGQKNSRERMKRIEEGIKELGSQILKEHPVENTQLQNEKLYLYYLQNGRDMYVDQELDINRLSDYDVDHIVPQSFLKDDSIDNKVLTRSDKARGKSDNVPSEEVVKKMKNYWRQLLNAKLITQRKFDNLTKAERGGLSELDKAGFIKRQLVETRQITKHVAQILDSRMNTKYDENDKLIREVKVITLKSKLVSDFRKDFQFYKVREINNYHHAHDAYLNAVVGTALIKKYPKLESEFVYGDYKVYDVRKMIAKSEQEIGKATAKYFFYSNIMNFFKTEITLANGEIRKRPLIETNGETGEIVWDKGRDFATVRKVLSMPQVNIVKKTEVQTGGFSKESILPKRNSDKLIARKKDWDPKKYGGFDSPTVAYSVLVVAKVEKGKSKKLKSVKELLGITIMERSSFEKNPIDFLEAKGYKEVKKDLIIKLPKYSLFELENGRKRMLASAGELQKGNELALPSKYVNFLYLASHYEKLKGSPEDNEQKQLFVEQHKHYLDEIIEQISEFSKRVILADANLDKVLSAYNKHRDKPIREQAENIIHLFTLTNLGAPAAFKYFDTTIDRKRYTSTKEVLDATLIHQSITGLYETRIDLSQLGGDGGGSSGGGEAAAKGGTLNIEDEHRLHETSKEPDVSLGSTWLSDFPQAWAETGGMGLAVRQAPLIIPLKATSTPVSIKQYPMSQEARLGIKPHIQRLLDQGILVPCQSPWNTPLLPVKKPGTNDYRPVQDLREVNKRVEDIHPTVPNPYNLLSGLPPSHQWYTVLDLKDAFFCLRLHPTSQPLFAFEWRDPEMGISGQLTWTRLPQGFKNSPTLFNEALHRDLADFRIQHPDLILLQYVDDLLLAATSELDCQQGTRALLQTLGNLGYRASAKKAQICQKQVKYLGYLLKEGQRWLTEARKETVMGQPTPKTPRQLREFLGTAGFCRLWIPGFAEMAAPLYPLTKPGTLFNWGPDQQKAYQEIKQALLTAPALGLPDLTKPFELFVDEKQGYAKGVLTQKLGPWRRPVAYLSKKLDPVAAGWPPCLRMVAAIAVLTKDAGKLTMGQPLVILAPHAVEALVKQPPDRWLSNARMTHYQALLLDTDRVQFGPVVALNPATLLPLPEEGLQHNCLDILAEAHGTRPDLTDQPLPDADHTWYTDGSSLLQEGQRKAGAAVTTETEVIWAKALPAGTSAQRAELIALTQALKMAEGKKLNVYTDSRYAFATAHIHGEIYRRRGWLTSEGKEIKNKDEILALLKALFLPKRLSIIHCPGHQKGHSAEARGNRMADQAARKAAITETPDTSTLLAGKRTADGSEFEKRTADGSEFESPKKKAKVE

SEQ ID NO: 2778 - protein, 2091 aa, synthetic construct
MPAAKRVKLDGGDKKYSIGLDIGTNSVGWAVITDEYKVPSKKFKVLGNTDRHSIKKNLIGALLFDSGETAEATRLKRTARRRYTRRKNRICYLQEIFSNEMAKVDDSFFHRLEESFLVEEDKKHERHPIFGNIVDEVAYHEKYPTIYHLRKKLVDSTDKADLRLIYLALAHMIKFRGHFLIEGDLNPDNSDVDKLFIQLVQTYNQLFEENPINASGVDAKAILSARLSKSRRLENLIAQLPGEKKNGLFGNLIALSLGLTPNFKSNFDLAEDAKLQLSKDTYDDDLDNLLAQIGDQYADLFLAAKNLSDAILLSDILRVNTEITKAPLSASMIKRYDEHHQDLTLLKALVRQQLPEKYKEIFFDQSKNGYAGYIDGGASQEEFYKFIKPILEKMDGTEELLVKLNREDLLRKQRTFDNGSIPHQIHLGELHAILRRQEDFYPFLKDNREKIEKILTFRIPYYVGPLARGNSRFAWMTRKSEETITPWNFEEVVDKGASAQSFIERMTNFDKNLPNEKVLPKHSLLYEYFTVYNELTKVKYVTEGMRKPAFLSGEQKKAIVDLLFKTNRKVTVKQLKEDYFKKIECFDSVEISGVEDRFNASLGTYHDLLKIIKDKDFLDNEENEDILEDIVLTLTLFEDREMIEERLKTYAHLFDDKVMKQLKRRRYTGWGRLSRKLINGIRDKQSGKTILDFLKSDGFANRNFMQLIHDDSLTFKEDIQKAQVSGQGDSLHEHIANLAGSPAIKKGILQTVKVVDELVKVMGRHKPENIVIEMARENQTTQKGQKNSRERMKRIEEGIKELGSQILKEHPVENTQLQNEKLYLYYLQNGRDMYVDQELDINRLSDYDVDHIVPQSFLKDDSIDNKVLTRSDKARGKSDNVPSEEVVKKMKNYWRQLLNAKLITQRKFDNLTKAERGGLSELDKAGFIKRQLVETRQITKHVAQILDSRMNTKYDENDKLIREVKVITLKSKLVSDFRKDFQFYKVREINNYHHAHDAYLNAVVGTALIKKYPKLESEFVYGDYKVYDVRKMIAKSEQEIGKATAKYFFYSNIMNFFKTEITLANGEIRKRPLIETNGETGEIVWDKGRDFATVRKVLSMPQVNIVKKTEVQTGGFSKESILPKRNSDKLIARKKDWDPKKYGGFDSPTVAYSVLVVAKVEKGKSKKLKSVKELLGITIMERSSFEKNPIDFLEAKGYKEVKKDLIIKLPKYSLFELENGRKRMLASAGELQKGNELALPSKYVNFLYLASHYEKLKGSPEDNEQKQLFVEQHKHYLDEIIEQISEFSKRVILADANLDKVLSAYNKHRDKPIREQAENIIHLFTLTNLGAPAAFKYFDTTIDRKRYTSTKEVLDATLIHQSITGLYETRIDLSQLGGDGGGSSGGSGGTLNIEDEHRLHETSKEPDVSLGSTWLSDFPQAWAETGGMGLAVRQAPLIIPLKATSTPVSIKQYPMSQEARLGIKPHIQRLLDQGILVPCQSPWNTPLLPVKKPGTNDYRPVQDLREVNKRVEDIHPTVPNPYNLLSGLPPSHQWYTVLDLKDAFFCLRLHPTSQPLFAFEWRDPEMGISGQLTWTRLPQGFKNSPTLFNEALHRDLADFRIQHPDLILLQYVDDLLLAATSELDCQQGTRALLQTLGNLGYRASAKKAQICQKQVKYLGYLLKEGQRWLTEARKETVMGQPTPKTPRQLREFLGTAGFCRLWIPGFAEMAAPLYPLTKPGTLFNWGPDQQKAYQEIKQALLTAPALGLPDLTKPFELFVDEKQGYAKGVLTQKLGPWRRPVAYLSKKLDPVAAGWPPCLRMVAAIAVLTKDAGKLTMGQPLVILAPHAVEALVKQPPDRWLSNARMTHYQALLLDTDRVQFGPVVALNPATLLPLPEEGLQHNCLDILAEAHGTRPDLTDQPLPDADHTWYTDGSSLLQEGQRKAGAAVTTETEVIWAKALPAGTSAQRAELIALTQALKMAEGKKLNVYTDSRYAFATAHIHGEIYRRRGWLTSEGKEIKNKDEILALLKALFLPKRLSIIHCPGHQKGHSAEARGNRMADQAARKAAITETPDTSTLLAGKRTADGSEFEKRTADGSEFESPKKKAKVE

SEQ ID NO: 2779 - protein, 2091 aa, synthetic construct
MPAAKRVKLDGGDKKYSIGLDIGTNSVGWAVITDEYKVPSKKFKVLGNTDRHSIKKNLIGALLFDSGETAEATRLKRTARRRYTRRKNRICYLQEIFSNEMAKVDDSFFHRLEESFLVEEDKKHERHPIFGNIVDEVAYHEKYPTIYHLRKKLVDSTDKADLRLIYLALAHMIKFRGHFLIEGDLNPDNSDVDKLFIQLVQTYNQLFEENPINASGVDAKAILSARLSKSRRLENLIAQLPGEKKNGLFGNLIALSLGLTPNFKSNFDLAEDAKLQLSKDTYDDDLDNLLAQIGDQYADLFLAAKNLSDAILLSDILRVNTEITKAPLSASMIKRYDEHHQDLTLLKALVRQQLPEKYKEIFFDQSKNGYAGYIDGGASQEEFYKFIKPILEKMDGTEELLVKLNREDLLRKQRTFDNGSIPHQIHLGELHAILRRQEDFYPFLKDNREKIEKILTFRIPYYVGPLARGNSRFAWMTRKSEETITPWNFEEVVDKGASAQSFIERMTNFDKNLPNEKVLPKHSLLYEYFTVYNELTKVKYVTEGMRKPAFLSGEQKKAIVDLLFKTNRKVTVKQLKEDYFKKIECFDSVEISGVEDRFNASLGTYHDLLKIIKDKDFLDNEENEDILEDIVLTLTLFEDREMIEERLKTYAHLFDDKVMKQLKRRRYTGWGRLSRKLINGIRDKQSGKTILDFLKSDGFANRNFMQLIHDDSLTFKEDIQKAQVSGQGDSLHEHIANLAGSPAIKKGILQTVKVVDELVKVMGRHKPENIVIEMARENQTTQKGQKNSRERMKRIEEGIKELGSQILKEHPVENTQLQNEKLYLYYLQNGRDMYVDQELDINRLSDYDVDHIVPQSFLKDDSIDNKVLTRSDKARGKSDNVPSEEVVKKMKNYWRQLLNAKLITQRKFDNLTKAERGGLSELDKAGFIKRQLVETRQITKHVAQILDSRMNTKYDENDKLIREVKVITLKSKLVSDFRKDFQFYKVREINNYHHAHDAYLNAVVGTALIKKYPKLESEFVYGDYKVYDVRKMIAKSEQEIGKATAKYFFYSNIMNFFKTEITLANGEIRKRPLIETNGETGEIVWDKGRDFATVRKVLSMPQVNIVKKTEVQTGGFSKESILPKRNSDKLIARKKDWDPKKYGGFDSPTVAYSVLVVAKVEKGKSKKLKSVKELLGITIMERSSFEKNPIDFLEAKGYKEVKKDLIIKLPKYSLFELENGRKRMLASAGELQKGNELALPSKYVNFLYLASHYEKLKGSPEDNEQKQLFVEQHKHYLDEIIEQISEFSKRVILADANLDKVLSAYNKHRDKPIREQAENIIHLFTLTNLGAPAAFKYFDTTIDRKRYTSTKEVLDATLIHQSITGLYETRIDLSQLGGDGGGSSGSSGGTLNIEDEHRLHETSKEPDVSLGSTWLSDFPQAWAETGGMGLAVRQAPLIIPLKATSTPVSIKQYPMSQEARLGIKPHIQRLLDQGILVPCQSPWNTPLLPVKKPGTNDYRPVQDLREVNKRVEDIHPTVPNPYNLLSGLPPSHQWYTVLDLKDAFFCLRLHPTSQPLFAFEWRDPEMGISGQLTWTRLPQGFKNSPTLFNEALHRDLADFRIQHPDLILLQYVDDLLLAATSELDCQQGTRALLQTLGNLGYRASAKKAQICQKQVKYLGYLLKEGQRWLTEARKETVMGQPTPKTPRQLREFLGTAGFCRLWIPGFAEMAAPLYPLTKPGTLFNWGPDQQKAYQEIKQALLTAPALGLPDLTKPFELFVDEKQGYAKGVLTQKLGPWRRPVAYLSKKLDPVAAGWPPCLRMVAAIAVLTKDAGKLTMGQPLVILAPHAVEALVKQPPDRWLSNARMTHYQALLLDTDRVQFGPVVALNPATLLPLPEEGLQHNCLDILAEAHGTRPDLTDQPLPDADHTWYTDGSSLLQEGQRKAGAAVTTETEVIWAKALPAGTSAQRAELIALTQALKMAEGKKLNVYTDSRYAFATAHIHGEIYRRRGWLTSEGKEIKNKDEILALLKALFLPKRLSIIHCPGHQKGHSAEARGNRMADQAARKAAITETPDTSTLLAGKRTADGSEFEKRTADGSEFESPKKKAKVE

SEQ ID NO: 2780 - protein, 2091 aa, synthetic construct
MPAAKRVKLDGGDKKYSIGLDIGTNSVGWAVITDEYKVPSKKFKVLGNTDRHSIKKNLIGALLFDSGETAEATRLKRTARRRYTRRKNRICYLQEIFSNEMAKVDDSFFHRLEESFLVEEDKKHERHPIFGNIVDEVAYHEKYPTIYHLRKKLVDSTDKADLRLIYLALAHMIKFRGHFLIEGDLNPDNSDVDKLFIQLVQTYNQLFEENPINASGVDAKAILSARLSKSRRLENLIAQLPGEKKNGLFGNLIALSLGLTPNFKSNFDLAEDAKLQLSKDTYDDDLDNLLAQIGDQYADLFLAAKNLSDAILLSDILRVNTEITKAPLSASMIKRYDEHHQDLTLLKALVRQQLPEKYKEIFFDQSKNGYAGYIDGGASQEEFYKFIKPILEKMDGTEELLVKLNREDLLRKQRTFDNGSIPHQIHLGELHAILRRQEDFYPFLKDNREKIEKILTFRIPYYVGPLARGNSRFAWMTRKSEETITPWNFEEVVDKGASAQSFIERMTNFDKNLPNEKVLPKHSLLYEYFTVYNELTKVKYVTEGMRKPAFLSGEQKKAIVDLLFKTNRKVTVKQLKEDYFKKIECFDSVEISGVEDRFNASLGTYHDLLKIIKDKDFLDNEENEDILEDIVLTLTLFEDREMIEERLKTYAHLFDDKVMKQLKRRRYTGWGRLSRKLINGIRDKQSGKTILDFLKSDGFANRNFMQLIHDDSLTFKEDIQKAQVSGQGDSLHEHIANLAGSPAIKKGILQTVKVVDELVKVMGRHKPENIVIEMARENQTTQKGQKNSRERMKRIEEGIKELGSQILKEHPVENTQLQNEKLYLYYLQNGRDMYVDQELDINRLSDYDVDHIVPQSFLKDDSIDNKVLTRSDKARGKSDNVPSEEVVKKMKNYWRQLLNAKLITQRKFDNLTKAERGGLSELDKAGFIKRQLVETRQITKHVAQILDSRMNTKYDENDKLIREVKVITLKSKLVSDFRKDFQFYKVREINNYHHAHDAYLNAVVGTALIKKYPKLESEFVYGDYKVYDVRKMIAKSEQEIGKATAKYFFYSNIMNFFKTEITLANGEIRKRPLIETNGETGEIVWDKGRDFATVRKVLSMPQVNIVKKTEVQTGGFSKESILPKRNSDKLIARKKDWDPKKYGGFDSPTVAYSVLVVAKVEKGKSKKLKSVKELLGITIMERSSFEKNPIDFLEAKGYKEVKKDLIIKLPKYSLFELENGRKRMLASAGELQKGNELALPSKYVNFLYLASHYEKLKGSPEDNEQKQLFVEQHKHYLDEIIEQISEFSKRVILADANLDKVLSAYNKHRDKPIREQAENIIHLFTLTNLGAPAAFKYFDTTIDRKRYTSTKEVLDATLIHQSITGLYETRIDLSQLGGDGGGGGGGSGGTLNIEDEHRLHETSKEPDVSLGSTWLSDFPQAWAETGGMGLAVRQAPLIIPLKATSTPVSIKQYPMSQEARLGIKPHIQRLLDQGILVPCQSPWNTPLLPVKKPGTNDYRPVQDLREVNKRVEDIHPTVPNPYNLLSGLPPSHQWYTVLDLKDAFFCLRLHPTSQPLFAFEWRDPEMGISGQLTWTRLPQGFKNSPTLFNEALHRDLADFRIQHPDLILLQYVDDLLLAATSELDCQQGTRALLQTLGNLGYRASAKKAQICQKQVKYLGYLLKEGQRWLTEARKETVMGQPTPKTPRQLREFLGKAGFCRLFIPGFAEMAAPLYPLTKPGTLFNWGPDQQKAYQEIKQALLTAPALGLPDLTKPFELFVDEKQGYAKGVLTQKLGPWRRPVAYLSKKLDPVAAGWPPCLRMVAAIAVLTKDAGKLTMGQPLVILAPHAVEALVKQPPDRWLSNARMTHYQALLLDTDRVQFGPVVALNPATLLPLPEEGLQHNCLDILAEAHGTRPDLTDQPLPDADHTWYTDGSSLLQEGQRKAGAAVTTETEVIWAKALPAGTSAQRAELIALTQALKMAEGKKLNVYTDSRYAFATAHIHGEIYRRRGWLTSEGKEIKNKDEILALLKALFLPKRLSIIHCPGHQKGHSAEARGNRMADQAARKAAITETPDTSTLLAGKRTADGSEFEKRTADGSEFESPKKKAKVE

SEQ ID NO: 2781 - protein, 2096 aa, synthetic construct
MPAAKRVKLDGGDKKYSIGLDIGTNSVGWAVITDEYKVPSKKFKVLGNTDRHSIKKNLIGALLFDSGETAEATRLKRTARRRYTRRKNRICYLQEIFSNEMAKVDDSFFHRLEESFLVEEDKKHERHPIFGNIVDEVAYHEKYPTIYHLRKKLVDSTDKADLRLIYLALAHMIKFRGHFLIEGDLNPDNSDVDKLFIQLVQTYNQLFEENPINASGVDAKAILSARLSKSRRLENLIAQLPGEKKNGLFGNLIALSLGLTPNFKSNFDLAEDAKLQLSKDTYDDDLDNLLAQIGDQYADLFLAAKNLSDAILLSDILRVNTEITKAPLSASMIKRYDEHHQDLTLLKALVRQQLPEKYKEIFFDQSKNGYAGYIDGGASQEEFYKFIKPILEKMDGTEELLVKLNREDLLRKQRTFDNGSIPHQIHLGELHAILRRQEDFYPFLKDNREKIEKILTFRIPYYVGPLARGNSRFAWMTRKSEETITPWNFEEVVDKGASAQSFIERMTNFDKNLPNEKVLPKHSLLYEYFTVYNELTKVKYVTEGMRKPAFLSGEQKKAIVDLLFKTNRKVTVKQLKEDYFKKIECFDSVEISGVEDRFNASLGTYHDLLKIIKDKDFLDNEENEDILEDIVLTLTLFEDREMIEERLKTYAHLFDDKVMKQLKRRRYTGWGRLSRKLINGIRDKQSGKTILDFLKSDGFANRNFMQLIHDDSLTFKEDIQKAQVSGQGDSLHEHIANLAGSPAIKKGILQTVKVVDELVKVMGRHKPENIVIEMARENQTTQKGQKNSRERMKRIEEGIKELGSQILKEHPVENTQLQNEKLYLYYLQNGRDMYVDQELDINRLSDYDVDHIVPQSFLKDDSIDNKVLTRSDKARGKSDNVPSEEVVKKMKNYWRQLLNAKLITQRKFDNLTKAERGGLSELDKAGFIKRQLVETRQITKHVAQILDSRMNTKYDENDKLIREVKVITLKSKLVSDFRKDFQFYKVREINNYHHAHDAYLNAVVGTALIKKYPKLESEFVYGDYKVYDVRKMIAKSEQEIGKATAKYFFYSNIMNFFKTEITLANGEIRKRPLIETNGETGEIVWDKGRDFATVRKVLSMPQVNIVKKTEVQTGGFSKESILPKRNSDKLIARKKDWDPKKYGGFDSPTVAYSVLVVAKVEKGKSKKLKSVKELLGITIMERSSFEKNPIDFLEAKGYKEVKKDLIIKLPKYSLFELENGRKRMLASAGELQKGNELALPSKYVNFLYLASHYEKLKGSPEDNEQKQLFVEQHKHYLDEIIEQISEFSKRVILADANLDKVLSAYNKHRDKPIREQAENIIHLFTLTNLGAPAAFKYFDTTIDRKRYTSTKEVLDATLIHQSITGLYETRIDLSQLGGDGGEAAAKPAPGSSGGTLNIEDEHRLHETSKEPDVSLGSTWLSDFPQAWAETGGMGLAVRQAPLIIPLKATSTPVSIKQYPMSQEARLGIKPHIQRLLDQGILVPCQSPWNTPLLPVKKPGTNDYRPVQDLREVNKRVEDIHPTVPNPYNLLSGLPPSHQWYTVLDLKDAFFCLRLHPTSQPLFAFEWRDPEMGISGQLTWTRLPQGFKNSPTLFNEALHRDLADFRIQHPDLILLQYVDDLLLAATSELDCQQGTRALLQTLGNLGYRASAKKAQICQKQVKYLGYLLKEGQRWLTEARKETVMGQPTPKTPRQLREFLGKAGFCRLFIPGFAEMAAPLYPLTKPGTLFNWGPDQQKAYQEIKQALLTAPALGLPDLTKPFELFVDEKQGYAKGVLTQKLGPWRRPVAYLSKKLDPVAAGWPPCLRMVAAIAVLTKDAGKLTMGQPLVILAPHAVEALVKQPPDRWLSNARMTHYQALLLDTDRVQFGPVVALNPATLLPLPEEGLQHNCLDILAEAHGTRPDLTDQPLPDADHTWYTDGSSLLQEGQRKAGAAVTTETEVIWAKALPAGTSAQRAELIALTQALKMAEGKKLNVYTDSRYAFATAHIHGEIYRRRGWLTSEGKEIKNKDEILALLKALFLPKRLSIIHCPGHQKGHSAEARGNRMADQAARKAAITETPDTSTLLAGKRTADGSEFEKRTADGSEFESPKKKAKVE

SEQ ID NO: 2782 - protein, 2096 aa, synthetic construct
MPAAKRVKLDGGDKKYSIGLDIGTNSVGWAVITDEYKVPSKKFKVLGNTDRHSIKKNLIGALLFDSGETAEATRLKRTARRRYTRRKNRICYLQEIFSNEMAKVDDSFFHRLEESFLVEEDKKHERHPIFGNIVDEVAYHEKYPTIYHLRKKLVDSTDKADLRLIYLALAHMIKFRGHFLIEGDLNPDNSDVDKLFIQLVQTYNQLFEENPINASGVDAKAILSARLSKSRRLENLIAQLPGEKKNGLFGNLIALSLGLTPNFKSNFDLAEDAKLQLSKDTYDDDLDNLLAQIGDQYADLFLAAKNLSDAILLSDILRVNTEITKAPLSASMIKRYDEHHQDLTLLKALVRQQLPEKYKEIFFDQSKNGYAGYIDGGASQEEFYKFIKPILEKMDGTEELLVKLNREDLLRKQRTFDNGSIPHQIHLGELHAILRRQEDFYPFLKDNREKIEKILTFRIPYYVGPLARGNSRFAWMTRKSEETITPWNFEEVVDKGASAQSFIERMTNFDKNLPNEKVLPKHSLLYEYFTVYNELTKVKYVTEGMRKPAFLSGEQKKAIVDLLFKTNRKVTVKQLKEDYFKKIECFDSVEISGVEDRFNASLGTYHDLLKIIKDKDFLDNEENEDILEDIVLTLTLFEDREMIEERLKTYAHLFDDKVMKQLKRRRYTGWGRLSRKLINGIRDKQSGKTILDFLKSDGFANRNFMQLIHDDSLTFKEDIQKAQVSGQGDSLHEHIANLAGSPAIKKGILQTVKVVDELVKVMGRHKPENIVIEMARENQTTQKGQKNSRERMKRIEEGIKELGSQILKEHPVENTQLQNEKLYLYYLQNGRDMYVDQELDINRLSDYDVDHIVPQSFLKDDSIDNKVLTRSDKARGKSDNVPSEEVVKKMKNYWRQLLNAKLITQRKFDNLTKAERGGLSELDKAGFIKRQLVETRQITKHVAQILDSRMNTKYDENDKLIREVKVITLKSKLVSDFRKDFQFYKVREINNYHHAHDAYLNAVVGTALIKKYPKLESEFVYGDYKVYDVRKMIAKSEQEIGKATAKYFFYSNIMNFFKTEITLANGEIRKRPLIETNGETGEIVWDKGRDFATVRKVLSMPQVNIVKKTEVQTGGFSKESILPKRNSDKLIARKKDWDPKKYGGFDSPTVAYSVLVVAKVEKGKSKKLKSVKELLGITIMERSSFEKNPIDFLEAKGYKEVKKDLIIKLPKYSLFELENGRKRMLASAGELQKGNELALPSKYVNFLYLASHYEKLKGSPEDNEQKQLFVEQHKHYLDEIIEQISEFSKRVILADANLDKVLSAYNKHRDKPIREQAENIIHLFTLTNLGAPAAFKYFDTTIDRKRYTSTKEVLDATLIHQSITGLYETRIDLSQLGGDGGEAAAKGGSPAPGGTLNIEDEHRLHETSKEPDVSLGSTWLSDFPQAWAETGGMGLAVRQAPLIIPLKATSTPVSIKQYPMSQEARLGIKPHIQRLLDQGILVPCQSPWNTPLLPVKKPGTNDYRPVQDLREVNKRVEDIHPTVPNPYNLLSGLPPSHQWYTVLDLKDAFFCLRLHPTSQPLFAFEWRDPEMGISGQLTWTRLPQGFKNSPTLFNEALHRDLADFRIQHPDLILLQYVDDLLLAATSELDCQQGTRALLQTLGNLGYRASAKKAQICQKQVKYLGYLLKEGQRWLTEARKETVMGQPTPKTPRQLREFLGKAGFCRLFIPGFAEMAAPLYPLTKPGTLFNWGPDQQKAYQEIKQALLTAPALGLPDLTKPFELFVDEKQGYAKGVLTQKLGPWRRPVAYLSKKLDPVAAGWPPCLRMVAAIAVLTKDAGKLTMGQPLVILAPHAVEALVKQPPDRWLSNARMTHYQALLLDTDRVQFGPVVALNPATLLPLPEEGLQHNCLDILAEAHGTRPDLTDQPLPDADHTWYTDGSSLLQEGQRKAGAAVTTETEVIWAKALPAGTSAQRAELIALTQALKMAEGKKLNVYTDSRYAFATAHIHGEIYRRRGWLTSEGKEIKNKDEILALLKALFLPKRLSIIHCPGHQKGHSAEARGNRMADQAARKAAITETPDTSTLLAGKRTADGSEFEKRTADGSEFESPKKKAKVE

SEQ ID NO: 2783 - protein, 2093 aa, synthetic construct
MPAAKRVKLDGGDKKYSIGLDIGTNSVGWAVITDEYKVPSKKFKVLGNTDRHSIKKNLIGALLFDSGETAEATRLKRTARRRYTRRKNRICYLQEIFSNEMAKVDDSFFHRLEESFLVEEDKKHERHPIFGNIVDEVAYHEKYPTIYHLRKKLVDSTDKADLRLIYLALAHMIKFRGHFLIEGDLNPDNSDVDKLFIQLVQTYNQLFEENPINASGVDAKAILSARLSKSRRLENLIAQLPGEKKNGLFGNLIALSLGLTPNFKSNFDLAEDAKLQLSKDTYDDDLDNLLAQIGDQYADLFLAAKNLSDAILLSDILRVNTEITKAPLSASMIKRYDEHHQDLTLLKALVRQQLPEKYKEIFFDQSKNGYAGYIDGGASQEEFYKFIKPILEKMDGTEELLVKLNREDLLRKQRTFDNGSIPHQIHLGELHAILRRQEDFYPFLKDNREKIEKILTFRIPYYVGPLARGNSRFAWMTRKSEETITPWNFEEVVDKGASAQSFIERMTNFDKNLPNEKVLPKHSLLYEYFTVYNELTKVKYVTEGMRKPAFLSGEQKKAIVDLLFKTNRKVTVKQLKEDYFKKIECFDSVEISGVEDRFNASLGTYHDLLKIIKDKDFLDNEENEDILEDIVLTLTLFEDREMIEERLKTYAHLFDDKVMKQLKRRRYTGWGRLSRKLINGIRDKQSGKTILDFLKSDGFANRNFMQLIHDDSLTFKEDIQKAQVSGQGDSLHEHIANLAGSPAIKKGILQTVKVVDELVKVMGRHKPENIVIEMARENQTTQKGQKNSRERMKRIEEGIKELGSQILKEHPVENTQLQNEKLYLYYLQNGRDMYVDQELDINRLSDYDVDHIVPQSFLKDDSIDNKVLTRSDKARGKSDNVPSEEVVKKMKNYWRQLLNAKLITQRKFDNLTKAERGGLSELDKAGFIKRQLVETRQITKHVAQILDSRMNTKYDENDKLIREVKVITLKSKLVSDFRKDFQFYKVREINNYHHAHDAYLNAVVGTALIKKYPKLESEFVYGDYKVYDVRKMIAKSEQEIGKATAKYFFYSNIMNFFKTEITLANGEIRKRPLIETNGETGEIVWDKGRDFATVRKVLSMPQVNIVKKTEVQTGGFSKESILPKRNSDKLIARKKDWDPKKYGGFDSPTVAYSVLVVAKVEKGKSKKLKSVKELLGITIMERSSFEKNPIDFLEAKGYKEVKKDLIIKLPKYSLFELENGRKRMLASAGELQKGNELALPSKYVNFLYLASHYEKLKGSPEDNEQKQLFVEQHKHYLDEIIEQISEFSKRVILADANLDKVLSAYNKHRDKPIREQAENIIHLFTLTNLGAPAAFKYFDTTIDRKRYTSTKEVLDATLIHQSITGLYETRIDLSQLGGDGGEAAAKGGSGGTLNIEDEHRLHETSKEPDVSLGSTWLSDFPQAWAETGGMGLAVRQAPLIIPLKATSTPVSIKQYPMSQEARLGIKPHIQRLLDQGILVPCQSPWNTPLLPVKKPGTNDYRPVQDLREVNKRVEDIHPTVPNPYNLLSGLPPSHQWYTVLDLKDAFFCLRLHPTSQPLFAFEWRDPEMGISGQLTWTRLPQGFKNSPTLFNEALHRDLADFRIQHPDLILLQYVDDLLLAATSELDCQQGTRALLQTLGNLGYRASAKKAQICQKQVKYLGYLLKEGQRWLTEARKETVMGQPTPKTPRQLREFLGKAGFCRLFIPGFAEMAAPLYPLTKPGTLFNWGPDQQKAYQEIKQALLTAPALGLPDLTKPFELFVDEKQGYAKGVLTQKLGPWRRPVAYLSKKLDPVAAGWPPCLRMVAAIAVLTKDAGKLTMGQPLVILAPHAVEALVKQPPDRWLSNARMTHYQALLLDTDRVQFGPVVALNPATLLPLPEEGLQHNCLDILAEAHGTRPDLTDQPLPDADHTWYTDGSSLLQEGQRKAGAAVTTETEVIWAKALPAGTSAQRAELIALTQALKMAEGKKLNVYTDSRYAFATAHIHGEIYRRRGWLTSEGKEIKNKDEILALLKALFLPKRLSIIHCPGHQKGHSAEARGNRMADQAARKAAITETPDTSTLLAGKRTADGSEFEKRTADGSEFESPKKKAKVE

SEQ ID NO: 2784 - protein, 2131 aa, synthetic construct
MPAAKRVKLDGGDKKYSIGLDIGTNSVGWAVITDEYKVPSKKFKVLGNTDRHSIKKNLIGALLFDSGETAEATRLKRTARRRYTRRKNRICYLQEIFSNEMAKVDDSFFHRLEESFLVEEDKKHERHPIFGNIVDEVAYHEKYPTIYHLRKKLVDSTDKADLRLIYLALAHMIKFRGHFLIEGDLNPDNSDVDKLFIQLVQTYNQLFEENPINASGVDAKAILSARLSKSRRLENLIAQLPGEKKNGLFGNLIALSLGLTPNFKSNFDLAEDAKLQLSKDTYDDDLDNLLAQIGDQYADLFLAAKNLSDAILLSDILRVNTEITKAPLSASMIKRYDEHHQDLTLLKALVRQQLPEKYKEIFFDQSKNGYAGYIDGGASQEEFYKFIKPILEKMDGTEELLVKLNREDLLRKQRTFDNGSIPHQIHLGELHAILRRQEDFYPFLKDNREKIEKILTFRIPYYVGPLARGNSRFAWMTRKSEETITPWNFEEVVDKGASAQSFIERMTNFDKNLPNEKVLPKHSLLYEYFTVYNELTKVKYVTEGMRKPAFLSGEQKKAIVDLLFKTNRKVTVKQLKEDYFKKIECFDSVEISGVEDRFNASLGTYHDLLKIIKDKDFLDNEENEDILEDIVLTLTLFEDREMIEERLKTYAHLFDDKVMKQLKRRRYTGWGRLSRKLINGIRDKQSGKTILDFLKSDGFANRNFMQLIHDDSLTFKEDIQKAQVSGQGDSLHEHIANLAGSPAIKKGILQTVKVVDELVKVMGRHKPENIVIEMARENQTTQKGQKNSRERMKRIEEGIKELGSQILKEHPVENTQLQNEKLYLYYLQNGRDMYVDQELDINRLSDYDVDHIVPQSFLKDDSIDNKVLTRSDKARGKSDNVPSEEVVKKMKNYWRQLLNAKLITQRKFDNLTKAERGGLSELDKAGFIKRQLVETRQITKHVAQILDSRMNTKYDENDKLIREVKVITLKSKLVSDFRKDFQFYKVREINNYHHAHDAYLNAVVGTALIKKYPKLESEFVYGDYKVYDVRKMIAKSEQEIGKATAKYFFYSNIMNFFKTEITLANGEIRKRPLIETNGETGEIVWDKGRDFATVRKVLSMPQVNIVKKTEVQTGGFSKESILPKRNSDKLIARKKDWDPKKYGGFDSPTVAYSVLVVAKVEKGKSKKLKSVKELLGITIMERSSFEKNPIDFLEAKGYKEVKKDLIIKLPKYSLFELENGRKRMLASAGELQKGNELALPSKYVNFLYLASHYEKLKGSPEDNEQKQLFVEQHKHYLDEIIEQISEFSKRVILADANLDKVLSAYNKHRDKPIREQAENIIHLFTLTNLGAPAAFKYFDTTIDRKRYTSTKEVLDATLIHQSITGLYETRIDLSQLGGDGGAEAAAKEAAAKEAAAKEAAAKALEAEAAAKEAAAKEAAAKEAAAKAGGTLNIEDEHRLHETSKEPDVSLGSTWLSDFPQAWAETGGMGLAVRQAPLIIPLKATSTPVSIKQYPMSQEARLGIKPHIQRLLDQGILVPCQSPWNTPLLPVKKPGTNDYRPVQDLREVNKRVEDIHPTVPNPYNLLSGLPPSHQWYTVLDLKDAFFCLRLHPTSQPLFAFEWRDPEMGISGQLTWTRLPQGFKNSPTLFNEALHRDLADFRIQHPDLILLQYVDDLLLAATSELDCQQGTRALLQTLGNLGYRASAKKAQICQKQVKYLGYLLKEGQRWLTEARKETVMGQPTPKTPRQLREFLGKAGFCRLFIPGFAEMAAPLYPLTKPGTLFNWGPDQQKAYQEIKQALLTAPALGLPDLTKPFELFVDEKQGYAKGVLTQKLGPWRRPVAYLSKKLDPVAAGWPPCLRMVAAIAVLTKDAGKLTMGQPLVILAPHAVEALVKQPPDRWLSNARMTHYQALLLDTDRVQFGPVVALNPATLLPLPEEGLQHNCLDILAEAHGTRPDLTDQPLPDADHTWYTDGSSLLQEGQRKAGAAVTTETEVIWAKALPAGTSAQRAELIALTQALKMAEGKKLNVYTDSRYAFATAHIHGEIYRRRGWLTSEGKEIKNKDEILALLKALFLPKRLSIIHCPGHQKGHSAEARGNRMADQAARKAAITETPDTSTLLAGKRTADGSEFEKRTADGSEFESPKKKAKVE

SEQ ID NO: 2785 - protein, 2096 aa, synthetic construct
MPAAKRVKLDGGDKKYSIGLDIGTNSVGWAVITDEYKVPSKKFKVLGNTDRHSIKKNLIGALLFDSGETAEATRLKRTARRRYTRRKNRICYLQEIFSNEMAKVDDSFFHRLEESFLVEEDKKHERHPIFGNIVDEVAYHEKYPTIYHLRKKLVDSTDKADLRLIYLALAHMIKFRGHFLIEGDLNPDNSDVDKLFIQLVQTYNQLFEENPINASGVDAKAILSARLSKSRRLENLIAQLPGEKKNGLFGNLIALSLGLTPNFKSNFDLAEDAKLQLSKDTYDDDLDNLLAQIGDQYADLFLAAKNLSDAILLSDILRVNTEITKAPLSASMIKRYDEHHQDLTLLKALVRQQLPEKYKEIFFDQSKNGYAGYIDGGASQEEFYKFIKPILEKMDGTEELLVKLNREDLLRKQRTFDNGSIPHQIHLGELHAILRRQEDFYPFLKDNREKIEKILTFRIPYYVGPLARGNSRFAWMTRKSEETITPWNFEEVVDKGASAQSFIERMTNFDKNLPNEKVLPKHSLLYEYFTVYNELTKVKYVTEGMRKPAFLSGEQKKAIVDLLFKTNRKVTVKQLKEDYFKKIECFDSVEISGVEDRFNASLGTYHDLLKIIKDKDFLDNEENEDILEDIVLTLTLFEDREMIEERLKTYAHLFDDKVMKQLKRRRYTGWGRLSRKLINGIRDKQSGKTILDFLKSDGFANRNFMQLIHDDSLTFKEDIQKAQVSGQGDSLHEHIANLAGSPAIKKGILQTVKVVDELVKVMGRHKPENIVIEMARENQTTQKGQKNSRERMKRIEEGIKELGSQILKEHPVENTQLQNEKLYLYYLQNGRDMYVDQELDINRLSDYDVDHIVPQSFLKDDSIDNKVLTRSDKARGKSDNVPSEEVVKKMKNYWRQLLNAKLITQRKFDNLTKAERGGLSELDKAGFIKRQLVETRQITKHVAQILDSRMNTKYDENDKLIREVKVITLKSKLVSDFRKDFQFYKVREINNYHHAHDAYLNAVVGTALIKKYPKLESEFVYGDYKVYDVRKMIAKSEQEIGKATAKYFFYSNIMNFFKTEITLANGEIRKRPLIETNGETGEIVWDKGRDFATVRKVLSMPQVNIVKKTEVQTGGFSKESILPKRNSDKLIARKKDWDPKKYGGFDSPTVAYSVLVVAKVEKGKSKKLKSVKELLGITIMERSSFEKNPIDFLEAKGYKEVKKDLIIKLPKYSLFELENGRKRMLASAGELQKGNELALPSKYVNFLYLASHYEKLKGSPEDNEQKQLFVEQHKHYLDEIIEQISEFSKRVILADANLDKVLSAYNKHRDKPIREQAENIIHLFTLTNLGAPAAFKYFDTTIDRKRYTSTKEVLDATLIHQSITGLYETRIDLSQLGGDGGEAAAKGSSGGGGGTLNIEDEHRLHETSKEPDVSLGSTWLSDFPQAWAETGGMGLAVRQAPLIIPLKATSTPVSIKQYPMSQEARLGIKPHIQRLLDQGILVPCQSPWNTPLLPVKKPGTNDYRPVQDLREVNKRVEDIHPTVPNPYNLLSGLPPSHQWYTVLDLKDAFFCLRLHPTSQPLFAFEWRDPEMGISGQLTWTRLPQGFKNSPTLFNEALHRDLADFRIQHPDLILLQYVDDLLLAATSELDCQQGTRALLQTLGNLGYRASAKKAQICQKQVKYLGYLLKEGQRWLTEARKETVMGQPTPKTPRQLREFLGKAGFCRLFIPGFAEMAAPLYPLTKPGTLFNWGPDQQKAYQEIKQALLTAPALGLPDLTKPFELFVDEKQGYAKGVLTQKLGPWRRPVAYLSKKLDPVAAGWPPCLRMVAAIAVLTKDAGKLTMGQPLVILAPHAVEALVKQPPDRWLSNARMTHYQALLLDTDRVQFGPVVALNPATLLPLPEEGLQHNCLDILAEAHGTRPDLTDQPLPDADHTWYTDGSSLLQEGQRKAGAAVTTETEVIWAKALPAGTSAQRAELIALTQALKMAEGKKLNVYTDSRYAFATAHIHGEIYRRRGWLTSEGKEIKNKDEILALLKALFLPKRLSIIHCPGHQKGHSAEARGNRMADQAARKAAITETPDTSTLLAGKRTADGSEFEKRTADGSEFESPKKKAKVE

SEQ ID NO: 2786 - protein, 2096 aa, synthetic construct
MPAAKRVKLDGGDKKYSIGLDIGTNSVGWAVITDEYKVPSKKFKVLGNTDRHSIKKNLIGALLFDSGETAEATRLKRTARRRYTRRKNRICYLQEIFSNEMAKVDDSFFHRLEESFLVEEDKKHERHPIFGNIVDEVAYHEKYPTIYHLRKKLVDSTDKADLRLIYLALAHMIKFRGHFLIEGDLNPDNSDVDKLFIQLVQTYNQLFEENPINASGVDAKAILSARLSKSRRLENLIAQLPGEKKNGLFGNLIALSLGLTPNFKSNFDLAEDAKLQLSKDTYDDDLDNLLAQIGDQYADLFLAAKNLSDAILLSDILRVNTEITKAPLSASMIKRYDEHHQDLTLLKALVRQQLPEKYKEIFFDQSKNGYAGYIDGGASQEEFYKFIKPILEKMDGTEELLVKLNREDLLRKQRTFDNGSIPHQIHLGELHAILRRQEDFYPFLKDNREKIEKILTFRIPYYVGPLARGNSRFAWMTRKSEETITPWNFEEVVDKGASAQSFIERMTNFDKNLPNEKVLPKHSLLYEYFTVYNELTKVKYVTEGMRKPAFLSGEQKKAIVDLLFKTNRKVTVKQLKEDYFKKIECFDSVEISGVEDRFNASLGTYHDLLKIIKDKDFLDNEENEDILEDIVLTLTLFEDREMIEERLKTYAHLFDDKVMKQLKRRRYTGWGRLSRKLINGIRDKQSGKTILDFLKSDGFANRNFMQLIHDDSLTFKEDIQKAQVSGQGDSLHEHIANLAGSPAIKKGILQTVKVVDELVKVMGRHKPENIVIEMARENQTTQKGQKNSRERMKRIEEGIKELGSQILKEHPVENTQLQNEKLYLYYLQNGRDMYVDQELDINRLSDYDVDHIVPQSFLKDDSIDNKVLTRSDKARGKSDNVPSEEVVKKMKNYWRQLLNAKLITQRKFDNLTKAERGGLSELDKAGFIKRQLVETRQITKHVAQILDSRMNTKYDENDKLIREVKVITLKSKLVSDFRKDFQFYKVREINNYHHAHDAYLNAVVGTALIKKYPKLESEFVYGDYKVYDVRKMIAKSEQEIGKATAKYFFYSNIMNFFKTEITLANGEIRKRPLIETNGETGEIVWDKGRDFATVRKVLSMPQVNIVKKTEVQTGGFSKESILPKRNSDKLIARKKDWDPKKYGGFDSPTVAYSVLVVAKVEKGKSKKLKSVKELLGITIMERSSFEKNPIDFLEAKGYKEVKKDLIIKLPKYSLFELENGRKRMLASAGELQKGNELALPSKYVNFLYLASHYEKLKGSPEDNEQKQLFVEQHKHYLDEIIEQISEFSKRVILADANLDKVLSAYNKHRDKPIREQAENIIHLFTLTNLGAPAAFKYFDTTIDRKRYTSTKEVLDATLIHQSITGLYETRIDLSQLGGDGGPAPGGSEAAAKGGTLNIEDEHRLHETSKEPDVSLGSTWLSDFPQAWAETGGMGLAVRQAPLIIPLKATSTPVSIKQYPMSQEARLGIKPHIQRLLDQGILVPCQSPWNTPLLPVKKPGTNDYRPVQDLREVNKRVEDIHPTVPNPYNLLSGLPPSHQWYTVLDLKDAFFCLRLHPTSQPLFAFEWRDPEMGISGQLTWTRLPQGFKNSPTLFNEALHRDLADFRIQHPDLILLQYVDDLLLAATSELDCQQGTRALLQTLGNLGYRASAKKAQICQKQVKYLGYLLKEGQRWLTEARKETVMGQPTPKTPRQLREFLGKAGFCRLFIPGFAEMAAPLYPLTKPGTLFNWGPDQQKAYQEIKQALLTAPALGLPDLTKPFELFVDEKQGYAKGVLTQKLGPWRRPVAYLSKKLDPVAAGWPPCLRMVAAIAVLTKDAGKLTMGQPLVILAPHAVEALVKQPPDRWLSNARMTHYQALLLDTDRVQFGPVVALNPATLLPLPEEGLQHNCLDILAEAHGTRPDLTDQPLPDADHTWYTDGSSLLQEGQRKAGAAVTTETEVIWAKALPAGTSAQRAELIALTQALKMAEGKKLNVYTDSRYAFATAHIHGEIYRRRGWLTSEGKEIKNKDEILALLKALFLPKRLSIIHCPGHQKGHSAEARGNRMADQAARKAAITETPDTSTLLAGKRTADGSEFEKRTADGSEFESPKKKAKVE

SEQ ID NO: 2787 - protein, 2096 aa, synthetic construct
MPAAKRVKLDGGDKKYSIGLDIGTNSVGWAVITDEYKVPSKKFKVLGNTDRHSIKKNLIGALLFDSGETAEATRLKRTARRRYTRRKNRICYLQEIFSNEMAKVDDSFFHRLEESFLVEEDKKHERHPIFGNIVDEVAYHEKYPTIYHLRKKLVDSTDKADLRLIYLALAHMIKFRGHFLIEGDLNPDNSDVDKLFIQLVQTYNQLFEENPINASGVDAKAILSARLSKSRRLENLIAQLPGEKKNGLFGNLIALSLGLTPNFKSNFDLAEDAKLQLSKDTYDDDLDNLLAQIGDQYADLFLAAKNLSDAILLSDILRVNTEITKAPLSASMIKRYDEHHQDLTLLKALVRQQLPEKYKEIFFDQSKNGYAGYIDGGASQEEFYKFIKPILEKMDGTEELLVKLNREDLLRKQRTFDNGSIPHQIHLGELHAILRRQEDFYPFLKDNREKIEKILTFRIPYYVGPLARGNSRFAWMTRKSEETITPWNFEEVVDKGASAQSFIERMTNFDKNLPNEKVLPKHSLLYEYFTVYNELTKVKYVTEGMRKPAFLSGEQKKAIVDLLFKTNRKVTVKQLKEDYFKKIECFDSVEISGVEDRFNASLGTYHDLLKIIKDKDFLDNEENEDILEDIVLTLTLFEDREMIEERLKTYAHLFDDKVMKQLKRRRYTGWGRLSRKLINGIRDKQSGKTILDFLKSDGFANRNFMQLIHDDSLTFKEDIQKAQVSGQGDSLHEHIANLAGSPAIKKGILQTVKVVDELVKVMGRHKPENIVIEMARENQTTQKGQKNSRERMKRIEEGIKELGSQILKEHPVENTQLQNEKLYLYYLQNGRDMYVDQELDINRLSDYDVDHIVPQSFLKDDSIDNKVLTRSDKARGKSDNVPSEEVVKKMKNYWRQLLNAKLITQRKFDNLTKAERGGLSELDKAGFIKRQLVETRQITKHVAQILDSRMNTKYDENDKLIREVKVITLKSKLVSDFRKDFQFYKVREINNYHHAHDAYLNAVVGTALIKKYPKLESEFVYGDYKVYDVRKMIAKSEQEIGKATAKYFFYSNIMNFFKTEITLANGEIRKRPLIETNGETGEIVWDKGRDFATVRKVLSMPQVNIVKKTEVQTGGFSKESILPKRNSDKLIARKKDWDPKKYGGFDSPTVAYSVLVVAKVEKGKSKKLKSVKELLGITIMERSSFEKNPIDFLEAKGYKEVKKDLIIKLPKYSLFELENGRKRMLASAGELQKGNELALPSKYVNFLYLASHYEKLKGSPEDNEQKQLFVEQHKHYLDEIIEQISEFSKRVILADANLDKVLSAYNKHRDKPIREQAENIIHLFTLTNLGAPAAFKYFDTTIDRKRYTSTKEVLDATLIHQSITGLYETRIDLSQLGGDGGGGSEAAAKGGGGGTLNIEDEHRLHETSKEPDVSLGSTWLSDFPQAWAETGGMGLAVRQAPLIIPLKATSTPVSIKQYPMSQEARLGIKPHIQRLLDQGILVPCQSPWNTPLLPVKKPGTNDYRPVQDLREVNKRVEDIHPTVPNPYNLLSGLPPSHQWYTVLDLKDAFFCLRLHPTSQPLFAFEWRDPEMGISGQLTWTRLPQGFKNSPTLFNEALHRDLADFRIQHPDLILLQYVDDLLLAATSELDCQQGTRALLQTLGNLGYRASAKKAQICQKQVKYLGYLLKEGQRWLTEARKETVMGQPTPKTPRQLREFLGKAGFCRLFIPGFAEMAAPLYPLTKPGTLFNWGPDQQKAYQEIKQALLTAPALGLPDLTKPFELFVDEKQGYAKGVLTQKLGPWRRPVAYLSKKLDPVAAGWPPCLRMVAAIAVLTKDAGKLTMGQPLVILAPHAVEALVKQPPDRWLSNARMTHYQALLLDTDRVQFGPVVALNPATLLPLPEEGLQHNCLDILAEAHGTRPDLTDQPLPDADHTWYTDGSSLLQEGQRKAGAAVTTETEVIWAKALPAGTSAQRAELIALTQALKMAEGKKLNVYTDSRYAFATAHIHGEIYRRRGWLTSEGKEIKNKDEILALLKALFLPKRLSIIHCPGHQKGHSAEARGNRMADQAARKAAITETPDTSTLLAGKRTADGSEFEKRTADGSEFESPKKKAKVE

SEQ ID NO: 2788 - protein, 2100 aa, synthetic construct
MPAAKRVKLDGGDKKYSIGLDIGTNSVGWAVITDEYKVPSKKFKVLGNTDRHSIKKNLIGALLFDSGETAEATRLKRTARRRYTRRKNRICYLQEIFSNEMAKVDDSFFHRLEESFLVEEDKKHERHPIFGNIVDEVAYHEKYPTIYHLRKKLVDSTDKADLRLIYLALAHMIKFRGHFLIEGDLNPDNSDVDKLFIQLVQTYNQLFEENPINASGVDAKAILSARLSKSRRLENLIAQLPGEKKNGLFGNLIALSLGLTPNFKSNFDLAEDAKLQLSKDTYDDDLDNLLAQIGDQYADLFLAAKNLSDAILLSDILRVNTEITKAPLSASMIKRYDEHHQDLTLLKALVRQQLPEKYKEIFFDQSKNGYAGYIDGGASQEEFYKFIKPILEKMDGTEELLVKLNREDLLRKQRTFDNGSIPHQIHLGELHAILRRQEDFYPFLKDNREKIEKILTFRIPYYVGPLARGNSRFAWMTRKSEETITPWNFEEVVDKGASAQSFIERMTNFDKNLPNEKVLPKHSLLYEYFTVYNELTKVKYVTEGMRKPAFLSGEQKKAIVDLLFKTNRKVTVKQLKEDYFKKIECFDSVEISGVEDRFNASLGTYHDLLKIIKDKDFLDNEENEDILEDIVLTLTLFEDREMIEERLKTYAHLFDDKVMKQLKRRRYTGWGRLSRKLINGIRDKQSGKTILDFLKSDGFANRNFMQLIHDDSLTFKEDIQKAQVSGQGDSLHEHIANLAGSPAIKKGILQTVKVVDELVKVMGRHKPENIVIEMARENQTTQKGQKNSRERMKRIEEGIKELGSQILKEHPVENTQLQNEKLYLYYLQNGRDMYVDQELDINRLSDYDVDHIVPQSFLKDDSIDNKVLTRSDKARGKSDNVPSEEVVKKMKNYWRQLLNAKLITQRKFDNLTKAERGGLSELDKAGFIKRQLVETRQITKHVAQILDSRMNTKYDENDKLIREVKVITLKSKLVSDFRKDFQFYKVREINNYHHAHDAYLNAVVGTALIKKYPKLESEFVYGDYKVYDVRKMIAKSEQEIGKATAKYFFYSNIMNFFKTEITLANGEIRKRPLIETNGETGEIVWDKGRDFATVRKVLSMPQVNIVKKTEVQTGGFSKESILPKRNSDKLIARKKDWDPKKYGGFDSPTVAYSVLVVAKVEKGKSKKLKSVKELLGITIMERSSFEKNPIDFLEAKGYKEVKKDLIIKLPKYSLFELENGRKRMLASAGELQKGNELALPSKYVNFLYLASHYEKLKGSPEDNEQKQLFVEQHKHYLDEIIEQISEFSKRVILADANLDKVLSAYNKHRDKPIREQAENIIHLFTLTNLGAPAAFKYFDTTIDRKRYTSTKEVLDATLIHQSITGLYETRIDLSQLGGDGGEAAAKGGGGSEAAAKGGTLNIEDEHRLHETSKEPDVSLGSTWLSDFPQAWAETGGMGLAVRQAPLIIPLKATSTPVSIKQYPMSQEARLGIKPHIQRLLDQGILVPCQSPWNTPLLPVKKPGTNDYRPVQDLREVNKRVEDIHPTVPNPYNLLSGLPPSHQWYTVLDLKDAFFCLRLHPTSQPLFAFEWRDPEMGISGQLTWTRLPQGFKNSPTLFNEALHRDLADFRIQHPDLILLQYVDDLLLAATSELDCQQGTRALLQTLGNLGYRASAKKAQICQKQVKYLGYLLKEGQRWLTEARKETVMGQPTPKTPRQLREFLGKAGFCRLFIPGFAEMAAPLYPLTKPGTLFNWGPDQQKAYQEIKQALLTAPALGLPDLTKPFELFVDEKQGYAKGVLTQKLGPWRRPVAYLSKKLDPVAAGWPPCLRMVAAIAVLTKDAGKLTMGQPLVILAPHAVEALVKQPPDRWLSNARMTHYQALLLDTDRVQFGPVVALNPATLLPLPEEGLQHNCLDILAEAHGTRPDLTDQPLPDADHTWYTDGSSLLQEGQRKAGAAVTTETEVIWAKALPAGTSAQRAELIALTQALKMAEGKKLNVYTDSRYAFATAHIHGEIYRRRGWLTSEGKEIKNKDEILALLKALFLPKRLSIIHCPGHQKGHSAEARGNRMADQAARKAAITETPDTSTLLAGKRTADGSEFEKRTADGSEFESPKKKAKVE

SEQ ID NO: 2789 - protein, 2096 aa, synthetic construct
MPAAKRVKLDGGDKKYSIGLDIGTNSVGWAVITDEYKVPSKKFKVLGNTDRHSIKKNLIGALLFDSGETAEATRLKRTARRRYTRRKNRICYLQEIFSNEMAKVDDSFFHRLEESFLVEEDKKHERHPIFGNIVDEVAYHEKYPTIYHLRKKLVDSTDKADLRLIYLALAHMIKFRGHFLIEGDLNPDNSDVDKLFIQLVQTYNQLFEENPINASGVDAKAILSARLSKSRRLENLIAQLPGEKKNGLFGNLIALSLGLTPNFKSNFDLAEDAKLQLSKDTYDDDLDNLLAQIGDQYADLFLAAKNLSDAILLSDILRVNTEITKAPLSASMIKRYDEHHQDLTLLKALVRQQLPEKYKEIFFDQSKNGYAGYIDGGASQEEFYKFIKPILEKMDGTEELLVKLNREDLLRKQRTFDNGSIPHQIHLGELHAILRRQEDFYPFLKDNREKIEKILTFRIPYYVGPLARGNSRFAWMTRKSEETITPWNFEEVVDKGASAQSFIERMTNFDKNLPNEKVLPKHSLLYEYFTVYNELTKVKYVTEGMRKPAFLSGEQKKAIVDLLFKTNRKVTVKQLKEDYFKKIECFDSVEISGVEDRFNASLGTYHDLLKIIKDKDFLDNEENEDILEDIVLTLTLFEDREMIEERLKTYAHLFDDKVMKQLKRRRYTGWGRLSRKLINGIRDKQSGKTILDFLKSDGFANRNFMQLIHDDSLTFKEDIQKAQVSGQGDSLHEHIANLAGSPAIKKGILQTVKVVDELVKVMGRHKPENIVIEMARENQTTQKGQKNSRERMKRIEEGIKELGSQILKEHPVENTQLQNEKLYLYYLQNGRDMYVDQELDINRLSDYDVDHIVPQSFLKDDSIDNKVLTRSDKARGKSDNVPSEEVVKKMKNYWRQLLNAKLITQRKFDNLTKAERGGLSELDKAGFIKRQLVETRQITKHVAQILDSRMNTKYDENDKLIREVKVITLKSKLVSDFRKDFQFYKVREINNYHHAHDAYLNAVVGTALIKKYPKLESEFVYGDYKVYDVRKMIAKSEQEIGKATAKYFFYSNIMNFFKTEITLANGEIRKRPLIETNGETGEIVWDKGRDFATVRKVLSMPQVNIVKKTEVQTGGFSKESILPKRNSDKLIARKKDWDPKKYGGFDSPTVAYSVLVVAKVEKGKSKKLKSVKELLGITIMERSSFEKNPIDFLEAKGYKEVKKDLIIKLPKYSLFELENGRKRMLASAGELQKGNELALPSKYVNFLYLASHYEKLKGSPEDNEQKQLFVEQHKHYLDEIIEQISEFSKRVILADANLDKVLSAYNKHRDKPIREQAENIIHLFTLTNLGAPAAFKYFDTTIDRKRYTSTKEVLDATLIHQSITGLYETRIDLSQLGGDGGEAAAKGGGGSSGGTLNIEDEHRLHETSKEPDVSLGSTWLSDFPQAWAETGGMGLAVRQAPLIIPLKATSTPVSIKQYPMSQEARLGIKPHIQRLLDQGILVPCQSPWNTPLLPVKKPGTNDYRPVQDLREVNKRVEDIHPTVPNPYNLLSGLPPSHQWYTVLDLKDAFFCLRLHPTSQPLFAFEWRDPEMGISGQLTWTRLPQGFKNSPTLFNEALHRDLADFRIQHPDLILLQYVDDLLLAATSELDCQQGTRALLQTLGNLGYRASAKKAQICQKQVKYLGYLLKEGQRWLTEARKETVMGQPTPKTPRQLREFLGKAGFCRLFIPGFAEMAAPLYPLTKPGTLFNWGPDQQKAYQEIKQALLTAPALGLPDLTKPFELFVDEKQGYAKGVLTQKLGPWRRPVAYLSKKLDPVAAGWPPCLRMVAAIAVLTKDAGKLTMGQPLVILAPHAVEALVKQPPDRWLSNARMTHYQALLLDTDRVQFGPVVALNPATLLPLPEEGLQHNCLDILAEAHGTRPDLTDQPLPDADHTWYTDGSSLLQEGQRKAGAAVTTETEVIWAKALPAGTSAQRAELIALTQALKMAEGKKLNVYTDSRYAFATAHIHGEIYRRRGWLTSEGKEIKNKDEILALLKALFLPKRLSIIHCPGHQKGHSAEARGNRMADQAARKAAITETPDTSTLLAGKRTADGSEFEKRTADGSEFESPKKKAKVE

SEQ ID NO: 2790 - protein, 2092 aa, synthetic construct
MPAAKRVKLDGGDKKYSIGLDIGTNSVGWAVITDEYKVPSKKFKVLGNTDRHSIKKNLIGALLFDSGETAEATRLKRTARRRYTRRKNRICYLQEIFSNEMAKVDDSFFHRLEESFLVEEDKKHERHPIFGNIVDEVAYHEKYPTIYHLRKKLVDSTDKADLRLIYLALAHMIKFRGHFLIEGDLNPDNSDVDKLFIQLVQTYNQLFEENPINASGVDAKAILSARLSKSRRLENLIAQLPGEKKNGLFGNLIALSLGLTPNFKSNFDLAEDAKLQLSKDTYDDDLDNLLAQIGDQYADLFLAAKNLSDAILLSDILRVNTEITKAPLSASMIKRYDEHHQDLTLLKALVRQQLPEKYKEIFFDQSKNGYAGYIDGGASQEEFYKFIKPILEKMDGTEELLVKLNREDLLRKQRTFDNGSIPHQIHLGELHAILRRQEDFYPFLKDNREKIEKILTFRIPYYVGPLARGNSRFAWMTRKSEETITPWNFEEVVDKGASAQSFIERMTNFDKNLPNEKVLPKHSLLYEYFTVYNELTKVKYVTEGMRKPAFLSGEQKKAIVDLLFKTNRKVTVKQLKEDYFKKIECFDSVEISGVEDRFNASLGTYHDLLKIIKDKDFLDNEENEDILEDIVLTLTLFEDREMIEERLKTYAHLFDDKVMKQLKRRRYTGWGRLSRKLINGIRDKQSGKTILDFLKSDGFANRNFMQLIHDDSLTFKEDIQKAQVSGQGDSLHEHIANLAGSPAIKKGILQTVKVVDELVKVMGRHKPENIVIEMARENQTTQKGQKNSRERMKRIEEGIKELGSQILKEHPVENTQLQNEKLYLYYLQNGRDMYVDQELDINRLSDYDVDHIVPQSFLKDDSIDNKVLTRSDKARGKSDNVPSEEVVKKMKNYWRQLLNAKLITQRKFDNLTKAERGGLSELDKAGFIKRQLVETRQITKHVAQILDSRMNTKYDENDKLIREVKVITLKSKLVSDFRKDFQFYKVREINNYHHAHDAYLNAVVGTALIKKYPKLESEFVYGDYKVYDVRKMIAKSEQEIGKATAKYFFYSNIMNFFKTEITLANGEIRKRPLIETNGETGEIVWDKGRDFATVRKVLSMPQVNIVKKTEVQTGGFSKESILPKRNSDKLIARKKDWDPKKYGGFDSPTVAYSVLVVAKVEKGKSKKLKSVKELLGITIMERSSFEKNPIDFLEAKGYKEVKKDLIIKLPKYSLFELENGRKRMLASAGELQKGNELALPSKYVNFLYLASHYEKLKGSPEDNEQKQLFVEQHKHYLDEIIEQISEFSKRVILADANLDKVLSAYNKHRDKPIREQAENIIHLFTLTNLGAPAAFKYFDTTIDRKRYTSTKEVLDATLIHQSITGLYETRIDLSQLGGDGGGGGGGGGGGTLNIEDEHRLHETSKEPDVSLGSTWLSDFPQAWAETGGMGLAVRQAPLIIPLKATSTPVSIKQYPMSQEARLGIKPHIQRLLDQGILVPCQSPWNTPLLPVKKPGTNDYRPVQDLREVNKRVEDIHPTVPNPYNLLSGLPPSHQWYTVLDLKDAFFCLRLHPTSQPLFAFEWRDPEMGISGQLTWTRLPQGFKNSPTLFNEALHRDLADFRIQHPDLILLQYVDDLLLAATSELDCQQGTRALLQTLGNLGYRASAKKAQICQKQVKYLGYLLKEGQRWLTEARKETVMGQPTPKTPRQLREFLGKAGFCRLFIPGFAEMAAPLYPLTKPGTLFNWGPDQQKAYQEIKQALLTAPALGLPDLTKPFELFVDEKQGYAKGVLTQKLGPWRRPVAYLSKKLDPVAAGWPPCLRMVAAIAVLTKDAGKLTMGQPLVILAPHAVEALVKQPPDRWLSNARMTHYQALLLDTDRVQFGPVVALNPATLLPLPEEGLQHNCLDILAEAHGTRPDLTDQPLPDADHTWYTDGSSLLQEGQRKAGAAVTTETEVIWAKALPAGTSAQRAELIALTQALKMAEGKKLNVYTDSRYAFATAHIHGEIYRRRGWLTSEGKEIKNKDEILALLKALFLPKRLSIIHCPGHQKGHSAEARGNRMADQAARKAAITETPDTSTLLAGKRTADGSEFEKRTADGSEFESPKKKAKVE

SEQ ID NO: 2791 - protein, 2100 aa, synthetic construct
MPAAKRVKLDGGDKKYSIGLDIGTNSVGWAVITDEYKVPSKKFKVLGNTDRHSIKKNLIGALLFDSGETAEATRLKRTARRRYTRRKNRICYLQEIFSNEMAKVDDSFFHRLEESFLVEEDKKHERHPIFGNIVDEVAYHEKYPTIYHLRKKLVDSTDKADLRLIYLALAHMIKFRGHFLIEGDLNPDNSDVDKLFIQLVQTYNQLFEENPINASGVDAKAILSARLSKSRRLENLIAQLPGEKKNGLFGNLIALSLGLTPNFKSNFDLAEDAKLQLSKDTYDDDLDNLLAQIGDQYADLFLAAKNLSDAILLSDILRVNTEITKAPLSASMIKRYDEHHQDLTLLKALVRQQLPEKYKEIFFDQSKNGYAGYIDGGASQEEFYKFIKPILEKMDGTEELLVKLNREDLLRKQRTFDNGSIPHQIHLGELHAILRRQEDFYPFLKDNREKIEKILTFRIPYYVGPLARGNSRFAWMTRKSEETITPWNFEEVVDKGASAQSFIERMTNFDKNLPNEKVLPKHSLLYEYFTVYNELTKVKYVTEGMRKPAFLSGEQKKAIVDLLFKTNRKVTVKQLKEDYFKKIECFDSVEISGVEDRFNASLGTYHDLLKIIKDKDFLDNEENEDILEDIVLTLTLFEDREMIEERLKTYAHLFDDKVMKQLKRRRYTGWGRLSRKLINGIRDKQSGKTILDFLKSDGFANRNFMQLIHDDSLTFKEDIQKAQVSGQGDSLHEHIANLAGSPAIKKGILQTVKVVDELVKVMGRHKPENIVIEMARENQTTQKGQKNSRERMKRIEEGIKELGSQILKEHPVENTQLQNEKLYLYYLQNGRDMYVDQELDINRLSDYDVDHIVPQSFLKDDSIDNKVLTRSDKARGKSDNVPSEEVVKKMKNYWRQLLNAKLITQRKFDNLTKAERGGLSELDKAGFIKRQLVETRQITKHVAQILDSRMNTKYDENDKLIREVKVITLKSKLVSDFRKDFQFYKVREINNYHHAHDAYLNAVVGTALIKKYPKLESEFVYGDYKVYDVRKMIAKSEQEIGKATAKYFFYSNIMNFFKTEITLANGEIRKRPLIETNGETGEIVWDKGRDFATVRKVLSMPQVNIVKKTEVQTGGFSKESILPKRNSDKLIARKKDWDPKKYGGFDSPTVAYSVLVVAKVEKGKSKKLKSVKELLGITIMERSSFEKNPIDFLEAKGYKEVKKDLIIKLPKYSLFELENGRKRMLASAGELQKGNELALPSKYVNFLYLASHYEKLKGSPEDNEQKQLFVEQHKHYLDEIIEQISEFSKRVILADANLDKVLSAYNKHRDKPIREQAENIIHLFTLTNLGAPAAFKYFDTTIDRKRYTSTKEVLDATLIHQSITGLYETRIDLSQLGGDGGEAAAKEAAAKEAAAKGGTLNIEDEHRLHETSKEPDVSLGSTWLSDFPQAWAETGGMGLAVRQAPLIIPLKATSTPVSIKQYPMSQEARLGIKPHIQRLLDQGILVPCQSPWNTPLLPVKKPGTNDYRPVQDLREVNKRVEDIHPTVPNPYNLLSGLPPSHQWYTVLDLKDAFFCLRLHPTSQPLFAFEWRDPEMGISGQLTWTRLPQGFKNSPTLFNEALHRDLADFRIQHPDLILLQYVDDLLLAATSELDCQQGTRALLQTLGNLGYRASAKKAQICQKQVKYLGYLLKEGQRWLTEARKETVMGQPTPKTPRQLREFLGKAGFCRLFIPGFAEMAAPLYPLTKPGTLFNWGPDQQKAYQEIKQALLTAPALGLPDLTKPFELFVDEKQGYAKGVLTQKLGPWRRPVAYLSKKLDPVAAGWPPCLRMVAAIAVLTKDAGKLTMGQPLVILAPHAVEALVKQPPDRWLSNARMTHYQALLLDTDRVQFGPVVALNPATLLPLPEEGLQHNCLDILAEAHGTRPDLTDQPLPDADHTWYTDGSSLLQEGQRKAGAAVTTETEVIWAKALPAGTSAQRAELIALTQALKMAEGKKLNVYTDSRYAFATAHIHGEIYRRRGWLTSEGKEIKNKDEILALLKALFLPKRLSIIHCPGHQKGHSAEARGNRMADQAARKAAITETPDTSTLLAGKRTADGSEFEKRTADGSEFESPKKKAKVE

SEQ ID NO: 2792 - protein, 2096 aa, synthetic construct
MPAAKRVKLDGGDKKYSIGLDIGTNSVGWAVITDEYKVPSKKFKVLGNTDRHSIKKNLIGALLFDSGETAEATRLKRTARRRYTRRKNRICYLQEIFSNEMAKVDDSFFHRLEESFLVEEDKKHERHPIFGNIVDEVAYHEKYPTIYHLRKKLVDSTDKADLRLIYLALAHMIKFRGHFLIEGDLNPDNSDVDKLFIQLVQTYNQLFEENPINASGVDAKAILSARLSKSRRLENLIAQLPGEKKNGLFGNLIALSLGLTPNFKSNFDLAEDAKLQLSKDTYDDDLDNLLAQIGDQYADLFLAAKNLSDAILLSDILRVNTEITKAPLSASMIKRYDEHHQDLTLLKALVRQQLPEKYKEIFFDQSKNGYAGYIDGGASQEEFYKFIKPILEKMDGTEELLVKLNREDLLRKQRTFDNGSIPHQIHLGELHAILRRQEDFYPFLKDNREKIEKILTFRIPYYVGPLARGNSRFAWMTRKSEETITPWNFEEVVDKGASAQSFIERMTNFDKNLPNEKVLPKHSLLYEYFTVYNELTKVKYVTEGMRKPAFLSGEQKKAIVDLLFKTNRKVTVKQLKEDYFKKIECFDSVEISGVEDRFNASLGTYHDLLKIIKDKDFLDNEENEDILEDIVLTLTLFEDREMIEERLKTYAHLFDDKVMKQLKRRRYTGWGRLSRKLINGIRDKQSGKTILDFLKSDGFANRNFMQLIHDDSLTFKEDIQKAQVSGQGDSLHEHIANLAGSPAIKKGILQTVKVVDELVKVMGRHKPENIVIEMARENQTTQKGQKNSRERMKRIEEGIKELGSQILKEHPVENTQLQNEKLYLYYLQNGRDMYVDQELDINRLSDYDVDHIVPQSFLKDDSIDNKVLTRSDKARGKSDNVPSEEVVKKMKNYWRQLLNAKLITQRKFDNLTKAERGGLSELDKAGFIKRQLVETRQITKHVAQILDSRMNTKYDENDKLIREVKVITLKSKLVSDFRKDFQFYKVREINNYHHAHDAYLNAVVGTALIKKYPKLESEFVYGDYKVYDVRKMIAKSEQEIGKATAKYFFYSNIMNFFKTEITLANGEIRKRPLIETNGETGEIVWDKGRDFATVRKVLSMPQVNIVKKTEVQTGGFSKESILPKRNSDKLIARKKDWDPKKYGGFDSPTVAYSVLVVAKVEKGKSKKLKSVKELLGITIMERSSFEKNPIDFLEAKGYKEVKKDLIIKLPKYSLFELENGRKRMLASAGELQKGNELALPSKYVNFLYLASHYEKLKGSPEDNEQKQLFVEQHKHYLDEIIEQISEFSKRVILADANLDKVLSAYNKHRDKPIREQAENIIHLFTLTNLGAPAAFKYFDTTIDRKRYTSTKEVLDATLIHQSITGLYETRIDLSQLGGDGGEAAAKGSSPAPGGTLNIEDEHRLHETSKEPDVSLGSTWLSDFPQAWAETGGMGLAVRQAPLIIPLKATSTPVSIKQYPMSQEARLGIKPHIQRLLDQGILVPCQSPWNTPLLPVKKPGTNDYRPVQDLREVNKRVEDIHPTVPNPYNLLSGLPPSHQWYTVLDLKDAFFCLRLHPTSQPLFAFEWRDPEMGISGQLTWTRLPQGFKNSPTLFNEALHRDLADFRIQHPDLILLQYVDDLLLAATSELDCQQGTRALLQTLGNLGYRASAKKAQICQKQVKYLGYLLKEGQRWLTEARKETVMGQPTPKTPRQLREFLGKAGFCRLFIPGFAEMAAPLYPLTKPGTLFNWGPDQQKAYQEIKQALLTAPALGLPDLTKPFELFVDEKQGYAKGVLTQKLGPWRRPVAYLSKKLDPVAAGWPPCLRMVAAIAVLTKDAGKLTMGQPLVILAPHAVEALVKQPPDRWLSNARMTHYQALLLDTDRVQFGPVVALNPATLLPLPEEGLQHNCLDILAEAHGTRPDLTDQPLPDADHTWYTDGSSLLQEGQRKAGAAVTTETEVIWAKALPAGTSAQRAELIALTQALKMAEGKKLNVYTDSRYAFATAHIHGEIYRRRGWLTSEGKEIKNKDEILALLKALFLPKRLSIIHCPGHQKGHSAEARGNRMADQAARKAAITETPDTSTLLAGKRTADGSEFEKRTADGSEFESPKKKAKVE

SEQ ID NO: 2793 - protein, 2094 aa, synthetic construct
MPAAKRVKLDGGDKKYSIGLDIGTNSVGWAVITDEYKVPSKKFKVLGNTDRHSIKKNLIGALLFDSGETAEATRLKRTARRRYTRRKNRICYLQEIFSNEMAKVDDSFFHRLEESFLVEEDKKHERHPIFGNIVDEVAYHEKYPTIYHLRKKLVDSTDKADLRLIYLALAHMIKFRGHFLIEGDLNPDNSDVDKLFIQLVQTYNQLFEENPINASGVDAKAILSARLSKSRRLENLIAQLPGEKKNGLFGNLIALSLGLTPNFKSNFDLAEDAKLQLSKDTYDDDLDNLLAQIGDQYADLFLAAKNLSDAILLSDILRVNTEITKAPLSASMIKRYDEHHQDLTLLKALVRQQLPEKYKEIFFDQSKNGYAGYIDGGASQEEFYKFIKPILEKMDGTEELLVKLNREDLLRKQRTFDNGSIPHQIHLGELHAILRRQEDFYPFLKDNREKIEKILTFRIPYYVGPLARGNSRFAWMTRKSEETITPWNFEEVVDKGASAQSFIERMTNFDKNLPNEKVLPKHSLLYEYFTVYNELTKVKYVTEGMRKPAFLSGEQKKAIVDLLFKTNRKVTVKQLKEDYFKKIECFDSVEISGVEDRFNASLGTYHDLLKIIKDKDFLDNEENEDILEDIVLTLTLFEDREMIEERLKTYAHLFDDKVMKQLKRRRYTGWGRLSRKLINGIRDKQSGKTILDFLKSDGFANRNFMQLIHDDSLTFKEDIQKAQVSGQGDSLHEHIANLAGSPAIKKGILQTVKVVDELVKVMGRHKPENIVIEMARENQTTQKGQKNSRERMKRIEEGIKELGSQILKEHPVENTQLQNEKLYLYYLQNGRDMYVDQELDINRLSDYDVDHIVPQSFLKDDSIDNKVLTRSDKARGKSDNVPSEEVVKKMKNYWRQLLNAKLITQRKFDNLTKAERGGLSELDKAGFIKRQLVETRQITKHVAQILDSRMNTKYDENDKLIREVKVITLKSKLVSDFRKDFQFYKVREINNYHHAHDAYLNAVVGTALIKKYPKLESEFVYGDYKVYDVRKMIAKSEQEIGKATAKYFFYSNIMNFFKTEITLANGEIRKRPLIETNGETGEIVWDKGRDFATVRKVLSMPQVNIVKKTEVQTGGFSKESILPKRNSDKLIARKKDWDPKKYGGFDSPTVAYSVLVVAKVEKGKSKKLKSVKELLGITIMERSSFEKNPIDFLEAKGYKEVKKDLIIKLPKYSLFELENGRKRMLASAGELQKGNELALPSKYVNFLYLASHYEKLKGSPEDNEQKQLFVEQHKHYLDEIIEQISEFSKRVILADANLDKVLSAYNKHRDKPIREQAENIIHLFTLTNLGAPAAFKYFDTTIDRKRYTSTKEVLDATLIHQSITGLYETRIDLSQLGGDGGPAPGGGGSSGGTLNIEDEHRLHETSKEPDVSLGSTWLSDFPQAWAETGGMGLAVRQAPLIIPLKATSTPVSIKQYPMSQEARLGIKPHIQRLLDQGILVPCQSPWNTPLLPVKKPGTNDYRPVQDLREVNKRVEDIHPTVPNPYNLLSGLPPSHQWYTVLDLKDAFFCLRLHPTSQPLFAFEWRDPEMGISGQLTWTRLPQGFKNSPTLFNEALHRDLADFRIQHPDLILLQYVDDLLLAATSELDCQQGTRALLQTLGNLGYRASAKKAQICQKQVKYLGYLLKEGQRWLTEARKETVMGQPTPKTPRQLREFLGKAGFCRLFIPGFAEMAAPLYPLTKPGTLFNWGPDQQKAYQEIKQALLTAPALGLPDLTKPFELFVDEKQGYAKGVLTQKLGPWRRPVAYLSKKLDPVAAGWPPCLRMVAAIAVLTKDAGKLTMGQPLVILAPHAVEALVKQPPDRWLSNARMTHYQALLLDTDRVQFGPVVALNPATLLPLPEEGLQHNCLDILAEAHGTRPDLTDQPLPDADHTWYTDGSSLLQEGQRKAGAAVTTETEVIWAKALPAGTSAQRAELIALTQALKMAEGKKLNVYTDSRYAFATAHIHGEIYRRRGWLTSEGKEIKNKDEILALLKALFLPKRLSIIHCPGHQKGHSAEARGNRMADQAARKAAITETPDTSTLLAGKRTADGSEFEKRTADGSEFESPKKKAKVE

SEQ ID NO: 2794 - protein, 2096 aa, synthetic construct
MPAAKRVKLDGGDKKYSIGLDIGTNSVGWAVITDEYKVPSKKFKVLGNTDRHSIKKNLIGALLFDSGETAEATRLKRTARRRYTRRKNRICYLQEIFSNEMAKVDDSFFHRLEESFLVEEDKKHERHPIFGNIVDEVAYHEKYPTIYHLRKKLVDSTDKADLRLIYLALAHMIKFRGHFLIEGDLNPDNSDVDKLFIQLVQTYNQLFEENPINASGVDAKAILSARLSKSRRLENLIAQLPGEKKNGLFGNLIALSLGLTPNFKSNFDLAEDAKLQLSKDTYDDDLDNLLAQIGDQYADLFLAAKNLSDAILLSDILRVNTEITKAPLSASMIKRYDEHHQDLTLLKALVRQQLPEKYKEIFFDQSKNGYAGYIDGGASQEEFYKFIKPILEKMDGTEELLVKLNREDLLRKQRTFDNGSIPHQIHLGELHAILRRQEDFYPFLKDNREKIEKILTFRIPYYVGPLARGNSRFAWMTRKSEETITPWNFEEVVDKGASAQSFIERMTNFDKNLPNEKVLPKHSLLYEYFTVYNELTKVKYVTEGMRKPAFLSGEQKKAIVDLLFKTNRKVTVKQLKEDYFKKIECFDSVEISGVEDRFNASLGTYHDLLKIIKDKDFLDNEENEDILEDIVLTLTLFEDREMIEERLKTYAHLFDDKVMKQLKRRRYTGWGRLSRKLINGIRDKQSGKTILDFLKSDGFANRNFMQLIHDDSLTFKEDIQKAQVSGQGDSLHEHIANLAGSPAIKKGILQTVKVVDELVKVMGRHKPENIVIEMARENQTTQKGQKNSRERMKRIEEGIKELGSQILKEHPVENTQLQNEKLYLYYLQNGRDMYVDQELDINRLSDYDVDHIVPQSFLKDDSIDNKVLTRSDKARGKSDNVPSEEVVKKMKNYWRQLLNAKLITQRKFDNLTKAERGGLSELDKAGFIKRQLVETRQITKHVAQILDSRMNTKYDENDKLIREVKVITLKSKLVSDFRKDFQFYKVREINNYHHAHDAYLNAVVGTALIKKYPKLESEFVYGDYKVYDVRKMIAKSEQEIGKATAKYFFYSNIMNFFKTEITLANGEIRKRPLIETNGETGEIVWDKGRDFATVRKVLSMPQVNIVKKTEVQTGGFSKESILPKRNSDKLIARKKDWDPKKYGGFDSPTVAYSVLVVAKVEKGKSKKLKSVKELLGITIMERSSFEKNPIDFLEAKGYKEVKKDLIIKLPKYSLFELENGRKRMLASAGELQKGNELALPSKYVNFLYLASHYEKLKGSPEDNEQKQLFVEQHKHYLDEIIEQISEFSKRVILADANLDKVLSAYNKHRDKPIREQAENIIHLFTLTNLGAPAAFKYFDTTIDRKRYTSTKEVLDATLIHQSITGLYETRIDLSQLGGDGGEAAAKGGSGGGGGTLNIEDEHRLHETSKEPDVSLGSTWLSDFPQAWAETGGMGLAVRQAPLIIPLKATSTPVSIKQYPMSQEARLGIKPHIQRLLDQGILVPCQSPWNTPLLPVKKPGTNDYRPVQDLREVNKRVEDIHPTVPNPYNLLSGLPPSHQWYTVLDLKDAFFCLRLHPTSQPLFAFEWRDPEMGISGQLTWTRLPQGFKNSPTLFNEALHRDLADFRIQHPDLILLQYVDDLLLAATSELDCQQGTRALLQTLGNLGYRASAKKAQICQKQVKYLGYLLKEGQRWLTEARKETVMGQPTPKTPRQLREFLGKAGFCRLFIPGFAEMAAPLYPLTKPGTLFNWGPDQQKAYQEIKQALLTAPALGLPDLTKPFELFVDEKQGYAKGVLTQKLGPWRRPVAYLSKKLDPVAAGWPPCLRMVAAIAVLTKDAGKLTMGQPLVILAPHAVEALVKQPPDRWLSNARMTHYQALLLDTDRVQFGPVVALNPATLLPLPEEGLQHNCLDILAEAHGTRPDLTDQPLPDADHTWYTDGSSLLQEGQRKAGAAVTTETEVIWAKALPAGTSAQRAELIALTQALKMAEGKKLNVYTDSRYAFATAHIHGEIYRRRGWLTSEGKEIKNKDEILALLKALFLPKRLSIIHCPGHQKGHSAEARGNRMADQAARKAAITETPDTSTLLAGKRTADGSEFEKRTADGSEFESPKKKAKVE

SEQ ID NO: 2795 - protein, 2097 aa, synthetic construct
MPAAKRVKLDGGDKKYSIGLDIGTNSVGWAVITDEYKVPSKKFKVLGNTDRHSIKKNLIGALLFDSGETAEATRLKRTARRRYTRRKNRICYLQEIFSNEMAKVDDSFFHRLEESFLVEEDKKHERHPIFGNIVDEVAYHEKYPTIYHLRKKLVDSTDKADLRLIYLALAHMIKFRGHFLIEGDLNPDNSDVDKLFIQLVQTYNQLFEENPINASGVDAKAILSARLSKSRRLENLIAQLPGEKKNGLFGNLIALSLGLTPNFKSNFDLAEDAKLQLSKDTYDDDLDNLLAQIGDQYADLFLAAKNLSDAILLSDILRVNTEITKAPLSASMIKRYDEHHQDLTLLKALVRQQLPEKYKEIFFDQSKNGYAGYIDGGASQEEFYKFIKPILEKMDGTEELLVKLNREDLLRKQRTFDNGSIPHQIHLGELHAILRRQEDFYPFLKDNREKIEKILTFRIPYYVGPLARGNSRFAWMTRKSEETITPWNFEEVVDKGASAQSFIERMTNFDKNLPNEKVLPKHSLLYEYFTVYNELTKVKYVTEGMRKPAFLSGEQKKAIVDLLFKTNRKVTVKQLKEDYFKKIECFDSVEISGVEDRFNASLGTYHDLLKIIKDKDFLDNEENEDILEDIVLTLTLFEDREMIEERLKTYAHLFDDKVMKQLKRRRYTGWGRLSRKLINGIRDKQSGKTILDFLKSDGFANRNFMQLIHDDSLTFKEDIQKAQVSGQGDSLHEHIANLAGSPAIKKGILQTVKVVDELVKVMGRHKPENIVIEMARENQTTQKGQKNSRERMKRIEEGIKELGSQILKEHPVENTQLQNEKLYLYYLQNGRDMYVDQELDINRLSDYDVDHIVPQSFLKDDSIDNKVLTRSDKARGKSDNVPSEEVVKKMKNYWRQLLNAKLITQRKFDNLTKAERGGLSELDKAGFIKRQLVETRQITKHVAQILDSRMNTKYDENDKLIREVKVITLKSKLVSDFRKDFQFYKVREINNYHHAHDAYLNAVVGTALIKKYPKLESEFVYGDYKVYDVRKMIAKSEQEIGKATAKYFFYSNIMNFFKTEITLANGEIRKRPLIETNGETGEIVWDKGRDFATVRKVLSMPQVNIVKKTEVQTGGFSKESILPKRNSDKLIARKKDWDPKKYGGFDSPTVAYSVLVVAKVEKGKSKKLKSVKELLGITIMERSSFEKNPIDFLEAKGYKEVKKDLIIKLPKYSLFELENGRKRMLASAGELQKGNELALPSKYVNFLYLASHYEKLKGSPEDNEQKQLFVEQHKHYLDEIIEQISEFSKRVILADANLDKVLSAYNKHRDKPIREQAENIIHLFTLTNLGAPAAFKYFDTTIDRKRYTSTKEVLDATLIHQSITGLYETRIDLSQLGGDGGGGSGGSGGSGGSGGTLNIEDEHRLHETSKEPDVSLGSTWLSDFPQAWAETGGMGLAVRQAPLIIPLKATSTPVSIKQYPMSQEARLGIKPHIQRLLDQGILVPCQSPWNTPLLPVKKPGTNDYRPVQDLREVNKRVEDIHPTVPNPYNLLSGLPPSHQWYTVLDLKDAFFCLRLHPTSQPLFAFEWRDPEMGISGQLTWTRLPQGFKNSPTLFNEALHRDLADFRIQHPDLILLQYVDDLLLAATSELDCQQGTRALLQTLGNLGYRASAKKAQICQKQVKYLGYLLKEGQRWLTEARKETVMGQPTPKTPRQLREFLGKAGFCRLFIPGFAEMAAPLYPLTKPGTLFNWGPDQQKAYQEIKQALLTAPALGLPDLTKPFELFVDEKQGYAKGVLTQKLGPWRRPVAYLSKKLDPVAAGWPPCLRMVAAIAVLTKDAGKLTMGQPLVILAPHAVEALVKQPPDRWLSNARMTHYQALLLDTDRVQFGPVVALNPATLLPLPEEGLQHNCLDILAEAHGTRPDLTDQPLPDADHTWYTDGSSLLQEGQRKAGAAVTTETEVIWAKALPAGTSAQRAELIALTQALKMAEGKKLNVYTDSRYAFATAHIHGEIYRRRGWLTSEGKEIKNKDEILALLKALFLPKRLSIIHCPGHQKGHSAEARGNRMADQAARKAAITETPDTSTLLAGKRTADGSEFEKRTADGSEFESPKKKAKVE

SEQ ID NO: 2796 - protein, 2093 aa, synthetic construct
MPAAKRVKLDGGDKKYSIGLDIGTNSVGWAVITDEYKVPSKKFKVLGNTDRHSIKKNLIGALLFDSGETAEATRLKRTARRRYTRRKNRICYLQEIFSNEMAKVDDSFFHRLEESFLVEEDKKHERHPIFGNIVDEVAYHEKYPTIYHLRKKLVDSTDKADLRLIYLALAHMIKFRGHFLIEGDLNPDNSDVDKLFIQLVQTYNQLFEENPINASGVDAKAILSARLSKSRRLENLIAQLPGEKKNGLFGNLIALSLGLTPNFKSNFDLAEDAKLQLSKDTYDDDLDNLLAQIGDQYADLFLAAKNLSDAILLSDILRVNTEITKAPLSASMIKRYDEHHQDLTLLKALVRQQLPEKYKEIFFDQSKNGYAGYIDGGASQEEFYKFIKPILEKMDGTEELLVKLNREDLLRKQRTFDNGSIPHQIHLGELHAILRRQEDFYPFLKDNREKIEKILTFRIPYYVGPLARGNSRFAWMTRKSEETITPWNFEEVVDKGASAQSFIERMTNFDKNLPNEKVLPKHSLLYEYFTVYNELTKVKYVTEGMRKPAFLSGEQKKAIVDLLFKTNRKVTVKQLKEDYFKKIECFDSVEISGVEDRFNASLGTYHDLLKIIKDKDFLDNEENEDILEDIVLTLTLFEDREMIEERLKTYAHLFDDKVMKQLKRRRYTGWGRLSRKLINGIRDKQSGKTILDFLKSDGFANRNFMQLIHDDSLTFKEDIQKAQVSGQGDSLHEHIANLAGSPAIKKGILQTVKVVDELVKVMGRHKPENIVIEMARENQTTQKGQKNSRERMKRIEEGIKELGSQILKEHPVENTQLQNEKLYLYYLQNGRDMYVDQELDINRLSDYDVDHIVPQSFLKDDSIDNKVLTRSDKARGKSDNVPSEEVVKKMKNYWRQLLNAKLITQRKFDNLTKAERGGLSELDKAGFIKRQLVETRQITKHVAQILDSRMNTKYDENDKLIREVKVITLKSKLVSDFRKDFQFYKVREINNYHHAHDAYLNAVVGTALIKKYPKLESEFVYGDYKVYDVRKMIAKSEQEIGKATAKYFFYSNIMNFFKTEITLANGEIRKRPLIETNGETGEIVWDKGRDFATVRKVLSMPQVNIVKKTEVQTGGFSKESILPKRNSDKLIARKKDWDPKKYGGFDSPTVAYSVLVVAKVEKGKSKKLKSVKELLGITIMERSSFEKNPIDFLEAKGYKEVKKDLIIKLPKYSLFELENGRKRMLASAGELQKGNELALPSKYVNFLYLASHYEKLKGSPEDNEQKQLFVEQHKHYLDEIIEQISEFSKRVILADANLDKVLSAYNKHRDKPIREQAENIIHLFTLTNLGAPAAFKYFDTTIDRKRYTSTKEVLDATLIHQSITGLYETRIDLSQLGGDGGEAAAKGGGGGTLNIEDEHRLHETSKEPDVSLGSTWLSDFPQAWAETGGMGLAVRQAPLIIPLKATSTPVSIKQYPMSQEARLGIKPHIQRLLDQGILVPCQSPWNTPLLPVKKPGTNDYRPVQDLREVNKRVEDIHPTVPNPYNLLSGLPPSHQWYTVLDLKDAFFCLRLHPTSQPLFAFEWRDPEMGISGQLTWTRLPQGFKNSPTLFNEALHRDLADFRIQHPDLILLQYVDDLLLAATSELDCQQGTRALLQTLGNLGYRASAKKAQICQKQVKYLGYLLKEGQRWLTEARKETVMGQPTPKTPRQLREFLGKAGFCRLFIPGFAEMAAPLYPLTKPGTLFNWGPDQQKAYQEIKQALLTAPALGLPDLTKPFELFVDEKQGYAKGVLTQKLGPWRRPVAYLSKKLDPVAAGWPPCLRMVAAIAVLTKDAGKLTMGQPLVILAPHAVEALVKQPPDRWLSNARMTHYQALLLDTDRVQFGPVVALNPATLLPLPEEGLQHNCLDILAEAHGTRPDLTDQPLPDADHTWYTDGSSLLQEGQRKAGAAVTTETEVIWAKALPAGTSAQRAELIALTQALKMAEGKKLNVYTDSRYAFATAHIHGEIYRRRGWLTSEGKEIKNKDEILALLKALFLPKRLSIIHCPGHQKGHSAEARGNRMADQAARKAAITETPDTSTLLAGKRTADGSEFEKRTADGSEFESPKKKAKVE

SEQ ID NO: 2797 - protein, 2098 aa, synthetic construct
MPAAKRVKLDGGDKKYSIGLDIGTNSVGWAVITDEYKVPSKKFKVLGNTDRHSIKKNLIGALLFDSGETAEATRLKRTARRRYTRRKNRICYLQEIFSNEMAKVDDSFFHRLEESFLVEEDKKHERHPIFGNIVDEVAYHEKYPTIYHLRKKLVDSTDKADLRLIYLALAHMIKFRGHFLIEGDLNPDNSDVDKLFIQLVQTYNQLFEENPINASGVDAKAILSARLSKSRRLENLIAQLPGEKKNGLFGNLIALSLGLTPNFKSNFDLAEDAKLQLSKDTYDDDLDNLLAQIGDQYADLFLAAKNLSDAILLSDILRVNTEITKAPLSASMIKRYDEHHQDLTLLKALVRQQLPEKYKEIFFDQSKNGYAGYIDGGASQEEFYKFIKPILEKMDGTEELLVKLNREDLLRKQRTFDNGSIPHQIHLGELHAILRRQEDFYPFLKDNREKIEKILTFRIPYYVGPLARGNSRFAWMTRKSEETITPWNFEEVVDKGASAQSFIERMTNFDKNLPNEKVLPKHSLLYEYFTVYNELTKVKYVTEGMRKPAFLSGEQKKAIVDLLFKTNRKVTVKQLKEDYFKKIECFDSVEISGVEDRFNASLGTYHDLLKIIKDKDFLDNEENEDILEDIVLTLTLFEDREMIEERLKTYAHLFDDKVMKQLKRRRYTGWGRLSRKLINGIRDKQSGKTILDFLKSDGFANRNFMQLIHDDSLTFKEDIQKAQVSGQGDSLHEHIANLAGSPAIKKGILQTVKVVDELVKVMGRHKPENIVIEMARENQTTQKGQKNSRERMKRIEEGIKELGSQILKEHPVENTQLQNEKLYLYYLQNGRDMYVDQELDINRLSDYDVDHIVPQSFLKDDSIDNKVLTRSDKARGKSDNVPSEEVVKKMKNYWRQLLNAKLITQRKFDNLTKAERGGLSELDKAGFIKRQLVETRQITKHVAQILDSRMNTKYDENDKLIREVKVITLKSKLVSDFRKDFQFYKVREINNYHHAHDAYLNAVVGTALIKKYPKLESEFVYGDYKVYDVRKMIAKSEQEIGKATAKYFFYSNIMNFFKTEITLANGEIRKRPLIETNGETGEIVWDKGRDFATVRKVLSMPQVNIVKKTEVQTGGFSKESILPKRNSDKLIARKKDWDPKKYGGFDSPTVAYSVLVVAKVEKGKSKKLKSVKELLGITIMERSSFEKNPIDFLEAKGYKEVKKDLIIKLPKYSLFELENGRKRMLASAGELQKGNELALPSKYVNFLYLASHYEKLKGSPEDNEQKQLFVEQHKHYLDEIIEQISEFSKRVILADANLDKVLSAYNKHRDKPIREQAENIIHLFTLTNLGAPAAFKYFDTTIDRKRYTSTKEVLDATLIHQSITGLYETRIDLSQLGGDGGPAPAPAPAPAPAPGGTLNIEDEHRLHETSKEPDVSLGSTWLSDFPQAWAETGGMGLAVRQAPLIIPLKATSTPVSIKQYPMSQEARLGIKPHIQRLLDQGILVPCQSPWNTPLLPVKKPGTNDYRPVQDLREVNKRVEDIHPTVPNPYNLLSGLPPSHQWYTVLDLKDAFFCLRLHPTSQPLFAFEWRDPEMGISGQLTWTRLPQGFKNSPTLFNEALHRDLADFRIQHPDLILLQYVDDLLLAATSELDCQQGTRALLQTLGNLGYRASAKKAQICQKQVKYLGYLLKEGQRWLTEARKETVMGQPTPKTPRQLREFLGKAGFCRLFIPGFAEMAAPLYPLTKPGTLFNWGPDQQKAYQEIKQALLTAPALGLPDLTKPFELFVDEKQGYAKGVLTQKLGPWRRPVAYLSKKLDPVAAGWPPCLRMVAAIAVLTKDAGKLTMGQPLVILAPHAVEALVKQPPDRWLSNARMTHYQALLLDTDRVQFGPVVALNPATLLPLPEEGLQHNCLDILAEAHGTRPDLTDQPLPDADHTWYTDGSSLLQEGQRKAGAAVTTETEVIWAKALPAGTSAQRAELIALTQALKMAEGKKLNVYTDSRYAFATAHIHGEIYRRRGWLTSEGKEIKNKDEILALLKALFLPKRLSIIHCPGHQKGHSAEARGNRMADQAARKAAITETPDTSTLLAGKRTADGSEFEKRTADGSEFESPKKKAKVE

SEQ ID NO: 2798 - protein, 2096 aa, synthetic construct
MPAAKRVKLDGGDKKYSIGLDIGTNSVGWAVITDEYKVPSKKFKVLGNTDRHSIKKNLIGALLFDSGETAEATRLKRTARRRYTRRKNRICYLQEIFSNEMAKVDDSFFHRLEESFLVEEDKKHERHPIFGNIVDEVAYHEKYPTIYHLRKKLVDSTDKADLRLIYLALAHMIKFRGHFLIEGDLNPDNSDVDKLFIQLVQTYNQLFEENPINASGVDAKAILSARLSKSRRLENLIAQLPGEKKNGLFGNLIALSLGLTPNFKSNFDLAEDAKLQLSKDTYDDDLDNLLAQIGDQYADLFLAAKNLSDAILLSDILRVNTEITKAPLSASMIKRYDEHHQDLTLLKALVRQQLPEKYKEIFFDQSKNGYAGYIDGGASQEEFYKFIKPILEKMDGTEELLVKLNREDLLRKQRTFDNGSIPHQIHLGELHAILRRQEDFYPFLKDNREKIEKILTFRIPYYVGPLARGNSRFAWMTRKSEETITPWNFEEVVDKGASAQSFIERMTNFDKNLPNEKVLPKHSLLYEYFTVYNELTKVKYVTEGMRKPAFLSGEQKKAIVDLLFKTNRKVTVKQLKEDYFKKIECFDSVEISGVEDRFNASLGTYHDLLKIIKDKDFLDNEENEDILEDIVLTLTLFEDREMIEERLKTYAHLFDDKVMKQLKRRRYTGWGRLSRKLINGIRDKQSGKTILDFLKSDGFANRNFMQLIHDDSLTFKEDIQKAQVSGQGDSLHEHIANLAGSPAIKKGILQTVKVVDELVKVMGRHKPENIVIEMARENQTTQKGQKNSRERMKRIEEGIKELGSQILKEHPVENTQLQNEKLYLYYLQNGRDMYVDQELDINRLSDYDVDHIVPQSFLKDDSIDNKVLTRSDKARGKSDNVPSEEVVKKMKNYWRQLLNAKLITQRKFDNLTKAERGGLSELDKAGFIKRQLVETRQITKHVAQILDSRMNTKYDENDKLIREVKVITLKSKLVSDFRKDFQFYKVREINNYHHAHDAYLNAVVGTALIKKYPKLESEFVYGDYKVYDVRKMIAKSEQEIGKATAKYFFYSNIMNFFKTEITLANGEIRKRPLIETNGETGEIVWDKGRDFATVRKVLSMPQVNIVKKTEVQTGGFSKESILPKRNSDKLIARKKDWDPKKYGGFDSPTVAYSVLVVAKVEKGKSKKLKSVKELLGITIMERSSFEKNPIDFLEAKGYKEVKKDLIIKLPKYSLFELENGRKRMLASAGELQKGNELALPSKYVNFLYLASHYEKLKGSPEDNEQKQLFVEQHKHYLDEIIEQISEFSKRVILADANLDKVLSAYNKHRDKPIREQAENIIHLFTLTNLGAPAAFKYFDTTIDRKRYTSTKEVLDATLIHQSITGLYETRIDLSQLGGDGGPAPGSSEAAAKGGTLNIEDEHRLHETSKEPDVSLGSTWLSDFPQAWAETGGMGLAVRQAPLIIPLKATSTPVSIKQYPMSQEARLGIKPHIQRLLDQGILVPCQSPWNTPLLPVKKPGTNDYRPVQDLREVNKRVEDIHPTVPNPYNLLSGLPPSHQWYTVLDLKDAFFCLRLHPTSQPLFAFEWRDPEMGISGQLTWTRLPQGFKNSPTLFNEALHRDLADFRIQHPDLILLQYVDDLLLAATSELDCQQGTRALLQTLGNLGYRASAKKAQICQKQVKYLGYLLKEGQRWLTEARKETVMGQPTPKTPRQLREFLGKAGFCRLFIPGFAEMAAPLYPLTKPGTLFNWGPDQQKAYQEIKQALLTAPALGLPDLTKPFELFVDEKQGYAKGVLTQKLGPWRRPVAYLSKKLDPVAAGWPPCLRMVAAIAVLTKDAGKLTMGQPLVILAPHAVEALVKQPPDRWLSNARMTHYQALLLDTDRVQFGPVVALNPATLLPLPEEGLQHNCLDILAEAHGTRPDLTDQPLPDADHTWYTDGSSLLQEGQRKAGAAVTTETEVIWAKALPAGTSAQRAELIALTQALKMAEGKKLNVYTDSRYAFATAHIHGEIYRRRGWLTSEGKEIKNKDEILALLKALFLPKRLSIIHCPGHQKGHSAEARGNRMADQAARKAAITETPDTSTLLAGKRTADGSEFEKRTADGSEFESPKKKAKVE

SEQ ID NO: 2799 - protein, 2096 aa, synthetic construct
MPAAKRVKLDGGDKKYSIGLDIGTNSVGWAVITDEYKVPSKKFKVLGNTDRHSIKKNLIGALLFDSGETAEATRLKRTARRRYTRRKNRICYLQEIFSNEMAKVDDSFFHRLEESFLVEEDKKHERHPIFGNIVDEVAYHEKYPTIYHLRKKLVDSTDKADLRLIYLALAHMIKFRGHFLIEGDLNPDNSDVDKLFIQLVQTYNQLFEENPINASGVDAKAILSARLSKSRRLENLIAQLPGEKKNGLFGNLIALSLGLTPNFKSNFDLAEDAKLQLSKDTYDDDLDNLLAQIGDQYADLFLAAKNLSDAILLSDILRVNTEITKAPLSASMIKRYDEHHQDLTLLKALVRQQLPEKYKEIFFDQSKNGYAGYIDGGASQEEFYKFIKPILEKMDGTEELLVKLNREDLLRKQRTFDNGSIPHQIHLGELHAILRRQEDFYPFLKDNREKIEKILTFRIPYYVGPLARGNSRFAWMTRKSEETITPWNFEEVVDKGASAQSFIERMTNFDKNLPNEKVLPKHSLLYEYFTVYNELTKVKYVTEGMRKPAFLSGEQKKAIVDLLFKTNRKVTVKQLKEDYFKKIECFDSVEISGVEDRFNASLGTYHDLLKIIKDKDFLDNEENEDILEDIVLTLTLFEDREMIEERLKTYAHLFDDKVMKQLKRRRYTGWGRLSRKLINGIRDKQSGKTILDFLKSDGFANRNFMQLIHDDSLTFKEDIQKAQVSGQGDSLHEHIANLAGSPAIKKGILQTVKVVDELVKVMGRHKPENIVIEMARENQTTQKGQKNSRERMKRIEEGIKELGSQILKEHPVENTQLQNEKLYLYYLQNGRDMYVDQELDINRLSDYDVDHIVPQSFLKDDSIDNKVLTRSDKARGKSDNVPSEEVVKKMKNYWRQLLNAKLITQRKFDNLTKAERGGLSELDKAGFIKRQLVETRQITKHVAQILDSRMNTKYDENDKLIREVKVITLKSKLVSDFRKDFQFYKVREINNYHHAHDAYLNAVVGTALIKKYPKLESEFVYGDYKVYDVRKMIAKSEQEIGKATAKYFFYSNIMNFFKTEITLANGEIRKRPLIETNGETGEIVWDKGRDFATVRKVLSMPQVNIVKKTEVQTGGFSKESILPKRNSDKLIARKKDWDPKKYGGFDSPTVAYSVLVVAKVEKGKSKKLKSVKELLGITIMERSSFEKNPIDFLEAKGYKEVKKDLIIKLPKYSLFELENGRKRMLASAGELQKGNELALPSKYVNFLYLASHYEKLKGSPEDNEQKQLFVEQHKHYLDEIIEQISEFSKRVILADANLDKVLSAYNKHRDKPIREQAENIIHLFTLTNLGAPAAFKYFDTTIDRKRYTSTKEVLDATLIHQSITGLYETRIDLSQLGGDGGEAAAKGSSGGSGGTLNIEDEHRLHETSKEPDVSLGSTWLSDFPQAWAETGGMGLAVRQAPLIIPLKATSTPVSIKQYPMSQEARLGIKPHIQRLLDQGILVPCQSPWNTPLLPVKKPGTNDYRPVQDLREVNKRVEDIHPTVPNPYNLLSGLPPSHQWYTVLDLKDAFFCLRLHPTSQPLFAFEWRDPEMGISGQLTWTRLPQGFKNSPTLFNEALHRDLADFRIQHPDLILLQYVDDLLLAATSELDCQQGTRALLQTLGNLGYRASAKKAQICQKQVKYLGYLLKEGQRWLTEARKETVMGQPTPKTPRQLREFLGKAGFCRLFIPGFAEMAAPLYPLTKPGTLFNWGPDQQKAYQEIKQALLTAPALGLPDLTKPFELFVDEKQGYAKGVLTQKLGPWRRPVAYLSKKLDPVAAGWPPCLRMVAAIAVLTKDAGKLTMGQPLVILAPHAVEALVKQPPDRWLSNARMTHYQALLLDTDRVQFGPVVALNPATLLPLPEEGLQHNCLDILAEAHGTRPDLTDQPLPDADHTWYTDGSSLLQEGQRKAGAAVTTETEVIWAKALPAGTSAQRAELIALTQALKMAEGKKLNVYTDSRYAFATAHIHGEIYRRRGWLTSEGKEIKNKDEILALLKALFLPKRLSIIHCPGHQKGHSAEARGNRMADQAARKAAITETPDTSTLLAGKRTADGSEFEKRTADGSEFESPKKKAKVE

SEQ ID NO: 2800 - protein, 2094 aa, synthetic construct
MPAAKRVKLDGGDKKYSIGLDIGTNSVGWAVITDEYKVPSKKFKVLGNTDRHSIKKNLIGALLFDSGETAEATRLKRTARRRYTRRKNRICYLQEIFSNEMAKVDDSFFHRLEESFLVEEDKKHERHPIFGNIVDEVAYHEKYPTIYHLRKKLVDSTDKADLRLIYLALAHMIKFRGHFLIEGDLNPDNSDVDKLFIQLVQTYNQLFEENPINASGVDAKAILSARLSKSRRLENLIAQLPGEKKNGLFGNLIALSLGLTPNFKSNFDLAEDAKLQLSKDTYDDDLDNLLAQIGDQYADLFLAAKNLSDAILLSDILRVNTEITKAPLSASMIKRYDEHHQDLTLLKALVRQQLPEKYKEIFFDQSKNGYAGYIDGGASQEEFYKFIKPILEKMDGTEELLVKLNREDLLRKQRTFDNGSIPHQIHLGELHAILRRQEDFYPFLKDNREKIEKILTFRIPYYVGPLARGNSRFAWMTRKSEETITPWNFEEVVDKGASAQSFIERMTNFDKNLPNEKVLPKHSLLYEYFTVYNELTKVKYVTEGMRKPAFLSGEQKKAIVDLLFKTNRKVTVKQLKEDYFKKIECFDSVEISGVEDRFNASLGTYHDLLKIIKDKDFLDNEENEDILEDIVLTLTLFEDREMIEERLKTYAHLFDDKVMKQLKRRRYTGWGRLSRKLINGIRDKQSGKTILDFLKSDGFANRNFMQLIHDDSLTFKEDIQKAQVSGQGDSLHEHIANLAGSPAIKKGILQTVKVVDELVKVMGRHKPENIVIEMARENQTTQKGQKNSRERMKRIEEGIKELGSQILKEHPVENTQLQNEKLYLYYLQNGRDMYVDQELDINRLSDYDVDHIVPQSFLKDDSIDNKVLTRSDKARGKSDNVPSEEVVKKMKNYWRQLLNAKLITQRKFDNLTKAERGGLSELDKAGFIKRQLVETRQITKHVAQILDSRMNTKYDENDKLIREVKVITLKSKLVSDFRKDFQFYKVREINNYHHAHDAYLNAVVGTALIKKYPKLESEFVYGDYKVYDVRKMIAKSEQEIGKATAKYFFYSNIMNFFKTEITLANGEIRKRPLIETNGETGEIVWDKGRDFATVRKVLSMPQVNIVKKTEVQTGGFSKESILPKRNSDKLIARKKDWDPKKYGGFDSPTVAYSVLVVAKVEKGKSKKLKSVKELLGITIMERSSFEKNPIDFLEAKGYKEVKKDLIIKLPKYSLFELENGRKRMLASAGELQKGNELALPSKYVNFLYLASHYEKLKGSPEDNEQKQLFVEQHKHYLDEIIEQISEFSKRVILADANLDKVLSAYNKHRDKPIREQAENIIHLFTLTNLGAPAAFKYFDTTIDRKRYTSTKEVLDATLIHQSITGLYETRIDLSQLGGDGGGGGPAPGGSGGTLNIEDEHRLHETSKEPDVSLGSTWLSDFPQAWAETGGMGLAVRQAPLIIPLKATSTPVSIKQYPMSQEARLGIKPHIQRLLDQGILVPCQSPWNTPLLPVKKPGTNDYRPVQDLREVNKRVEDIHPTVPNPYNLLSGLPPSHQWYTVLDLKDAFFCLRLHPTSQPLFAFEWRDPEMGISGQLTWTRLPQGFKNSPTLFNEALHRDLADFRIQHPDLILLQYVDDLLLAATSELDCQQGTRALLQTLGNLGYRASAKKAQICQKQVKYLGYLLKEGQRWLTEARKETVMGQPTPKTPRQLREFLGKAGFCRLFIPGFAEMAAPLYPLTKPGTLFNWGPDQQKAYQEIKQALLTAPALGLPDLTKPFELFVDEKQGYAKGVLTQKLGPWRRPVAYLSKKLDPVAAGWPPCLRMVAAIAVLTKDAGKLTMGQPLVILAPHAVEALVKQPPDRWLSNARMTHYQALLLDTDRVQFGPVVALNPATLLPLPEEGLQHNCLDILAEAHGTRPDLTDQPLPDADHTWYTDGSSLLQEGQRKAGAAVTTETEVIWAKALPAGTSAQRAELIALTQALKMAEGKKLNVYTDSRYAFATAHIHGEIYRRRGWLTSEGKEIKNKDEILALLKALFLPKRLSIIHCPGHQKGHSAEARGNRMADQAARKAAITETPDTSTLLAGKRTADGSEFEKRTADGSEFESPKKKAKVE

SEQ ID NO: 2801 - protein, 2094 aa, synthetic construct
MPAAKRVKLDGGDKKYSIGLDIGTNSVGWAVITDEYKVPSKKFKVLGNTDRHSIKKNLIGALLFDSGETAEATRLKRTARRRYTRRKNRICYLQEIFSNEMAKVDDSFFHRLEESFLVEEDKKHERHPIFGNIVDEVAYHEKYPTIYHLRKKLVDSTDKADLRLIYLALAHMIKFRGHFLIEGDLNPDNSDVDKLFIQLVQTYNQLFEENPINASGVDAKAILSARLSKSRRLENLIAQLPGEKKNGLFGNLIALSLGLTPNFKSNFDLAEDAKLQLSKDTYDDDLDNLLAQIGDQYADLFLAAKNLSDAILLSDILRVNTEITKAPLSASMIKRYDEHHQDLTLLKALVRQQLPEKYKEIFFDQSKNGYAGYIDGGASQEEFYKFIKPILEKMDGTEELLVKLNREDLLRKQRTFDNGSIPHQIHLGELHAILRRQEDFYPFLKDNREKIEKILTFRIPYYVGPLARGNSRFAWMTRKSEETITPWNFEEVVDKGASAQSFIERMTNFDKNLPNEKVLPKHSLLYEYFTVYNELTKVKYVTEGMRKPAFLSGEQKKAIVDLLFKTNRKVTVKQLKEDYFKKIECFDSVEISGVEDRFNASLGTYHDLLKIIKDKDFLDNEENEDILEDIVLTLTLFEDREMIEERLKTYAHLFDDKVMKQLKRRRYTGWGRLSRKLINGIRDKQSGKTILDFLKSDGFANRNFMQLIHDDSLTFKEDIQKAQVSGQGDSLHEHIANLAGSPAIKKGILQTVKVVDELVKVMGRHKPENIVIEMARENQTTQKGQKNSRERMKRIEEGIKELGSQILKEHPVENTQLQNEKLYLYYLQNGRDMYVDQELDINRLSDYDVDHIVPQSFLKDDSIDNKVLTRSDKARGKSDNVPSEEVVKKMKNYWRQLLNAKLITQRKFDNLTKAERGGLSELDKAGFIKRQLVETRQITKHVAQILDSRMNTKYDENDKLIREVKVITLKSKLVSDFRKDFQFYKVREINNYHHAHDAYLNAVVGTALIKKYPKLESEFVYGDYKVYDVRKMIAKSEQEIGKATAKYFFYSNIMNFFKTEITLANGEIRKRPLIETNGETGEIVWDKGRDFATVRKVLSMPQVNIVKKTEVQTGGFSKESILPKRNSDKLIARKKDWDPKKYGGFDSPTVAYSVLVVAKVEKGKSKKLKSVKELLGITIMERSSFEKNPIDFLEAKGYKEVKKDLIIKLPKYSLFELENGRKRMLASAGELQKGNELALPSKYVNFLYLASHYEKLKGSPEDNEQKQLFVEQHKHYLDEIIEQISEFSKRVILADANLDKVLSAYNKHRDKPIREQAENIIHLFTLTNLGAPAAFKYFDTTIDRKRYTSTKEVLDATLIHQSITGLYETRIDLSQLGGDGGGGSPAPGGGGGTLNIEDEHRLHETSKEPDVSLGSTWLSDFPQAWAETGGMGLAVRQAPLIIPLKATSTPVSIKQYPMSQEARLGIKPHIQRLLDQGILVPCQSPWNTPLLPVKKPGTNDYRPVQDLREVNKRVEDIHPTVPNPYNLLSGLPPSHQWYTVLDLKDAFFCLRLHPTSQPLFAFEWRDPEMGISGQLTWTRLPQGFKNSPTLFNEALHRDLADFRIQHPDLILLQYVDDLLLAATSELDCQQGTRALLQTLGNLGYRASAKKAQICQKQVKYLGYLLKEGQRWLTEARKETVMGQPTPKTPRQLREFLGKAGFCRLFIPGFAEMAAPLYPLTKPGTLFNWGPDQQKAYQEIKQALLTAPALGLPDLTKPFELFVDEKQGYAKGVLTQKLGPWRRPVAYLSKKLDPVAAGWPPCLRMVAAIAVLTKDAGKLTMGQPLVILAPHAVEALVKQPPDRWLSNARMTHYQALLLDTDRVQFGPVVALNPATLLPLPEEGLQHNCLDILAEAHGTRPDLTDQPLPDADHTWYTDGSSLLQEGQRKAGAAVTTETEVIWAKALPAGTSAQRAELIALTQALKMAEGKKLNVYTDSRYAFATAHIHGEIYRRRGWLTSEGKEIKNKDEILALLKALFLPKRLSIIHCPGHQKGHSAEARGNRMADQAARKAAITETPDTSTLLAGKRTADGSEFEKRTADGSEFESPKKKAKVE

SEQ ID NO: 2802 - protein, 2100 aa, synthetic construct
MPAAKRVKLDGGDKKYSIGLDIGTNSVGWAVITDEYKVPSKKFKVLGNTDRHSIKKNLIGALLFDSGETAEATRLKRTARRRYTRRKNRICYLQEIFSNEMAKVDDSFFHRLEESFLVEEDKKHERHPIFGNIVDEVAYHEKYPTIYHLRKKLVDSTDKADLRLIYLALAHMIKFRGHFLIEGDLNPDNSDVDKLFIQLVQTYNQLFEENPINASGVDAKAILSARLSKSRRLENLIAQLPGEKKNGLFGNLIALSLGLTPNFKSNFDLAEDAKLQLSKDTYDDDLDNLLAQIGDQYADLFLAAKNLSDAILLSDILRVNTEITKAPLSASMIKRYDEHHQDLTLLKALVRQQLPEKYKEIFFDQSKNGYAGYIDGGASQEEFYKFIKPILEKMDGTEELLVKLNREDLLRKQRTFDNGSIPHQIHLGELHAILRRQEDFYPFLKDNREKIEKILTFRIPYYVGPLARGNSRFAWMTRKSEETITPWNFEEVVDKGASAQSFIERMTNFDKNLPNEKVLPKHSLLYEYFTVYNELTKVKYVTEGMRKPAFLSGEQKKAIVDLLFKTNRKVTVKQLKEDYFKKIECFDSVEISGVEDRFNASLGTYHDLLKIIKDKDFLDNEENEDILEDIVLTLTLFEDREMIEERLKTYAHLFDDKVMKQLKRRRYTGWGRLSRKLINGIRDKQSGKTILDFLKSDGFANRNFMQLIHDDSLTFKEDIQKAQVSGQGDSLHEHIANLAGSPAIKKGILQTVKVVDELVKVMGRHKPENIVIEMARENQTTQKGQKNSRERMKRIEEGIKELGSQILKEHPVENTQLQNEKLYLYYLQNGRDMYVDQELDINRLSDYDVDHIVPQSFLKDDSIDNKVLTRSDKARGKSDNVPSEEVVKKMKNYWRQLLNAKLITQRKFDNLTKAERGGLSELDKAGFIKRQLVETRQITKHVAQILDSRMNTKYDENDKLIREVKVITLKSKLVSDFRKDFQFYKVREINNYHHAHDAYLNAVVGTALIKKYPKLESEFVYGDYKVYDVRKMIAKSEQEIGKATAKYFFYSNIMNFFKTEITLANGEIRKRPLIETNGETGEIVWDKGRDFATVRKVLSMPQVNIVKKTEVQTGGFSKESILPKRNSDKLIARKKDWDPKKYGGFDSPTVAYSVLVVAKVEKGKSKKLKSVKELLGITIMERSSFEKNPIDFLEAKGYKEVKKDLIIKLPKYSLFELENGRKRMLASAGELQKGNELALPSKYVNFLYLASHYEKLKGSPEDNEQKQLFVEQHKHYLDEIIEQISEFSKRVILADANLDKVLSAYNKHRDKPIREQAENIIHLFTLTNLGAPAAFKYFDTTIDRKRYTSTKEVLDATLIHQSITGLYETRIDLSQLGGDGGGSSGSSGSSGSSGSSGGTLNIEDEHRLHETSKEPDVSLGSTWLSDFPQAWAETGGMGLAVRQAPLIIPLKATSTPVSIKQYPMSQEARLGIKPHIQRLLDQGILVPCQSPWNTPLLPVKKPGTNDYRPVQDLREVNKRVEDIHPTVPNPYNLLSGLPPSHQWYTVLDLKDAFFCLRLHPTSQPLFAFEWRDPEMGISGQLTWTRLPQGFKNSPTLFNEALHRDLADFRIQHPDLILLQYVDDLLLAATSELDCQQGTRALLQTLGNLGYRASAKKAQICQKQVKYLGYLLKEGQRWLTEARKETVMGQPTPKTPRQLREFLGKAGFCRLFIPGFAEMAAPLYPLTKPGTLFNWGPDQQKAYQEIKQALLTAPALGLPDLTKPFELFVDEKQGYAKGVLTQKLGPWRRPVAYLSKKLDPVAAGWPPCLRMVAAIAVLTKDAGKLTMGQPLVILAPHAVEALVKQPPDRWLSNARMTHYQALLLDTDRVQFGPVVALNPATLLPLPEEGLQHNCLDILAEAHGTRPDLTDQPLPDADHTWYTDGSSLLQEGQRKAGAAVTTETEVIWAKALPAGTSAQRAELIALTQALKMAEGKKLNVYTDSRYAFATAHIHGEIYRRRGWLTSEGKEIKNKDEILALLKALFLPKRLSIIHCPGHQKGHSAEARGNRMADQAARKAAITETPDTSTLLAGKRTADGSEFEKRTADGSEFESPKKKAKVE

SEQ ID NO: 2803 - protein, 2110 aa, synthetic construct
MPAAKRVKLDGGDKKYSIGLDIGTNSVGWAVITDEYKVPSKKFKVLGNTDRHSIKKNLIGALLFDSGETAEATRLKRTARRRYTRRKNRICYLQEIFSNEMAKVDDSFFHRLEESFLVEEDKKHERHPIFGNIVDEVAYHEKYPTIYHLRKKLVDSTDKADLRLIYLALAHMIKFRGHFLIEGDLNPDNSDVDKLFIQLVQTYNQLFEENPINASGVDAKAILSARLSKSRRLENLIAQLPGEKKNGLFGNLIALSLGLTPNFKSNFDLAEDAKLQLSKDTYDDDLDNLLAQIGDQYADLFLAAKNLSDAILLSDILRVNTEITKAPLSASMIKRYDEHHQDLTLLKALVRQQLPEKYKEIFFDQSKNGYAGYIDGGASQEEFYKFIKPILEKMDGTEELLVKLNREDLLRKQRTFDNGSIPHQIHLGELHAILRRQEDFYPFLKDNREKIEKILTFRIPYYVGPLARGNSRFAWMTRKSEETITPWNFEEVVDKGASAQSFIERMTNFDKNLPNEKVLPKHSLLYEYFTVYNELTKVKYVTEGMRKPAFLSGEQKKAIVDLLFKTNRKVTVKQLKEDYFKKIECFDSVEISGVEDRFNASLGTYHDLLKIIKDKDFLDNEENEDILEDIVLTLTLFEDREMIEERLKTYAHLFDDKVMKQLKRRRYTGWGRLSRKLINGIRDKQSGKTILDFLKSDGFANRNFMQLIHDDSLTFKEDIQKAQVSGQGDSLHEHIANLAGSPAIKKGILQTVKVVDELVKVMGRHKPENIVIEMARENQTTQKGQKNSRERMKRIEEGIKELGSQILKEHPVENTQLQNEKLYLYYLQNGRDMYVDQELDINRLSDYDVDHIVPQSFLKDDSIDNKVLTRSDKARGKSDNVPSEEVVKKMKNYWRQLLNAKLITQRKFDNLTKAERGGLSELDKAGFIKRQLVETRQITKHVAQILDSRMNTKYDENDKLIREVKVITLKSKLVSDFRKDFQFYKVREINNYHHAHDAYLNAVVGTALIKKYPKLESEFVYGDYKVYDVRKMIAKSEQEIGKATAKYFFYSNIMNFFKTEITLANGEIRKRPLIETNGETGEIVWDKGRDFATVRKVLSMPQVNIVKKTEVQTGGFSKESILPKRNSDKLIARKKDWDPKKYGGFDSPTVAYSVLVVAKVEKGKSKKLKSVKELLGITIMERSSFEKNPIDFLEAKGYKEVKKDLIIKLPKYSLFELENGRKRMLASAGELQKGNELALPSKYVNFLYLASHYEKLKGSPEDNEQKQLFVEQHKHYLDEIIEQISEFSKRVILADANLDKVLSAYNKHRDKPIREQAENIIHLFTLTNLGAPAAFKYFDTTIDRKRYTSTKEVLDATLIHQSITGLYETRIDLSQLGGDGGEAAAKEAAAKEAAAKEAAAKEAAAKGGTLNIEDEHRLHETSKEPDVSLGSTWLSDFPQAWAETGGMGLAVRQAPLIIPLKATSTPVSIKQYPMSQEARLGIKPHIQRLLDQGILVPCQSPWNTPLLPVKKPGTNDYRPVQDLREVNKRVEDIHPTVPNPYNLLSGLPPSHQWYTVLDLKDAFFCLRLHPTSQPLFAFEWRDPEMGISGQLTWTRLPQGFKNSPTLFNEALHRDLADFRIQHPDLILLQYVDDLLLAATSELDCQQGTRALLQTLGNLGYRASAKKAQICQKQVKYLGYLLKEGQRWLTEARKETVMGQPTPKTPRQLREFLGKAGFCRLFIPGFAEMAAPLYPLTKPGTLFNWGPDQQKAYQEIKQALLTAPALGLPDLTKPFELFVDEKQGYAKGVLTQKLGPWRRPVAYLSKKLDPVAAGWPPCLRMVAAIAVLTKDAGKLTMGQPLVILAPHAVEALVKQPPDRWLSNARMTHYQALLLDTDRVQFGPVVALNPATLLPLPEEGLQHNCLDILAEAHGTRPDLTDQPLPDADHTWYTDGSSLLQEGQRKAGAAVTTETEVIWAKALPAGTSAQRAELIALTQALKMAEGKKLNVYTDSRYAFATAHIHGEIYRRRGWLTSEGKEIKNKDEILALLKALFLPKRLSIIHCPGHQKGHSAEARGNRMADQAARKAAITETPDTSTLLAGKRTADGSEFEKRTADGSEFESPKKKAKVE

SEQ ID NO: 2804 - protein, 2094 aa, synthetic construct
MPAAKRVKLDGGDKKYSIGLDIGTNSVGWAVITDEYKVPSKKFKVLGNTDRHSIKKNLIGALLFDSGETAEATRLKRTARRRYTRRKNRICYLQEIFSNEMAKVDDSFFHRLEESFLVEEDKKHERHPIFGNIVDEVAYHEKYPTIYHLRKKLVDSTDKADLRLIYLALAHMIKFRGHFLIEGDLNPDNSDVDKLFIQLVQTYNQLFEENPINASGVDAKAILSARLSKSRRLENLIAQLPGEKKNGLFGNLIALSLGLTPNFKSNFDLAEDAKLQLSKDTYDDDLDNLLAQIGDQYADLFLAAKNLSDAILLSDILRVNTEITKAPLSASMIKRYDEHHQDLTLLKALVRQQLPEKYKEIFFDQSKNGYAGYIDGGASQEEFYKFIKPILEKMDGTEELLVKLNREDLLRKQRTFDNGSIPHQIHLGELHAILRRQEDFYPFLKDNREKIEKILTFRIPYYVGPLARGNSRFAWMTRKSEETITPWNFEEVVDKGASAQSFIERMTNFDKNLPNEKVLPKHSLLYEYFTVYNELTKVKYVTEGMRKPAFLSGEQKKAIVDLLFKTNRKVTVKQLKEDYFKKIECFDSVEISGVEDRFNASLGTYHDLLKIIKDKDFLDNEENEDILEDIVLTLTLFEDREMIEERLKTYAHLFDDKVMKQLKRRRYTGWGRLSRKLINGIRDKQSGKTILDFLKSDGFANRNFMQLIHDDSLTFKEDIQKAQVSGQGDSLHEHIANLAGSPAIKKGILQTVKVVDELVKVMGRHKPENIVIEMARENQTTQKGQKNSRERMKRIEEGIKELGSQILKEHPVENTQLQNEKLYLYYLQNGRDMYVDQELDINRLSDYDVDHIVPQSFLKDDSIDNKVLTRSDKARGKSDNVPSEEVVKKMKNYWRQLLNAKLITQRKFDNLTKAERGGLSELDKAGFIKRQLVETRQITKHVAQILDSRMNTKYDENDKLIREVKVITLKSKLVSDFRKDFQFYKVREINNYHHAHDAYLNAVVGTALIKKYPKLESEFVYGDYKVYDVRKMIAKSEQEIGKATAKYFFYSNIMNFFKTEITLANGEIRKRPLIETNGETGEIVWDKGRDFATVRKVLSMPQVNIVKKTEVQTGGFSKESILPKRNSDKLIARKKDWDPKKYGGFDSPTVAYSVLVVAKVEKGKSKKLKSVKELLGITIMERSSFEKNPIDFLEAKGYKEVKKDLIIKLPKYSLFELENGRKRMLASAGELQKGNELALPSKYVNFLYLASHYEKLKGSPEDNEQKQLFVEQHKHYLDEIIEQISEFSKRVILADANLDKVLSAYNKHRDKPIREQAENIIHLFTLTNLGAPAAFKYFDTTIDRKRYTSTKEVLDATLIHQSITGLYETRIDLSQLGGDGGGGSGGGPAPGGTLNIEDEHRLHETSKEPDVSLGSTWLSDFPQAWAETGGMGLAVRQAPLIIPLKATSTPVSIKQYPMSQEARLGIKPHIQRLLDQGILVPCQSPWNTPLLPVKKPGTNDYRPVQDLREVNKRVEDIHPTVPNPYNLLSGLPPSHQWYTVLDLKDAFFCLRLHPTSQPLFAFEWRDPEMGISGQLTWTRLPQGFKNSPTLFNEALHRDLADFRIQHPDLILLQYVDDLLLAATSELDCQQGTRALLQTLGNLGYRASAKKAQICQKQVKYLGYLLKEGQRWLTEARKETVMGQPTPKTPRQLREFLGKAGFCRLFIPGFAEMAAPLYPLTKPGTLFNWGPDQQKAYQEIKQALLTAPALGLPDLTKPFELFVDEKQGYAKGVLTQKLGPWRRPVAYLSKKLDPVAAGWPPCLRMVAAIAVLTKDAGKLTMGQPLVILAPHAVEALVKQPPDRWLSNARMTHYQALLLDTDRVQFGPVVALNPATLLPLPEEGLQHNCLDILAEAHGTRPDLTDQPLPDADHTWYTDGSSLLQEGQRKAGAAVTTETEVIWAKALPAGTSAQRAELIALTQALKMAEGKKLNVYTDSRYAFATAHIHGEIYRRRGWLTSEGKEIKNKDEILALLKALFLPKRLSIIHCPGHQKGHSAEARGNRMADQAARKAAITETPDTSTLLAGKRTADGSEFEKRTADGSEFESPKKKAKVE

SEQ ID NO: 2805 - protein, 2096 aa, synthetic construct
MPAAKRVKLDGGDKKYSIGLDIGTNSVGWAVITDEYKVPSKKFKVLGNTDRHSIKKNLIGALLFDSGETAEATRLKRTARRRYTRRKNRICYLQEIFSNEMAKVDDSFFHRLEESFLVEEDKKHERHPIFGNIVDEVAYHEKYPTIYHLRKKLVDSTDKADLRLIYLALAHMIKFRGHFLIEGDLNPDNSDVDKLFIQLVQTYNQLFEENPINASGVDAKAILSARLSKSRRLENLIAQLPGEKKNGLFGNLIALSLGLTPNFKSNFDLAEDAKLQLSKDTYDDDLDNLLAQIGDQYADLFLAAKNLSDAILLSDILRVNTEITKAPLSASMIKRYDEHHQDLTLLKALVRQQLPEKYKEIFFDQSKNGYAGYIDGGASQEEFYKFIKPILEKMDGTEELLVKLNREDLLRKQRTFDNGSIPHQIHLGELHAILRRQEDFYPFLKDNREKIEKILTFRIPYYVGPLARGNSRFAWMTRKSEETITPWNFEEVVDKGASAQSFIERMTNFDKNLPNEKVLPKHSLLYEYFTVYNELTKVKYVTEGMRKPAFLSGEQKKAIVDLLFKTNRKVTVKQLKEDYFKKIECFDSVEISGVEDRFNASLGTYHDLLKIIKDKDFLDNEENEDILEDIVLTLTLFEDREMIEERLKTYAHLFDDKVMKQLKRRRYTGWGRLSRKLINGIRDKQSGKTILDFLKSDGFANRNFMQLIHDDSLTFKEDIQKAQVSGQGDSLHEHIANLAGSPAIKKGILQTVKVVDELVKVMGRHKPENIVIEMARENQTTQKGQKNSRERMKRIEEGIKELGSQILKEHPVENTQLQNEKLYLYYLQNGRDMYVDQELDINRLSDYDVDHIVPQSFLKDDSIDNKVLTRSDKARGKSDNVPSEEVVKKMKNYWRQLLNAKLITQRKFDNLTKAERGGLSELDKAGFIKRQLVETRQITKHVAQILDSRMNTKYDENDKLIREVKVITLKSKLVSDFRKDFQFYKVREINNYHHAHDAYLNAVVGTALIKKYPKLESEFVYGDYKVYDVRKMIAKSEQEIGKATAKYFFYSNIMNFFKTEITLANGEIRKRPLIETNGETGEIVWDKGRDFATVRKVLSMPQVNIVKKTEVQTGGFSKESILPKRNSDKLIARKKDWDPKKYGGFDSPTVAYSVLVVAKVEKGKSKKLKSVKELLGITIMERSSFEKNPIDFLEAKGYKEVKKDLIIKLPKYSLFELENGRKRMLASAGELQKGNELALPSKYVNFLYLASHYEKLKGSPEDNEQKQLFVEQHKHYLDEIIEQISEFSKRVILADANLDKVLSAYNKHRDKPIREQAENIIHLFTLTNLGAPAAFKYFDTTIDRKRYTSTKEVLDATLIHQSITGLYETRIDLSQLGGDGGGGSPAPEAAAKGGTLNIEDEHRLHETSKEPDVSLGSTWLSDFPQAWAETGGMGLAVRQAPLIIPLKATSTPVSIKQYPMSQEARLGIKPHIQRLLDQGILVPCQSPWNTPLLPVKKPGTNDYRPVQDLREVNKRVEDIHPTVPNPYNLLSGLPPSHQWYTVLDLKDAFFCLRLHPTSQPLFAFEWRDPEMGISGQLTWTRLPQGFKNSPTLFNEALHRDLADFRIQHPDLILLQYVDDLLLAATSELDCQQGTRALLQTLGNLGYRASAKKAQICQKQVKYLGYLLKEGQRWLTEARKETVMGQPTPKTPRQLREFLGKAGFCRLFIPGFAEMAAPLYPLTKPGTLFNWGPDQQKAYQEIKQALLTAPALGLPDLTKPFELFVDEKQGYAKGVLTQKLGPWRRPVAYLSKKLDPVAAGWPPCLRMVAAIAVLTKDAGKLTMGQPLVILAPHAVEALVKQPPDRWLSNARMTHYQALLLDTDRVQFGPVVALNPATLLPLPEEGLQHNCLDILAEAHGTRPDLTDQPLPDADHTWYTDGSSLLQEGQRKAGAAVTTETEVIWAKALPAGTSAQRAELIALTQALKMAEGKKLNVYTDSRYAFATAHIHGEIYRRRGWLTSEGKEIKNKDEILALLKALFLPKRLSIIHCPGHQKGHSAEARGNRMADQAARKAAITETPDTSTLLAGKRTADGSEFEKRTADGSEFESPKKKAKVE

SEQ ID NO: 2806 - protein, 2097 aa, synthetic construct
MPAAKRVKLDGGDKKYSIGLDIGTNSVGWAVITDEYKVPSKKFKVLGNTDRHSIKKNLIGALLFDSGETAEATRLKRTARRRYTRRKNRICYLQEIFSNEMAKVDDSFFHRLEESFLVEEDKKHERHPIFGNIVDEVAYHEKYPTIYHLRKKLVDSTDKADLRLIYLALAHMIKFRGHFLIEGDLNPDNSDVDKLFIQLVQTYNQLFEENPINASGVDAKAILSARLSKSRRLENLIAQLPGEKKNGLFGNLIALSLGLTPNFKSNFDLAEDAKLQLSKDTYDDDLDNLLAQIGDQYADLFLAAKNLSDAILLSDILRVNTEITKAPLSASMIKRYDEHHQDLTLLKALVRQQLPEKYKEIFFDQSKNGYAGYIDGGASQEEFYKFIKPILEKMDGTEELLVKLNREDLLRKQRTFDNGSIPHQIHLGELHAILRRQEDFYPFLKDNREKIEKILTFRIPYYVGPLARGNSRFAWMTRKSEETITPWNFEEVVDKGASAQSFIERMTNFDKNLPNEKVLPKHSLLYEYFTVYNELTKVKYVTEGMRKPAFLSGEQKKAIVDLLFKTNRKVTVKQLKEDYFKKIECFDSVEISGVEDRFNASLGTYHDLLKIIKDKDFLDNEENEDILEDIVLTLTLFEDREMIEERLKTYAHLFDDKVMKQLKRRRYTGWGRLSRKLINGIRDKQSGKTILDFLKSDGFANRNFMQLIHDDSLTFKEDIQKAQVSGQGDSLHEHIANLAGSPAIKKGILQTVKVVDELVKVMGRHKPENIVIEMARENQTTQKGQKNSRERMKRIEEGIKELGSQILKEHPVENTQLQNEKLYLYYLQNGRDMYVDQELDINRLSDYDVDHIVPQSFLKDDSIDNKVLTRSDKARGKSDNVPSEEVVKKMKNYWRQLLNAKLITQRKFDNLTKAERGGLSELDKAGFIKRQLVETRQITKHVAQILDSRMNTKYDENDKLIREVKVITLKSKLVSDFRKDFQFYKVREINNYHHAHDAYLNAVVGTALIKKYPKLESEFVYGDYKVYDVRKMIAKSEQEIGKATAKYFFYSNIMNFFKTEITLANGEIRKRPLIETNGETGEIVWDKGRDFATVRKVLSMPQVNIVKKTEVQTGGFSKESILPKRNSDKLIARKKDWDPKKYGGFDSPTVAYSVLVVAKVEKGKSKKLKSVKELLGITIMERSSFEKNPIDFLEAKGYKEVKKDLIIKLPKYSLFELENGRKRMLASAGELQKGNELALPSKYVNFLYLASHYEKLKGSPEDNEQKQLFVEQHKHYLDEIIEQISEFSKRVILADANLDKVLSAYNKHRDKPIREQAENIIHLFTLTNLGAPAAFKYFDTTIDRKRYTSTKEVLDATLIHQSITGLYETRIDLSQLGGDGGGSSGSSGSSGSSGGTLNIEDEHRLHETSKEPDVSLGSTWLSDFPQAWAETGGMGLAVRQAPLIIPLKATSTPVSIKQYPMSQEARLGIKPHIQRLLDQGILVPCQSPWNTPLLPVKKPGTNDYRPVQDLREVNKRVEDIHPTVPNPYNLLSGLPPSHQWYTVLDLKDAFFCLRLHPTSQPLFAFEWRDPEMGISGQLTWTRLPQGFKNSPTLFNEALHRDLADFRIQHPDLILLQYVDDLLLAATSELDCQQGTRALLQTLGNLGYRASAKKAQICQKQVKYLGYLLKEGQRWLTEARKETVMGQPTPKTPRQLREFLGKAGFCRLFIPGFAEMAAPLYPLTKPGTLFNWGPDQQKAYQEIKQALLTAPALGLPDLTKPFELFVDEKQGYAKGVLTQKLGPWRRPVAYLSKKLDPVAAGWPPCLRMVAAIAVLTKDAGKLTMGQPLVILAPHAVEALVKQPPDRWLSNARMTHYQALLLDTDRVQFGPVVALNPATLLPLPEEGLQHNCLDILAEAHGTRPDLTDQPLPDADHTWYTDGSSLLQEGQRKAGAAVTTETEVIWAKALPAGTSAQRAELIALTQALKMAEGKKLNVYTDSRYAFATAHIHGEIYRRRGWLTSEGKEIKNKDEILALLKALFLPKRLSIIHCPGHQKGHSAEARGNRMADQAARKAAITETPDTSTLLAGKRTADGSEFEKRTADGSEFESPKKKAKVE

SEQ ID NO: 2807 - protein, 2100 aa, synthetic construct
MPAAKRVKLDGGDKKYSIGLDIGTNSVGWAVITDEYKVPSKKFKVLGNTDRHSIKKNLIGALLFDSGETAEATRLKRTARRRYTRRKNRICYLQEIFSNEMAKVDDSFFHRLEESFLVEEDKKHERHPIFGNIVDEVAYHEKYPTIYHLRKKLVDSTDKADLRLIYLALAHMIKFRGHFLIEGDLNPDNSDVDKLFIQLVQTYNQLFEENPINASGVDAKAILSARLSKSRRLENLIAQLPGEKKNGLFGNLIALSLGLTPNFKSNFDLAEDAKLQLSKDTYDDDLDNLLAQIGDQYADLFLAAKNLSDAILLSDILRVNTEITKAPLSASMIKRYDEHHQDLTLLKALVRQQLPEKYKEIFFDQSKNGYAGYIDGGASQEEFYKFIKPILEKMDGTEELLVKLNREDLLRKQRTFDNGSIPHQIHLGELHAILRRQEDFYPFLKDNREKIEKILTFRIPYYVGPLARGNSRFAWMTRKSEETITPWNFEEVVDKGASAQSFIERMTNFDKNLPNEKVLPKHSLLYEYFTVYNELTKVKYVTEGMRKPAFLSGEQKKAIVDLLFKTNRKVTVKQLKEDYFKKIECFDSVEISGVEDRFNASLGTYHDLLKIIKDKDFLDNEENEDILEDIVLTLTLFEDREMIEERLKTYAHLFDDKVMKQLKRRRYTGWGRLSRKLINGIRDKQSGKTILDFLKSDGFANRNFMQLIHDDSLTFKEDIQKAQVSGQGDSLHEHIANLAGSPAIKKGILQTVKVVDELVKVMGRHKPENIVIEMARENQTTQKGQKNSRERMKRIEEGIKELGSQILKEHPVENTQLQNEKLYLYYLQNGRDMYVDQELDINRLSDYDVDHIVPQSFLKDDSIDNKVLTRSDKARGKSDNVPSEEVVKKMKNYWRQLLNAKLITQRKFDNLTKAERGGLSELDKAGFIKRQLVETRQITKHVAQILDSRMNTKYDENDKLIREVKVITLKSKLVSDFRKDFQFYKVREINNYHHAHDAYLNAVVGTALIKKYPKLESEFVYGDYKVYDVRKMIAKSEQEIGKATAKYFFYSNIMNFFKTEITLANGEIRKRPLIETNGETGEIVWDKGRDFATVRKVLSMPQVNIVKKTEVQTGGFSKESILPKRNSDKLIARKKDWDPKKYGGFDSPTVAYSVLVVAKVEKGKSKKLKSVKELLGITIMERSSFEKNPIDFLEAKGYKEVKKDLIIKLPKYSLFELENGRKRMLASAGELQKGNELALPSKYVNFLYLASHYEKLKGSPEDNEQKQLFVEQHKHYLDEIIEQISEFSKRVILADANLDKVLSAYNKHRDKPIREQAENIIHLFTLTNLGAPAAFKYFDTTIDRKRYTSTKEVLDATLIHQSITGLYETRIDLSQLGGDGGGGSGGSGGSGGSGGSGGTLNIEDEHRLHETSKEPDVSLGSTWLSDFPQAWAETGGMGLAVRQAPLIIPLKATSTPVSIKQYPMSQEARLGIKPHIQRLLDQGILVPCQSPWNTPLLPVKKPGTNDYRPVQDLREVNKRVEDIHPTVPNPYNLLSGLPPSHQWYTVLDLKDAFFCLRLHPTSQPLFAFEWRDPEMGISGQLTWTRLPQGFKNSPTLFNEALHRDLADFRIQHPDLILLQYVDDLLLAATSELDCQQGTRALLQTLGNLGYRASAKKAQICQKQVKYLGYLLKEGQRWLTEARKETVMGQPTPKTPRQLREFLGKAGFCRLFIPGFAEMAAPLYPLTKPGTLFNWGPDQQKAYQEIKQALLTAPALGLPDLTKPFELFVDEKQGYAKGVLTQKLGPWRRPVAYLSKKLDPVAAGWPPCLRMVAAIAVLTKDAGKLTMGQPLVILAPHAVEALVKQPPDRWLSNARMTHYQALLLDTDRVQFGPVVALNPATLLPLPEEGLQHNCLDILAEAHGTRPDLTDQPLPDADHTWYTDGSSLLQEGQRKAGAAVTTETEVIWAKALPAGTSAQRAELIALTQALKMAEGKKLNVYTDSRYAFATAHIHGEIYRRRGWLTSEGKEIKNKDEILALLKALFLPKRLSIIHCPGHQKGHSAEARGNRMADQAARKAAITETPDTSTLLAGKRTADGSEFEKRTADGSEFESPKKKAKVE

SEQ ID NO: 2808 - protein, 2091 aa, synthetic construct
MPAAKRVKLDGGDKKYSIGLDIGTNSVGWAVITDEYKVPSKKFKVLGNTDRHSIKKNLIGALLFDSGETAEATRLKRTARRRYTRRKNRICYLQEIFSNEMAKVDDSFFHRLEESFLVEEDKKHERHPIFGNIVDEVAYHEKYPTIYHLRKKLVDSTDKADLRLIYLALAHMIKFRGHFLIEGDLNPDNSDVDKLFIQLVQTYNQLFEENPINASGVDAKAILSARLSKSRRLENLIAQLPGEKKNGLFGNLIALSLGLTPNFKSNFDLAEDAKLQLSKDTYDDDLDNLLAQIGDQYADLFLAAKNLSDAILLSDILRVNTEITKAPLSASMIKRYDEHHQDLTLLKALVRQQLPEKYKEIFFDQSKNGYAGYIDGGASQEEFYKFIKPILEKMDGTEELLVKLNREDLLRKQRTFDNGSIPHQIHLGELHAILRRQEDFYPFLKDNREKIEKILTFRIPYYVGPLARGNSRFAWMTRKSEETITPWNFEEVVDKGASAQSFIERMTNFDKNLPNEKVLPKHSLLYEYFTVYNELTKVKYVTEGMRKPAFLSGEQKKAIVDLLFKTNRKVTVKQLKEDYFKKIECFDSVEISGVEDRFNASLGTYHDLLKIIKDKDFLDNEENEDILEDIVLTLTLFEDREMIEERLKTYAHLFDDKVMKQLKRRRYTGWGRLSRKLINGIRDKQSGKTILDFLKSDGFANRNFMQLIHDDSLTFKEDIQKAQVSGQGDSLHEHIANLAGSPAIKKGILQTVKVVDELVKVMGRHKPENIVIEMARENQTTQKGQKNSRERMKRIEEGIKELGSQILKEHPVENTQLQNEKLYLYYLQNGRDMYVDQELDINRLSDYDVDHIVPQSFLKDDSIDNKVLTRSDKARGKSDNVPSEEVVKKMKNYWRQLLNAKLITQRKFDNLTKAERGGLSELDKAGFIKRQLVETRQITKHVAQILDSRMNTKYDENDKLIREVKVITLKSKLVSDFRKDFQFYKVREINNYHHAHDAYLNAVVGTALIKKYPKLESEFVYGDYKVYDVRKMIAKSEQEIGKATAKYFFYSNIMNFFKTEITLANGEIRKRPLIETNGETGEIVWDKGRDFATVRKVLSMPQVNIVKKTEVQTGGFSKESILPKRNSDKLIARKKDWDPKKYGGFDSPTVAYSVLVVAKVEKGKSKKLKSVKELLGITIMERSSFEKNPIDFLEAKGYKEVKKDLIIKLPKYSLFELENGRKRMLASAGELQKGNELALPSKYVNFLYLASHYEKLKGSPEDNEQKQLFVEQHKHYLDEIIEQISEFSKRVILADANLDKVLSAYNKHRDKPIREQAENIIHLFTLTNLGAPAAFKYFDTTIDRKRYTSTKEVLDATLIHQSITGLYETRIDLSQLGGDGGGGSPAPGGTLNIEDEHRLHETSKEPDVSLGSTWLSDFPQAWAETGGMGLAVRQAPLIIPLKATSTPVSIKQYPMSQEARLGIKPHIQRLLDQGILVPCQSPWNTPLLPVKKPGTNDYRPVQDLREVNKRVEDIHPTVPNPYNLLSGLPPSHQWYTVLDLKDAFFCLRLHPTSQPLFAFEWRDPEMGISGQLTWTRLPQGFKNSPTLFNEALHRDLADFRIQHPDLILLQYVDDLLLAATSELDCQQGTRALLQTLGNLGYRASAKKAQICQKQVKYLGYLLKEGQRWLTEARKETVMGQPTPKTPRQLREFLGKAGFCRLFIPGFAEMAAPLYPLTKPGTLFNWGPDQQKAYQEIKQALLTAPALGLPDLTKPFELFVDEKQGYAKGVLTQKLGPWRRPVAYLSKKLDPVAAGWPPCLRMVAAIAVLTKDAGKLTMGQPLVILAPHAVEALVKQPPDRWLSNARMTHYQALLLDTDRVQFGPVVALNPATLLPLPEEGLQHNCLDILAEAHGTRPDLTDQPLPDADHTWYTDGSSLLQEGQRKAGAAVTTETEVIWAKALPAGTSAQRAELIALTQALKMAEGKKLNVYTDSRYAFATAHIHGEIYRRRGWLTSEGKEIKNKDEILALLKALFLPKRLSIIHCPGHQKGHSAEARGNRMADQAARKAAITETPDTSTLLAGKRTADGSEFEKRTADGSEFESPKKKAKVE

SEQ ID NO: 2809 - protein, 2094 aa, synthetic construct
MPAAKRVKLDGGDKKYSIGLDIGTNSVGWAVITDEYKVPSKKFKVLGNTDRHSIKKNLIGALLFDSGETAEATRLKRTARRRYTRRKNRICYLQEIFSNEMAKVDDSFFHRLEESFLVEEDKKHERHPIFGNIVDEVAYHEKYPTIYHLRKKLVDSTDKADLRLIYLALAHMIKFRGHFLIEGDLNPDNSDVDKLFIQLVQTYNQLFEENPINASGVDAKAILSARLSKSRRLENLIAQLPGEKKNGLFGNLIALSLGLTPNFKSNFDLAEDAKLQLSKDTYDDDLDNLLAQIGDQYADLFLAAKNLSDAILLSDILRVNTEITKAPLSASMIKRYDEHHQDLTLLKALVRQQLPEKYKEIFFDQSKNGYAGYIDGGASQEEFYKFIKPILEKMDGTEELLVKLNREDLLRKQRTFDNGSIPHQIHLGELHAILRRQEDFYPFLKDNREKIEKILTFRIPYYVGPLARGNSRFAWMTRKSEETITPWNFEEVVDKGASAQSFIERMTNFDKNLPNEKVLPKHSLLYEYFTVYNELTKVKYVTEGMRKPAFLSGEQKKAIVDLLFKTNRKVTVKQLKEDYFKKIECFDSVEISGVEDRFNASLGTYHDLLKIIKDKDFLDNEENEDILEDIVLTLTLFEDREMIEERLKTYAHLFDDKVMKQLKRRRYTGWGRLSRKLINGIRDKQSGKTILDFLKSDGFANRNFMQLIHDDSLTFKEDIQKAQVSGQGDSLHEHIANLAGSPAIKKGILQTVKVVDELVKVMGRHKPENIVIEMARENQTTQKGQKNSRERMKRIEEGIKELGSQILKEHPVENTQLQNEKLYLYYLQNGRDMYVDQELDINRLSDYDVDHIVPQSFLKDDSIDNKVLTRSDKARGKSDNVPSEEVVKKMKNYWRQLLNAKLITQRKFDNLTKAERGGLSELDKAGFIKRQLVETRQITKHVAQILDSRMNTKYDENDKLIREVKVITLKSKLVSDFRKDFQFYKVREINNYHHAHDAYLNAVVGTALIKKYPKLESEFVYGDYKVYDVRKMIAKSEQEIGKATAKYFFYSNIMNFFKTEITLANGEIRKRPLIETNGETGEIVWDKGRDFATVRKVLSMPQVNIVKKTEVQTGGFSKESILPKRNSDKLIARKKDWDPKKYGGFDSPTVAYSVLVVAKVEKGKSKKLKSVKELLGITIMERSSFEKNPIDFLEAKGYKEVKKDLIIKLPKYSLFELENGRKRMLASAGELQKGNELALPSKYVNFLYLASHYEKLKGSPEDNEQKQLFVEQHKHYLDEIIEQISEFSKRVILADANLDKVLSAYNKHRDKPIREQAENIIHLFTLTNLGAPAAFKYFDTTIDRKRYTSTKEVLDATLIHQSITGLYETRIDLSQLGGDGGGGSGGSGGSGGTLNIEDEHRLHETSKEPDVSLGSTWLSDFPQAWAETGGMGLAVRQAPLIIPLKATSTPVSIKQYPMSQEARLGIKPHIQRLLDQGILVPCQSPWNTPLLPVKKPGTNDYRPVQDLREVNKRVEDIHPTVPNPYNLLSGLPPSHQWYTVLDLKDAFFCLRLHPTSQPLFAFEWRDPEMGISGQLTWTRLPQGFKNSPTLFNEALHRDLADFRIQHPDLILLQYVDDLLLAATSELDCQQGTRALLQTLGNLGYRASAKKAQICQKQVKYLGYLLKEGQRWLTEARKETVMGQPTPKTPRQLREFLGKAGFCRLFIPGFAEMAAPLYPLTKPGTLFNWGPDQQKAYQEIKQALLTAPALGLPDLTKPFELFVDEKQGYAKGVLTQKLGPWRRPVAYLSKKLDPVAAGWPPCLRMVAAIAVLTKDAGKLTMGQPLVILAPHAVEALVKQPPDRWLSNARMTHYQALLLDTDRVQFGPVVALNPATLLPLPEEGLQHNCLDILAEAHGTRPDLTDQPLPDADHTWYTDGSSLLQEGQRKAGAAVTTETEVIWAKALPAGTSAQRAELIALTQALKMAEGKKLNVYTDSRYAFATAHIHGEIYRRRGWLTSEGKEIKNKDEILALLKALFLPKRLSIIHCPGHQKGHSAEARGNRMADQAARKAAITETPDTSTLLAGKRTADGSEFEKRTADGSEFESPKKKAKVE

SEQ ID NO: 2810 - protein, 2096 aa, synthetic construct
MPAAKRVKLDGGDKKYSIGLDIGTNSVGWAVITDEYKVPSKKFKVLGNTDRHSIKKNLIGALLFDSGETAEATRLKRTARRRYTRRKNRICYLQEIFSNEMAKVDDSFFHRLEESFLVEEDKKHERHPIFGNIVDEVAYHEKYPTIYHLRKKLVDSTDKADLRLIYLALAHMIKFRGHFLIEGDLNPDNSDVDKLFIQLVQTYNQLFEENPINASGVDAKAILSARLSKSRRLENLIAQLPGEKKNGLFGNLIALSLGLTPNFKSNFDLAEDAKLQLSKDTYDDDLDNLLAQIGDQYADLFLAAKNLSDAILLSDILRVNTEITKAPLSASMIKRYDEHHQDLTLLKALVRQQLPEKYKEIFFDQSKNGYAGYIDGGASQEEFYKFIKPILEKMDGTEELLVKLNREDLLRKQRTFDNGSIPHQIHLGELHAILRRQEDFYPFLKDNREKIEKILTFRIPYYVGPLARGNSRFAWMTRKSEETITPWNFEEVVDKGASAQSFIERMTNFDKNLPNEKVLPKHSLLYEYFTVYNELTKVKYVTEGMRKPAFLSGEQKKAIVDLLFKTNRKVTVKQLKEDYFKKIECFDSVEISGVEDRFNASLGTYHDLLKIIKDKDFLDNEENEDILEDIVLTLTLFEDREMIEERLKTYAHLFDDKVMKQLKRRRYTGWGRLSRKLINGIRDKQSGKTILDFLKSDGFANRNFMQLIHDDSLTFKEDIQKAQVSGQGDSLHEHIANLAGSPAIKKGILQTVKVVDELVKVMGRHKPENIVIEMARENQTTQKGQKNSRERMKRIEEGIKELGSQILKEHPVENTQLQNEKLYLYYLQNGRDMYVDQELDINRLSDYDVDHIVPQSFLKDDSIDNKVLTRSDKARGKSDNVPSEEVVKKMKNYWRQLLNAKLITQRKFDNLTKAERGGLSELDKAGFIKRQLVETRQITKHVAQILDSRMNTKYDENDKLIREVKVITLKSKLVSDFRKDFQFYKVREINNYHHAHDAYLNAVVGTALIKKYPKLESEFVYGDYKVYDVRKMIAKSEQEIGKATAKYFFYSNIMNFFKTEITLANGEIRKRPLIETNGETGEIVWDKGRDFATVRKVLSMPQVNIVKKTEVQTGGFSKESILPKRNSDKLIARKKDWDPKKYGGFDSPTVAYSVLVVAKVEKGKSKKLKSVKELLGITIMERSSFEKNPIDFLEAKGYKEVKKDLIIKLPKYSLFELENGRKRMLASAGELQKGNELALPSKYVNFLYLASHYEKLKGSPEDNEQKQLFVEQHKHYLDEIIEQISEFSKRVILADANLDKVLSAYNKHRDKPIREQAENIIHLFTLTNLGAPAAFKYFDTTIDRKRYTSTKEVLDATLIHQSITGLYETRIDLSQLGGDGGGSSGGGEAAAKGGTLNIEDEHRLHETSKEPDVSLGSTWLSDFPQAWAETGGMGLAVRQAPLIIPLKATSTPVSIKQYPMSQEARLGIKPHIQRLLDQGILVPCQSPWNTPLLPVKKPGTNDYRPVQDLREVNKRVEDIHPTVPNPYNLLSGLPPSHQWYTVLDLKDAFFCLRLHPTSQPLFAFEWRDPEMGISGQLTWTRLPQGFKNSPTLFNEALHRDLADFRIQHPDLILLQYVDDLLLAATSELDCQQGTRALLQTLGNLGYRASAKKAQICQKQVKYLGYLLKEGQRWLTEARKETVMGQPTPKTPRQLREFLGKAGFCRLFIPGFAEMAAPLYPLTKPGTLFNWGPDQQKAYQEIKQALLTAPALGLPDLTKPFELFVDEKQGYAKGVLTQKLGPWRRPVAYLSKKLDPVAAGWPPCLRMVAAIAVLTKDAGKLTMGQPLVILAPHAVEALVKQPPDRWLSNARMTHYQALLLDTDRVQFGPVVALNPATLLPLPEEGLQHNCLDILAEAHGTRPDLTDQPLPDADHTWYTDGSSLLQEGQRKAGAAVTTETEVIWAKALPAGTSAQRAELIALTQALKMAEGKKLNVYTDSRYAFATAHIHGEIYRRRGWLTSEGKEIKNKDEILALLKALFLPKRLSIIHCPGHQKGHSAEARGNRMADQAARKAAITETPDTSTLLAGKRTADGSEFEKRTADGSEFESPKKKAKVE

SEQ ID NO: 2811 - protein, 2094 aa, synthetic construct
MPAAKRVKLDGGDKKYSIGLDIGTNSVGWAVITDEYKVPSKKFKVLGNTDRHSIKKNLIGALLFDSGETAEATRLKRTARRRYTRRKNRICYLQEIFSNEMAKVDDSFFHRLEESFLVEEDKKHERHPIFGNIVDEVAYHEKYPTIYHLRKKLVDSTDKADLRLIYLALAHMIKFRGHFLIEGDLNPDNSDVDKLFIQLVQTYNQLFEENPINASGVDAKAILSARLSKSRRLENLIAQLPGEKKNGLFGNLIALSLGLTPNFKSNFDLAEDAKLQLSKDTYDDDLDNLLAQIGDQYADLFLAAKNLSDAILLSDILRVNTEITKAPLSASMIKRYDEHHQDLTLLKALVRQQLPEKYKEIFFDQSKNGYAGYIDGGASQEEFYKFIKPILEKMDGTEELLVKLNREDLLRKQRTFDNGSIPHQIHLGELHAILRRQEDFYPFLKDNREKIEKILTFRIPYYVGPLARGNSRFAWMTRKSEETITPWNFEEVVDKGASAQSFIERMTNFDKNLPNEKVLPKHSLLYEYFTVYNELTKVKYVTEGMRKPAFLSGEQKKAIVDLLFKTNRKVTVKQLKEDYFKKIECFDSVEISGVEDRFNASLGTYHDLLKIIKDKDFLDNEENEDILEDIVLTLTLFEDREMIEERLKTYAHLFDDKVMKQLKRRRYTGWGRLSRKLINGIRDKQSGKTILDFLKSDGFANRNFMQLIHDDSLTFKEDIQKAQVSGQGDSLHEHIANLAGSPAIKKGILQTVKVVDELVKVMGRHKPENIVIEMARENQTTQKGQKNSRERMKRIEEGIKELGSQILKEHPVENTQLQNEKLYLYYLQNGRDMYVDQELDINRLSDYDVDHIVPQSFLKDDSIDNKVLTRSDKARGKSDNVPSEEVVKKMKNYWRQLLNAKLITQRKFDNLTKAERGGLSELDKAGFIKRQLVETRQITKHVAQILDSRMNTKYDENDKLIREVKVITLKSKLVSDFRKDFQFYKVREINNYHHAHDAYLNAVVGTALIKKYPKLESEFVYGDYKVYDVRKMIAKSEQEIGKATAKYFFYSNIMNFFKTEITLANGEIRKRPLIETNGETGEIVWDKGRDFATVRKVLSMPQVNIVKKTEVQTGGFSKESILPKRNSDKLIARKKDWDPKKYGGFDSPTVAYSVLVVAKVEKGKSKKLKSVKELLGITIMERSSFEKNPIDFLEAKGYKEVKKDLIIKLPKYSLFELENGRKRMLASAGELQKGNELALPSKYVNFLYLASHYEKLKGSPEDNEQKQLFVEQHKHYLDEIIEQISEFSKRVILADANLDKVLSAYNKHRDKPIREQAENIIHLFTLTNLGAPAAFKYFDTTIDRKRYTSTKEVLDATLIHQSITGLYETRIDLSQLGGDGGGSSGSSGSSGGTLNIEDEHRLHETSKEPDVSLGSTWLSDFPQAWAETGGMGLAVRQAPLIIPLKATSTPVSIKQYPMSQEARLGIKPHIQRLLDQGILVPCQSPWNTPLLPVKKPGTNDYRPVQDLREVNKRVEDIHPTVPNPYNLLSGLPPSHQWYTVLDLKDAFFCLRLHPTSQPLFAFEWRDPEMGISGQLTWTRLPQGFKNSPTLFNEALHRDLADFRIQHPDLILLQYVDDLLLAATSELDCQQGTRALLQTLGNLGYRASAKKAQICQKQVKYLGYLLKEGQRWLTEARKETVMGQPTPKTPRQLREFLGKAGFCRLFIPGFAEMAAPLYPLTKPGTLFNWGPDQQKAYQEIKQALLTAPALGLPDLTKPFELFVDEKQGYAKGVLTQKLGPWRRPVAYLSKKLDPVAAGWPPCLRMVAAIAVLTKDAGKLTMGQPLVILAPHAVEALVKQPPDRWLSNARMTHYQALLLDTDRVQFGPVVALNPATLLPLPEEGLQHNCLDILAEAHGTRPDLTDQPLPDADHTWYTDGSSLLQEGQRKAGAAVTTETEVIWAKALPAGTSAQRAELIALTQALKMAEGKKLNVYTDSRYAFATAHIHGEIYRRRGWLTSEGKEIKNKDEILALLKALFLPKRLSIIHCPGHQKGHSAEARGNRMADQAARKAAITETPDTSTLLAGKRTADGSEFEKRTADGSEFESPKKKAKVE

SEQ ID NO: 2812 - protein, 2088 aa, synthetic construct
MPAAKRVKLDGGDKKYSIGLDIGTNSVGWAVITDEYKVPSKKFKVLGNTDRHSIKKNLIGALLFDSGETAEATRLKRTARRRYTRRKNRICYLQEIFSNEMAKVDDSFFHRLEESFLVEEDKKHERHPIFGNIVDEVAYHEKYPTIYHLRKKLVDSTDKADLRLIYLALAHMIKFRGHFLIEGDLNPDNSDVDKLFIQLVQTYNQLFEENPINASGVDAKAILSARLSKSRRLENLIAQLPGEKKNGLFGNLIALSLGLTPNFKSNFDLAEDAKLQLSKDTYDDDLDNLLAQIGDQYADLFLAAKNLSDAILLSDILRVNTEITKAPLSASMIKRYDEHHQDLTLLKALVRQQLPEKYKEIFFDQSKNGYAGYIDGGASQEEFYKFIKPILEKMDGTEELLVKLNREDLLRKQRTFDNGSIPHQIHLGELHAILRRQEDFYPFLKDNREKIEKILTFRIPYYVGPLARGNSRFAWMTRKSEETITPWNFEEVVDKGASAQSFIERMTNFDKNLPNEKVLPKHSLLYEYFTVYNELTKVKYVTEGMRKPAFLSGEQKKAIVDLLFKTNRKVTVKQLKEDYFKKIECFDSVEISGVEDRFNASLGTYHDLLKIIKDKDFLDNEENEDILEDIVLTLTLFEDREMIEERLKTYAHLFDDKVMKQLKRRRYTGWGRLSRKLINGIRDKQSGKTILDFLKSDGFANRNFMQLIHDDSLTFKEDIQKAQVSGQGDSLHEHIANLAGSPAIKKGILQTVKVVDELVKVMGRHKPENIVIEMARENQTTQKGQKNSRERMKRIEEGIKELGSQILKEHPVENTQLQNEKLYLYYLQNGRDMYVDQELDINRLSDYDVDHIVPQSFLKDDSIDNKVLTRSDKARGKSDNVPSEEVVKKMKNYWRQLLNAKLITQRKFDNLTKAERGGLSELDKAGFIKRQLVETRQITKHVAQILDSRMNTKYDENDKLIREVKVITLKSKLVSDFRKDFQFYKVREINNYHHAHDAYLNAVVGTALIKKYPKLESEFVYGDYKVYDVRKMIAKSEQEIGKATAKYFFYSNIMNFFKTEITLANGEIRKRPLIETNGETGEIVWDKGRDFATVRKVLSMPQVNIVKKTEVQTGGFSKESILPKRNSDKLIARKKDWDPKKYGGFDSPTVAYSVLVVAKVEKGKSKKLKSVKELLGITIMERSSFEKNPIDFLEAKGYKEVKKDLIIKLPKYSLFELENGRKRMLASAGELQKGNELALPSKYVNFLYLASHYEKLKGSPEDNEQKQLFVEQHKHYLDEIIEQISEFSKRVILADANLDKVLSAYNKHRDKPIREQAENIIHLFTLTNLGAPAAFKYFDTTIDRKRYTSTKEVLDATLIHQSITGLYETRIDLSQLGGDGGPAPGGTLNIEDEHRLHETSKEPDVSLGSTWLSDFPQAWAETGGMGLAVRQAPLIIPLKATSTPVSIKQYPMSQEARLGIKPHIQRLLDQGILVPCQSPWNTPLLPVKKPGTNDYRPVQDLREVNKRVEDIHPTVPNPYNLLSGLPPSHQWYTVLDLKDAFFCLRLHPTSQPLFAFEWRDPEMGISGQLTWTRLPQGFKNSPTLFNEALHRDLADFRIQHPDLILLQYVDDLLLAATSELDCQQGTRALLQTLGNLGYRASAKKAQICQKQVKYLGYLLKEGQRWLTEARKETVMGQPTPKTPRQLREFLGKAGFCRLFIPGFAEMAAPLYPLTKPGTLFNWGPDQQKAYQEIKQALLTAPALGLPDLTKPFELFVDEKQGYAKGVLTQKLGPWRRPVAYLSKKLDPVAAGWPPCLRMVAAIAVLTKDAGKLTMGQPLVILAPHAVEALVKQPPDRWLSNARMTHYQALLLDTDRVQFGPVVALNPATLLPLPEEGLQHNCLDILAEAHGTRPDLTDQPLPDADHTWYTDGSSLLQEGQRKAGAAVTTETEVIWAKALPAGTSAQRAELIALTQALKMAEGKKLNVYTDSRYAFATAHIHGEIYRRRGWLTSEGKEIKNKDEILALLKALFLPKRLSIIHCPGHQKGHSAEARGNRMADQAARKAAITETPDTSTLLAGKRTADGSEFEKRTADGSEFESPKKKAKVE

SEQ ID NO: 2813 - protein, 2115 aa, synthetic construct
MPAAKRVKLDGGDKKYSIGLDIGTNSVGWAVITDEYKVPSKKFKVLGNTDRHSIKKNLIGALLFDSGETAEATRLKRTARRRYTRRKNRICYLQEIFSNEMAKVDDSFFHRLEESFLVEEDKKHERHPIFGNIVDEVAYHEKYPTIYHLRKKLVDSTDKADLRLIYLALAHMIKFRGHFLIEGDLNPDNSDVDKLFIQLVQTYNQLFEENPINASGVDAKAILSARLSKSRRLENLIAQLPGEKKNGLFGNLIALSLGLTPNFKSNFDLAEDAKLQLSKDTYDDDLDNLLAQIGDQYADLFLAAKNLSDAILLSDILRVNTEITKAPLSASMIKRYDEHHQDLTLLKALVRQQLPEKYKEIFFDQSKNGYAGYIDGGASQEEFYKFIKPILEKMDGTEELLVKLNREDLLRKQRTFDNGSIPHQIHLGELHAILRRQEDFYPFLKDNREKIEKILTFRIPYYVGPLARGNSRFAWMTRKSEETITPWNFEEVVDKGASAQSFIERMTNFDKNLPNEKVLPKHSLLYEYFTVYNELTKVKYVTEGMRKPAFLSGEQKKAIVDLLFKTNRKVTVKQLKEDYFKKIECFDSVEISGVEDRFNASLGTYHDLLKIIKDKDFLDNEENEDILEDIVLTLTLFEDREMIEERLKTYAHLFDDKVMKQLKRRRYTGWGRLSRKLINGIRDKQSGKTILDFLKSDGFANRNFMQLIHDDSLTFKEDIQKAQVSGQGDSLHEHIANLAGSPAIKKGILQTVKVVDELVKVMGRHKPENIVIEMARENQTTQKGQKNSRERMKRIEEGIKELGSQILKEHPVENTQLQNEKLYLYYLQNGRDMYVDQELDINRLSDYDVDHIVPQSFLKDDSIDNKVLTRSDKARGKSDNVPSEEVVKKMKNYWRQLLNAKLITQRKFDNLTKAERGGLSELDKAGFIKRQLVETRQITKHVAQILDSRMNTKYDENDKLIREVKVITLKSKLVSDFRKDFQFYKVREINNYHHAHDAYLNAVVGTALIKKYPKLESEFVYGDYKVYDVRKMIAKSEQEIGKATAKYFFYSNIMNFFKTEITLANGEIRKRPLIETNGETGEIVWDKGRDFATVRKVLSMPQVNIVKKTEVQTGGFSKESILPKRNSDKLIARKKDWDPKKYGGFDSPTVAYSVLVVAKVEKGKSKKLKSVKELLGITIMERSSFEKNPIDFLEAKGYKEVKKDLIIKLPKYSLFELENGRKRMLASAGELQKGNELALPSKYVNFLYLASHYEKLKGSPEDNEQKQLFVEQHKHYLDEIIEQISEFSKRVILADANLDKVLSAYNKHRDKPIREQAENIIHLFTLTNLGAPAAFKYFDTTIDRKRYTSTKEVLDATLIHQSITGLYETRIDLSQLGGDGGEAAAKEAAAKEAAAKEAAAKEAAAKEAAAKGGTLNIEDEHRLHETSKEPDVSLGSTWLSDFPQAWAETGGMGLAVRQAPLIIPLKATSTPVSIKQYPMSQEARLGIKPHIQRLLDQGILVPCQSPWNTPLLPVKKPGTNDYRPVQDLREVNKRVEDIHPTVPNPYNLLSGLPPSHQWYTVLDLKDAFFCLRLHPTSQPLFAFEWRDPEMGISGQLTWTRLPQGFKNSPTLFNEALHRDLADFRIQHPDLILLQYVDDLLLAATSELDCQQGTRALLQTLGNLGYRASAKKAQICQKQVKYLGYLLKEGQRWLTEARKETVMGQPTPKTPRQLREFLGKAGFCRLFIPGFAEMAAPLYPLTKPGTLFNWGPDQQKAYQEIKQALLTAPALGLPDLTKPFELFVDEKQGYAKGVLTQKLGPWRRPVAYLSKKLDPVAAGWPPCLRMVAAIAVLTKDAGKLTMGQPLVILAPHAVEALVKQPPDRWLSNARMTHYQALLLDTDRVQFGPVVALNPATLLPLPEEGLQHNCLDILAEAHGTRPDLTDQPLPDADHTWYTDGSSLLQEGQRKAGAAVTTETEVIWAKALPAGTSAQRAELIALTQALKMAEGKKLNVYTDSRYAFATAHIHGEIYRRRGWLTSEGKEIKNKDEILALLKALFLPKRLSIIHCPGHQKGHSAEARGNRMADQAARKAAITETPDTSTLLAGKRTADGSEFEKRTADGSEFESPKKKAKVE

SEQ ID NO: 2814 - protein, 2097 aa, synthetic construct
MPAAKRVKLDGGDKKYSIGLDIGTNSVGWAVITDEYKVPSKKFKVLGNTDRHSIKKNLIGALLFDSGETAEATRLKRTARRRYTRRKNRICYLQEIFSNEMAKVDDSFFHRLEESFLVEEDKKHERHPIFGNIVDEVAYHEKYPTIYHLRKKLVDSTDKADLRLIYLALAHMIKFRGHFLIEGDLNPDNSDVDKLFIQLVQTYNQLFEENPINASGVDAKAILSARLSKSRRLENLIAQLPGEKKNGLFGNLIALSLGLTPNFKSNFDLAEDAKLQLSKDTYDDDLDNLLAQIGDQYADLFLAAKNLSDAILLSDILRVNTEITKAPLSASMIKRYDEHHQDLTLLKALVRQQLPEKYKEIFFDQSKNGYAGYIDGGASQEEFYKFIKPILEKMDGTEELLVKLNREDLLRKQRTFDNGSIPHQIHLGELHAILRRQEDFYPFLKDNREKIEKILTFRIPYYVGPLARGNSRFAWMTRKSEETITPWNFEEVVDKGASAQSFIERMTNFDKNLPNEKVLPKHSLLYEYFTVYNELTKVKYVTEGMRKPAFLSGEQKKAIVDLLFKTNRKVTVKQLKEDYFKKIECFDSVEISGVEDRFNASLGTYHDLLKIIKDKDFLDNEENEDILEDIVLTLTLFEDREMIEERLKTYAHLFDDKVMKQLKRRRYTGWGRLSRKLINGIRDKQSGKTILDFLKSDGFANRNFMQLIHDDSLTFKEDIQKAQVSGQGDSLHEHIANLAGSPAIKKGILQTVKVVDELVKVMGRHKPENIVIEMARENQTTQKGQKNSRERMKRIEEGIKELGSQILKEHPVENTQLQNEKLYLYYLQNGRDMYVDQELDINRLSDYDVDHIVPQSFLKDDSIDNKVLTRSDKARGKSDNVPSEEVVKKMKNYWRQLLNAKLITQRKFDNLTKAERGGLSELDKAGFIKRQLVETRQITKHVAQILDSRMNTKYDENDKLIREVKVITLKSKLVSDFRKDFQFYKVREINNYHHAHDAYLNAVVGTALIKKYPKLESEFVYGDYKVYDVRKMIAKSEQEIGKATAKYFFYSNIMNFFKTEITLANGEIRKRPLIETNGETGEIVWDKGRDFATVRKVLSMPQVNIVKKTEVQTGGFSKESILPKRNSDKLIARKKDWDPKKYGGFDSPTVAYSVLVVAKVEKGKSKKLKSVKELLGITIMERSSFEKNPIDFLEAKGYKEVKKDLIIKLPKYSLFELENGRKRMLASAGELQKGNELALPSKYVNFLYLASHYEKLKGSPEDNEQKQLFVEQHKHYLDEIIEQISEFSKRVILADANLDKVLSAYNKHRDKPIREQAENIIHLFTLTNLGAPAAFKYFDTTIDRKRYTSTKEVLDATLIHQSITGLYETRIDLSQLGGDGGGSAGSAAGSGEFGGTLNIEDEHRLHETSKEPDVSLGSTWLSDFPQAWAETGGMGLAVRQAPLIIPLKATSTPVSIKQYPMSQEARLGIKPHIQRLLDQGILVPCQSPWNTPLLPVKKPGTNDYRPVQDLREVNKRVEDIHPTVPNPYNLLSGLPPSHQWYTVLDLKDAFFCLRLHPTSQPLFAFEWRDPEMGISGQLTWTRLPQGFKNSPTLFNEALHRDLADFRIQHPDLILLQYVDDLLLAATSELDCQQGTRALLQTLGNLGYRASAKKAQICQKQVKYLGYLLKEGQRWLTEARKETVMGQPTPKTPRQLREFLGKAGFCRLFIPGFAEMAAPLYPLTKPGTLFNWGPDQQKAYQEIKQALLTAPALGLPDLTKPFELFVDEKQGYAKGVLTQKLGPWRRPVAYLSKKLDPVAAGWPPCLRMVAAIAVLTKDAGKLTMGQPLVILAPHAVEALVKQPPDRWLSNARMTHYQALLLDTDRVQFGPVVALNPATLLPLPEEGLQHNCLDILAEAHGTRPDLTDQPLPDADHTWYTDGSSLLQEGQRKAGAAVTTETEVIWAKALPAGTSAQRAELIALTQALKMAEGKKLNVYTDSRYAFATAHIHGEIYRRRGWLTSEGKEIKNKDEILALLKALFLPKRLSIIHCPGHQKGHSAEARGNRMADQAARKAAITETPDTSTLLAGKRTADGSEFEKRTADGSEFESPKKKAKVE

SEQ ID NO: 2815 - protein, 2096 aa, synthetic construct
MPAAKRVKLDGGDKKYSIGLDIGTNSVGWAVITDEYKVPSKKFKVLGNTDRHSIKKNLIGALLFDSGETAEATRLKRTARRRYTRRKNRICYLQEIFSNEMAKVDDSFFHRLEESFLVEEDKKHERHPIFGNIVDEVAYHEKYPTIYHLRKKLVDSTDKADLRLIYLALAHMIKFRGHFLIEGDLNPDNSDVDKLFIQLVQTYNQLFEENPINASGVDAKAILSARLSKSRRLENLIAQLPGEKKNGLFGNLIALSLGLTPNFKSNFDLAEDAKLQLSKDTYDDDLDNLLAQIGDQYADLFLAAKNLSDAILLSDILRVNTEITKAPLSASMIKRYDEHHQDLTLLKALVRQQLPEKYKEIFFDQSKNGYAGYIDGGASQEEFYKFIKPILEKMDGTEELLVKLNREDLLRKQRTFDNGSIPHQIHLGELHAILRRQEDFYPFLKDNREKIEKILTFRIPYYVGPLARGNSRFAWMTRKSEETITPWNFEEVVDKGASAQSFIERMTNFDKNLPNEKVLPKHSLLYEYFTVYNELTKVKYVTEGMRKPAFLSGEQKKAIVDLLFKTNRKVTVKQLKEDYFKKIECFDSVEISGVEDRFNASLGTYHDLLKIIKDKDFLDNEENEDILEDIVLTLTLFEDREMIEERLKTYAHLFDDKVMKQLKRRRYTGWGRLSRKLINGIRDKQSGKTILDFLKSDGFANRNFMQLIHDDSLTFKEDIQKAQVSGQGDSLHEHIANLAGSPAIKKGILQTVKVVDELVKVMGRHKPENIVIEMARENQTTQKGQKNSRERMKRIEEGIKELGSQILKEHPVENTQLQNEKLYLYYLQNGRDMYVDQELDINRLSDYDVDHIVPQSFLKDDSIDNKVLTRSDKARGKSDNVPSEEVVKKMKNYWRQLLNAKLITQRKFDNLTKAERGGLSELDKAGFIKRQLVETRQITKHVAQILDSRMNTKYDENDKLIREVKVITLKSKLVSDFRKDFQFYKVREINNYHHAHDAYLNAVVGTALIKKYPKLESEFVYGDYKVYDVRKMIAKSEQEIGKATAKYFFYSNIMNFFKTEITLANGEIRKRPLIETNGETGEIVWDKGRDFATVRKVLSMPQVNIVKKTEVQTGGFSKESILPKRNSDKLIARKKDWDPKKYGGFDSPTVAYSVLVVAKVEKGKSKKLKSVKELLGITIMERSSFEKNPIDFLEAKGYKEVKKDLIIKLPKYSLFELENGRKRMLASAGELQKGNELALPSKYVNFLYLASHYEKLKGSPEDNEQKQLFVEQHKHYLDEIIEQISEFSKRVILADANLDKVLSAYNKHRDKPIREQAENIIHLFTLTNLGAPAAFKYFDTTIDRKRYTSTKEVLDATLIHQSITGLYETRIDLSQLGGDGGEAAAKGGGGGSGGTLNIEDEHRLHETSKEPDVSLGSTWLSDFPQAWAETGGMGLAVRQAPLIIPLKATSTPVSIKQYPMSQEARLGIKPHIQRLLDQGILVPCQSPWNTPLLPVKKPGTNDYRPVQDLREVNKRVEDIHPTVPNPYNLLSGLPPSHQWYTVLDLKDAFFCLRLHPTSQPLFAFEWRDPEMGISGQLTWTRLPQGFKNSPTLFNEALHRDLADFRIQHPDLILLQYVDDLLLAATSELDCQQGTRALLQTLGNLGYRASAKKAQICQKQVKYLGYLLKEGQRWLTEARKETVMGQPTPKTPRQLREFLGKAGFCRLFIPGFAEMAAPLYPLTKPGTLFNWGPDQQKAYQEIKQALLTAPALGLPDLTKPFELFVDEKQGYAKGVLTQKLGPWRRPVAYLSKKLDPVAAGWPPCLRMVAAIAVLTKDAGKLTMGQPLVILAPHAVEALVKQPPDRWLSNARMTHYQALLLDTDRVQFGPVVALNPATLLPLPEEGLQHNCLDILAEAHGTRPDLTDQPLPDADHTWYTDGSSLLQEGQRKAGAAVTTETEVIWAKALPAGTSAQRAELIALTQALKMAEGKKLNVYTDSRYAFATAHIHGEIYRRRGWLTSEGKEIKNKDEILALLKALFLPKRLSIIHCPGHQKGHSAEARGNRMADQAARKAAITETPDTSTLLAGKRTADGSEFEKRTADGSEFESPKKKAKVE

SEQ ID NO: 2816 - protein, 2103 aa, synthetic construct
MPAAKRVKLDGGDKKYSIGLDIGTNSVGWAVITDEYKVPSKKFKVLGNTDRHSIKKNLIGALLFDSGETAEATRLKRTARRRYTRRKNRICYLQEIFSNEMAKVDDSFFHRLEESFLVEEDKKHERHPIFGNIVDEVAYHEKYPTIYHLRKKLVDSTDKADLRLIYLALAHMIKFRGHFLIEGDLNPDNSDVDKLFIQLVQTYNQLFEENPINASGVDAKAILSARLSKSRRLENLIAQLPGEKKNGLFGNLIALSLGLTPNFKSNFDLAEDAKLQLSKDTYDDDLDNLLAQIGDQYADLFLAAKNLSDAILLSDILRVNTEITKAPLSASMIKRYDEHHQDLTLLKALVRQQLPEKYKEIFFDQSKNGYAGYIDGGASQEEFYKFIKPILEKMDGTEELLVKLNREDLLRKQRTFDNGSIPHQIHLGELHAILRRQEDFYPFLKDNREKIEKILTFRIPYYVGPLARGNSRFAWMTRKSEETITPWNFEEVVDKGASAQSFIERMTNFDKNLPNEKVLPKHSLLYEYFTVYNELTKVKYVTEGMRKPAFLSGEQKKAIVDLLFKTNRKVTVKQLKEDYFKKIECFDSVEISGVEDRFNASLGTYHDLLKIIKDKDFLDNEENEDILEDIVLTLTLFEDREMIEERLKTYAHLFDDKVMKQLKRRRYTGWGRLSRKLINGIRDKQSGKTILDFLKSDGFANRNFMQLIHDDSLTFKEDIQKAQVSGQGDSLHEHIANLAGSPAIKKGILQTVKVVDELVKVMGRHKPENIVIEMARENQTTQKGQKNSRERMKRIEEGIKELGSQILKEHPVENTQLQNEKLYLYYLQNGRDMYVDQELDINRLSDYDVDHIVPQSFLKDDSIDNKVLTRSDKARGKSDNVPSEEVVKKMKNYWRQLLNAKLITQRKFDNLTKAERGGLSELDKAGFIKRQLVETRQITKHVAQILDSRMNTKYDENDKLIREVKVITLKSKLVSDFRKDFQFYKVREINNYHHAHDAYLNAVVGTALIKKYPKLESEFVYGDYKVYDVRKMIAKSEQEIGKATAKYFFYSNIMNFFKTEITLANGEIRKRPLIETNGETGEIVWDKGRDFATVRKVLSMPQVNIVKKTEVQTGGFSKESILPKRNSDKLIARKKDWDPKKYGGFDSPTVAYSVLVVAKVEKGKSKKLKSVKELLGITIMERSSFEKNPIDFLEAKGYKEVKKDLIIKLPKYSLFELENGRKRMLASAGELQKGNELALPSKYVNFLYLASHYEKLKGSPEDNEQKQLFVEQHKHYLDEIIEQISEFSKRVILADANLDKVLSAYNKHRDKPIREQAENIIHLFTLTNLGAPAAFKYFDTTIDRKRYTSTKEVLDATLIHQSITGLYETRIDLSQLGGDGGGSSGSSGSSGSSGSSGSSGGTLNIEDEHRLHETSKEPDVSLGSTWLSDFPQAWAETGGMGLAVRQAPLIIPLKATSTPVSIKQYPMSQEARLGIKPHIQRLLDQGILVPCQSPWNTPLLPVKKPGTNDYRPVQDLREVNKRVEDIHPTVPNPYNLLSGLPPSHQWYTVLDLKDAFFCLRLHPTSQPLFAFEWRDPEMGISGQLTWTRLPQGFKNSPTLFNEALHRDLADFRIQHPDLILLQYVDDLLLAATSELDCQQGTRALLQTLGNLGYRASAKKAQICQKQVKYLGYLLKEGQRWLTEARKETVMGQPTPKTPRQLREFLGKAGFCRLFIPGFAEMAAPLYPLTKPGTLFNWGPDQQKAYQEIKQALLTAPALGLPDLTKPFELFVDEKQGYAKGVLTQKLGPWRRPVAYLSKKLDPVAAGWPPCLRMVAAIAVLTKDAGKLTMGQPLVILAPHAVEALVKQPPDRWLSNARMTHYQALLLDTDRVQFGPVVALNPATLLPLPEEGLQHNCLDILAEAHGTRPDLTDQPLPDADHTWYTDGSSLLQEGQRKAGAAVTTETEVIWAKALPAGTSAQRAELIALTQALKMAEGKKLNVYTDSRYAFATAHIHGEIYRRRGWLTSEGKEIKNKDEILALLKALFLPKRLSIIHCPGHQKGHSAEARGNRMADQAARKAAITETPDTSTLLAGKRTADGSEFEKRTADGSEFESPKKKAKVE

SEQ ID NO: 2817 - protein, 2096 aa, synthetic construct
MPAAKRVKLDGGDKKYSIGLDIGTNSVGWAVITDEYKVPSKKFKVLGNTDRHSIKKNLIGALLFDSGETAEATRLKRTARRRYTRRKNRICYLQEIFSNEMAKVDDSFFHRLEESFLVEEDKKHERHPIFGNIVDEVAYHEKYPTIYHLRKKLVDSTDKADLRLIYLALAHMIKFRGHFLIEGDLNPDNSDVDKLFIQLVQTYNQLFEENPINASGVDAKAILSARLSKSRRLENLIAQLPGEKKNGLFGNLIALSLGLTPNFKSNFDLAEDAKLQLSKDTYDDDLDNLLAQIGDQYADLFLAAKNLSDAILLSDILRVNTEITKAPLSASMIKRYDEHHQDLTLLKALVRQQLPEKYKEIFFDQSKNGYAGYIDGGASQEEFYKFIKPILEKMDGTEELLVKLNREDLLRKQRTFDNGSIPHQIHLGELHAILRRQEDFYPFLKDNREKIEKILTFRIPYYVGPLARGNSRFAWMTRKSEETITPWNFEEVVDKGASAQSFIERMTNFDKNLPNEKVLPKHSLLYEYFTVYNELTKVKYVTEGMRKPAFLSGEQKKAIVDLLFKTNRKVTVKQLKEDYFKKIECFDSVEISGVEDRFNASLGTYHDLLKIIKDKDFLDNEENEDILEDIVLTLTLFEDREMIEERLKTYAHLFDDKVMKQLKRRRYTGWGRLSRKLINGIRDKQSGKTILDFLKSDGFANRNFMQLIHDDSLTFKEDIQKAQVSGQGDSLHEHIANLAGSPAIKKGILQTVKVVDELVKVMGRHKPENIVIEMARENQTTQKGQKNSRERMKRIEEGIKELGSQILKEHPVENTQLQNEKLYLYYLQNGRDMYVDQELDINRLSDYDVDHIVPQSFLKDDSIDNKVLTRSDKARGKSDNVPSEEVVKKMKNYWRQLLNAKLITQRKFDNLTKAERGGLSELDKAGFIKRQLVETRQITKHVAQILDSRMNTKYDENDKLIREVKVITLKSKLVSDFRKDFQFYKVREINNYHHAHDAYLNAVVGTALIKKYPKLESEFVYGDYKVYDVRKMIAKSEQEIGKATAKYFFYSNIMNFFKTEITLANGEIRKRPLIETNGETGEIVWDKGRDFATVRKVLSMPQVNIVKKTEVQTGGFSKESILPKRNSDKLIARKKDWDPKKYGGFDSPTVAYSVLVVAKVEKGKSKKLKSVKELLGITIMERSSFEKNPIDFLEAKGYKEVKKDLIIKLPKYSLFELENGRKRMLASAGELQKGNELALPSKYVNFLYLASHYEKLKGSPEDNEQKQLFVEQHKHYLDEIIEQISEFSKRVILADANLDKVLSAYNKHRDKPIREQAENIIHLFTLTNLGAPAAFKYFDTTIDRKRYTSTKEVLDATLIHQSITGLYETRIDLSQLGGDGGEAAAKGGSGSSGGTLNIEDEHRLHETSKEPDVSLGSTWLSDFPQAWAETGGMGLAVRQAPLIIPLKATSTPVSIKQYPMSQEARLGIKPHIQRLLDQGILVPCQSPWNTPLLPVKKPGTNDYRPVQDLREVNKRVEDIHPTVPNPYNLLSGLPPSHQWYTVLDLKDAFFCLRLHPTSQPLFAFEWRDPEMGISGQLTWTRLPQGFKNSPTLFNEALHRDLADFRIQHPDLILLQYVDDLLLAATSELDCQQGTRALLQTLGNLGYRASAKKAQICQKQVKYLGYLLKEGQRWLTEARKETVMGQPTPKTPRQLREFLGKAGFCRLFIPGFAEMAAPLYPLTKPGTLFNWGPDQQKAYQEIKQALLTAPALGLPDLTKPFELFVDEKQGYAKGVLTQKLGPWRRPVAYLSKKLDPVAAGWPPCLRMVAAIAVLTKDAGKLTMGQPLVILAPHAVEALVKQPPDRWLSNARMTHYQALLLDTDRVQFGPVVALNPATLLPLPEEGLQHNCLDILAEAHGTRPDLTDQPLPDADHTWYTDGSSLLQEGQRKAGAAVTTETEVIWAKALPAGTSAQRAELIALTQALKMAEGKKLNVYTDSRYAFATAHIHGEIYRRRGWLTSEGKEIKNKDEILALLKALFLPKRLSIIHCPGHQKGHSAEARGNRMADQAARKAAITETPDTSTLLAGKRTADGSEFEKRTADGSEFESPKKKAKVE

SEQ ID NO: 2818 - protein, 2094 aa, synthetic construct
MPAAKRVKLDGGDKKYSIGLDIGTNSVGWAVITDEYKVPSKKFKVLGNTDRHSIKKNLIGALLFDSGETAEATRLKRTARRRYTRRKNRICYLQEIFSNEMAKVDDSFFHRLEESFLVEEDKKHERHPIFGNIVDEVAYHEKYPTIYHLRKKLVDSTDKADLRLIYLALAHMIKFRGHFLIEGDLNPDNSDVDKLFIQLVQTYNQLFEENPINASGVDAKAILSARLSKSRRLENLIAQLPGEKKNGLFGNLIALSLGLTPNFKSNFDLAEDAKLQLSKDTYDDDLDNLLAQIGDQYADLFLAAKNLSDAILLSDILRVNTEITKAPLSASMIKRYDEHHQDLTLLKALVRQQLPEKYKEIFFDQSKNGYAGYIDGGASQEEFYKFIKPILEKMDGTEELLVKLNREDLLRKQRTFDNGSIPHQIHLGELHAILRRQEDFYPFLKDNREKIEKILTFRIPYYVGPLARGNSRFAWMTRKSEETITPWNFEEVVDKGASAQSFIERMTNFDKNLPNEKVLPKHSLLYEYFTVYNELTKVKYVTEGMRKPAFLSGEQKKAIVDLLFKTNRKVTVKQLKEDYFKKIECFDSVEISGVEDRFNASLGTYHDLLKIIKDKDFLDNEENEDILEDIVLTLTLFEDREMIEERLKTYAHLFDDKVMKQLKRRRYTGWGRLSRKLINGIRDKQSGKTILDFLKSDGFANRNFMQLIHDDSLTFKEDIQKAQVSGQGDSLHEHIANLAGSPAIKKGILQTVKVVDELVKVMGRHKPENIVIEMARENQTTQKGQKNSRERMKRIEEGIKELGSQILKEHPVENTQLQNEKLYLYYLQNGRDMYVDQELDINRLSDYDVDHIVPQSFLKDDSIDNKVLTRSDKARGKSDNVPSEEVVKKMKNYWRQLLNAKLITQRKFDNLTKAERGGLSELDKAGFIKRQLVETRQITKHVAQILDSRMNTKYDENDKLIREVKVITLKSKLVSDFRKDFQFYKVREINNYHHAHDAYLNAVVGTALIKKYPKLESEFVYGDYKVYDVRKMIAKSEQEIGKATAKYFFYSNIMNFFKTEITLANGEIRKRPLIETNGETGEIVWDKGRDFATVRKVLSMPQVNIVKKTEVQTGGFSKESILPKRNSDKLIARKKDWDPKKYGGFDSPTVAYSVLVVAKVEKGKSKKLKSVKELLGITIMERSSFEKNPIDFLEAKGYKEVKKDLIIKLPKYSLFELENGRKRMLASAGELQKGNELALPSKYVNFLYLASHYEKLKGSPEDNEQKQLFVEQHKHYLDEIIEQISEFSKRVILADANLDKVLSAYNKHRDKPIREQAENIIHLFTLTNLGAPAAFKYFDTTIDRKRYTSTKEVLDATLIHQSITGLYETRIDLSQLGGDGGGGSGSSGGGGGTLNIEDEHRLHETSKEPDVSLGSTWLSDFPQAWAETGGMGLAVRQAPLIIPLKATSTPVSIKQYPMSQEARLGIKPHIQRLLDQGILVPCQSPWNTPLLPVKKPGTNDYRPVQDLREVNKRVEDIHPTVPNPYNLLSGLPPSHQWYTVLDLKDAFFCLRLHPTSQPLFAFEWRDPEMGISGQLTWTRLPQGFKNSPTLFNEALHRDLADFRIQHPDLILLQYVDDLLLAATSELDCQQGTRALLQTLGNLGYRASAKKAQICQKQVKYLGYLLKEGQRWLTEARKETVMGQPTPKTPRQLREFLGKAGFCRLFIPGFAEMAAPLYPLTKPGTLFNWGPDQQKAYQEIKQALLTAPALGLPDLTKPFELFVDEKQGYAKGVLTQKLGPWRRPVAYLSKKLDPVAAGWPPCLRMVAAIAVLTKDAGKLTMGQPLVILAPHAVEALVKQPPDRWLSNARMTHYQALLLDTDRVQFGPVVALNPATLLPLPEEGLQHNCLDILAEAHGTRPDLTDQPLPDADHTWYTDGSSLLQEGQRKAGAAVTTETEVIWAKALPAGTSAQRAELIALTQALKMAEGKKLNVYTDSRYAFATAHIHGEIYRRRGWLTSEGKEIKNKDEILALLKALFLPKRLSIIHCPGHQKGHSAEARGNRMADQAARKAAITETPDTSTLLAGKRTADGSEFEKRTADGSEFESPKKKAKVE

SEQ ID NO: 2819 - protein, 2100 aa, synthetic construct
MPAAKRVKLDGGDKKYSIGLDIGTNSVGWAVITDEYKVPSKKFKVLGNTDRHSIKKNLIGALLFDSGETAEATRLKRTARRRYTRRKNRICYLQEIFSNEMAKVDDSFFHRLEESFLVEEDKKHERHPIFGNIVDEVAYHEKYPTIYHLRKKLVDSTDKADLRLIYLALAHMIKFRGHFLIEGDLNPDNSDVDKLFIQLVQTYNQLFEENPINASGVDAKAILSARLSKSRRLENLIAQLPGEKKNGLFGNLIALSLGLTPNFKSNFDLAEDAKLQLSKDTYDDDLDNLLAQIGDQYADLFLAAKNLSDAILLSDILRVNTEITKAPLSASMIKRYDEHHQDLTLLKALVRQQLPEKYKEIFFDQSKNGYAGYIDGGASQEEFYKFIKPILEKMDGTEELLVKLNREDLLRKQRTFDNGSIPHQIHLGELHAILRRQEDFYPFLKDNREKIEKILTFRIPYYVGPLARGNSRFAWMTRKSEETITPWNFEEVVDKGASAQSFIERMTNFDKNLPNEKVLPKHSLLYEYFTVYNELTKVKYVTEGMRKPAFLSGEQKKAIVDLLFKTNRKVTVKQLKEDYFKKIECFDSVEISGVEDRFNASLGTYHDLLKIIKDKDFLDNEENEDILEDIVLTLTLFEDREMIEERLKTYAHLFDDKVMKQLKRRRYTGWGRLSRKLINGIRDKQSGKTILDFLKSDGFANRNFMQLIHDDSLTFKEDIQKAQVSGQGDSLHEHIANLAGSPAIKKGILQTVKVVDELVKVMGRHKPENIVIEMARENQTTQKGQKNSRERMKRIEEGIKELGSQILKEHPVENTQLQNEKLYLYYLQNGRDMYVDQELDINRLSDYDVDHIVPQSFLKDDSIDNKVLTRSDKARGKSDNVPSEEVVKKMKNYWRQLLNAKLITQRKFDNLTKAERGGLSELDKAGFIKRQLVETRQITKHVAQILDSRMNTKYDENDKLIREVKVITLKSKLVSDFRKDFQFYKVREINNYHHAHDAYLNAVVGTALIKKYPKLESEFVYGDYKVYDVRKMIAKSEQEIGKATAKYFFYSNIMNFFKTEITLANGEIRKRPLIETNGETGEIVWDKGRDFATVRKVLSMPQVNIVKKTEVQTGGFSKESILPKRNSDKLIARKKDWDPKKYGGFDSPTVAYSVLVVAKVEKGKSKKLKSVKELLGITIMERSSFEKNPIDFLEAKGYKEVKKDLIIKLPKYSLFELENGRKRMLASAGELQKGNELALPSKYVNFLYLASHYEKLKGSPEDNEQKQLFVEQHKHYLDEIIEQISEFSKRVILADANLDKVLSAYNKHRDKPIREQAENIIHLFTLTNLGAPAAFKYFDTTIDRKRYTSTKEVLDATLIHQSITGLYETRIDLSQLGGDGGGGGGSGGGGSGGGGSGGTLNIEDEHRLHETSKEPDVSLGSTWLSDFPQAWAETGGMGLAVRQAPLIIPLKATSTPVSIKQYPMSQEARLGIKPHIQRLLDQGILVPCQSPWNTPLLPVKKPGTNDYRPVQDLREVNKRVEDIHPTVPNPYNLLSGLPPSHQWYTVLDLKDAFFCLRLHPTSQPLFAFEWRDPEMGISGQLTWTRLPQGFKNSPTLFNEALHRDLADFRIQHPDLILLQYVDDLLLAATSELDCQQGTRALLQTLGNLGYRASAKKAQICQKQVKYLGYLLKEGQRWLTEARKETVMGQPTPKTPRQLREFLGKAGFCRLFIPGFAEMAAPLYPLTKPGTLFNWGPDQQKAYQEIKQALLTAPALGLPDLTKPFELFVDEKQGYAKGVLTQKLGPWRRPVAYLSKKLDPVAAGWPPCLRMVAAIAVLTKDAGKLTMGQPLVILAPHAVEALVKQPPDRWLSNARMTHYQALLLDTDRVQFGPVVALNPATLLPLPEEGLQHNCLDILAEAHGTRPDLTDQPLPDADHTWYTDGSSLLQEGQRKAGAAVTTETEVIWAKALPAGTSAQRAELIALTQALKMAEGKKLNVYTDSRYAFATAHIHGEIYRRRGWLTSEGKEIKNKDEILALLKALFLPKRLSIIHCPGHQKGHSAEARGNRMADQAARKAAITETPDTSTLLAGKRTADGSEFEKRTADGSEFESPKKKAKVE

SEQ ID NO: 2820 - protein, 2091 aa, synthetic construct
MPAAKRVKLDGGDKKYSIGLDIGTNSVGWAVITDEYKVPSKKFKVLGNTDRHSIKKNLIGALLFDSGETAEATRLKRTARRRYTRRKNRICYLQEIFSNEMAKVDDSFFHRLEESFLVEEDKKHERHPIFGNIVDEVAYHEKYPTIYHLRKKLVDSTDKADLRLIYLALAHMIKFRGHFLIEGDLNPDNSDVDKLFIQLVQTYNQLFEENPINASGVDAKAILSARLSKSRRLENLIAQLPGEKKNGLFGNLIALSLGLTPNFKSNFDLAEDAKLQLSKDTYDDDLDNLLAQIGDQYADLFLAAKNLSDAILLSDILRVNTEITKAPLSASMIKRYDEHHQDLTLLKALVRQQLPEKYKEIFFDQSKNGYAGYIDGGASQEEFYKFIKPILEKMDGTEELLVKLNREDLLRKQRTFDNGSIPHQIHLGELHAILRRQEDFYPFLKDNREKIEKILTFRIPYYVGPLARGNSRFAWMTRKSEETITPWNFEEVVDKGASAQSFIERMTNFDKNLPNEKVLPKHSLLYEYFTVYNELTKVKYVTEGMRKPAFLSGEQKKAIVDLLFKTNRKVTVKQLKEDYFKKIECFDSVEISGVEDRFNASLGTYHDLLKIIKDKDFLDNEENEDILEDIVLTLTLFEDREMIEERLKTYAHLFDDKVMKQLKRRRYTGWGRLSRKLINGIRDKQSGKTILDFLKSDGFANRNFMQLIHDDSLTFKEDIQKAQVSGQGDSLHEHIANLAGSPAIKKGILQTVKVVDELVKVMGRHKPENIVIEMARENQTTQKGQKNSRERMKRIEEGIKELGSQILKEHPVENTQLQNEKLYLYYLQNGRDMYVDQELDINRLSDYDVDHIVPQSFLKDDSIDNKVLTRSDKARGKSDNVPSEEVVKKMKNYWRQLLNAKLITQRKFDNLTKAERGGLSELDKAGFIKRQLVETRQITKHVAQILDSRMNTKYDENDKLIREVKVITLKSKLVSDFRKDFQFYKVREINNYHHAHDAYLNAVVGTALIKKYPKLESEFVYGDYKVYDVRKMIAKSEQEIGKATAKYFFYSNIMNFFKTEITLANGEIRKRPLIETNGETGEIVWDKGRDFATVRKVLSMPQVNIVKKTEVQTGGFSKESILPKRNSDKLIARKKDWDPKKYGGFDSPTVAYSVLVVAKVEKGKSKKLKSVKELLGITIMERSSFEKNPIDFLEAKGYKEVKKDLIIKLPKYSLFELENGRKRMLASAGELQKGNELALPSKYVNFLYLASHYEKLKGSPEDNEQKQLFVEQHKHYLDEIIEQISEFSKRVILADANLDKVLSAYNKHRDKPIREQAENIIHLFTLTNLGAPAAFKYFDTTIDRKRYTSTKEVLDATLIHQSITGLYETRIDLSQLGGDGGGGGGSSGGTLNIEDEHRLHETSKEPDVSLGSTWLSDFPQAWAETGGMGLAVRQAPLIIPLKATSTPVSIKQYPMSQEARLGIKPHIQRLLDQGILVPCQSPWNTPLLPVKKPGTNDYRPVQDLREVNKRVEDIHPTVPNPYNLLSGLPPSHQWYTVLDLKDAFFCLRLHPTSQPLFAFEWRDPEMGISGQLTWTRLPQGFKNSPTLFNEALHRDLADFRIQHPDLILLQYVDDLLLAATSELDCQQGTRALLQTLGNLGYRASAKKAQICQKQVKYLGYLLKEGQRWLTEARKETVMGQPTPKTPRQLREFLGKAGFCRLFIPGFAEMAAPLYPLTKPGTLFNWGPDQQKAYQEIKQALLTAPALGLPDLTKPFELFVDEKQGYAKGVLTQKLGPWRRPVAYLSKKLDPVAAGWPPCLRMVAAIAVLTKDAGKLTMGQPLVILAPHAVEALVKQPPDRWLSNARMTHYQALLLDTDRVQFGPVVALNPATLLPLPEEGLQHNCLDILAEAHGTRPDLTDQPLPDADHTWYTDGSSLLQEGQRKAGAAVTTETEVIWAKALPAGTSAQRAELIALTQALKMAEGKKLNVYTDSRYAFATAHIHGEIYRRRGWLTSEGKEIKNKDEILALLKALFLPKRLSIIHCPGHQKGHSAEARGNRMADQAARKAAITETPDTSTLLAGKRTADGSEFEKRTADGSEFESPKKKAKVE

SEQ ID NO: 2821 - protein, 2093 aa, synthetic construct
MPAAKRVKLDGGDKKYSIGLDIGTNSVGWAVITDEYKVPSKKFKVLGNTDRHSIKKNLIGALLFDSGETAEATRLKRTARRRYTRRKNRICYLQEIFSNEMAKVDDSFFHRLEESFLVEEDKKHERHPIFGNIVDEVAYHEKYPTIYHLRKKLVDSTDKADLRLIYLALAHMIKFRGHFLIEGDLNPDNSDVDKLFIQLVQTYNQLFEENPINASGVDAKAILSARLSKSRRLENLIAQLPGEKKNGLFGNLIALSLGLTPNFKSNFDLAEDAKLQLSKDTYDDDLDNLLAQIGDQYADLFLAAKNLSDAILLSDILRVNTEITKAPLSASMIKRYDEHHQDLTLLKALVRQQLPEKYKEIFFDQSKNGYAGYIDGGASQEEFYKFIKPILEKMDGTEELLVKLNREDLLRKQRTFDNGSIPHQIHLGELHAILRRQEDFYPFLKDNREKIEKILTFRIPYYVGPLARGNSRFAWMTRKSEETITPWNFEEVVDKGASAQSFIERMTNFDKNLPNEKVLPKHSLLYEYFTVYNELTKVKYVTEGMRKPAFLSGEQKKAIVDLLFKTNRKVTVKQLKEDYFKKIECFDSVEISGVEDRFNASLGTYHDLLKIIKDKDFLDNEENEDILEDIVLTLTLFEDREMIEERLKTYAHLFDDKVMKQLKRRRYTGWGRLSRKLINGIRDKQSGKTILDFLKSDGFANRNFMQLIHDDSLTFKEDIQKAQVSGQGDSLHEHIANLAGSPAIKKGILQTVKVVDELVKVMGRHKPENIVIEMARENQTTQKGQKNSRERMKRIEEGIKELGSQILKEHPVENTQLQNEKLYLYYLQNGRDMYVDQELDINRLSDYDVDHIVPQSFLKDDSIDNKVLTRSDKARGKSDNVPSEEVVKKMKNYWRQLLNAKLITQRKFDNLTKAERGGLSELDKAGFIKRQLVETRQITKHVAQILDSRMNTKYDENDKLIREVKVITLKSKLVSDFRKDFQFYKVREINNYHHAHDAYLNAVVGTALIKKYPKLESEFVYGDYKVYDVRKMIAKSEQEIGKATAKYFFYSNIMNFFKTEITLANGEIRKRPLIETNGETGEIVWDKGRDFATVRKVLSMPQVNIVKKTEVQTGGFSKESILPKRNSDKLIARKKDWDPKKYGGFDSPTVAYSVLVVAKVEKGKSKKLKSVKELLGITIMERSSFEKNPIDFLEAKGYKEVKKDLIIKLPKYSLFELENGRKRMLASAGELQKGNELALPSKYVNFLYLASHYEKLKGSPEDNEQKQLFVEQHKHYLDEIIEQISEFSKRVILADANLDKVLSAYNKHRDKPIREQAENIIHLFTLTNLGAPAAFKYFDTTIDRKRYTSTKEVLDATLIHQSITGLYETRIDLSQLGGDGGEAAAKGSSGGTLNIEDEHRLHETSKEPDVSLGSTWLSDFPQAWAETGGMGLAVRQAPLIIPLKATSTPVSIKQYPMSQEARLGIKPHIQRLLDQGILVPCQSPWNTPLLPVKKPGTNDYRPVQDLREVNKRVEDIHPTVPNPYNLLSGLPPSHQWYTVLDLKDAFFCLRLHPTSQPLFAFEWRDPEMGISGQLTWTRLPQGFKNSPTLFNEALHRDLADFRIQHPDLILLQYVDDLLLAATSELDCQQGTRALLQTLGNLGYRASAKKAQICQKQVKYLGYLLKEGQRWLTEARKETVMGQPTPKTPRQLREFLGKAGFCRLFIPGFAEMAAPLYPLTKPGTLFNWGPDQQKAYQEIKQALLTAPALGLPDLTKPFELFVDEKQGYAKGVLTQKLGPWRRPVAYLSKKLDPVAAGWPPCLRMVAAIAVLTKDAGKLTMGQPLVILAPHAVEALVKQPPDRWLSNARMTHYQALLLDTDRVQFGPVVALNPATLLPLPEEGLQHNCLDILAEAHGTRPDLTDQPLPDADHTWYTDGSSLLQEGQRKAGAAVTTETEVIWAKALPAGTSAQRAELIALTQALKMAEGKKLNVYTDSRYAFATAHIHGEIYRRRGWLTSEGKEIKNKDEILALLKALFLPKRLSIIHCPGHQKGHSAEARGNRMADQAARKAAITETPDTSTLLAGKRTADGSEFEKRTADGSEFESPKKKAKVE

SEQ ID NO: 2822 - protein, 2096 aa, synthetic construct
MPAAKRVKLDGGDKKYSIGLDIGTNSVGWAVITDEYKVPSKKFKVLGNTDRHSIKKNLIGALLFDSGETAEATRLKRTARRRYTRRKNRICYLQEIFSNEMAKVDDSFFHRLEESFLVEEDKKHERHPIFGNIVDEVAYHEKYPTIYHLRKKLVDSTDKADLRLIYLALAHMIKFRGHFLIEGDLNPDNSDVDKLFIQLVQTYNQLFEENPINASGVDAKAILSARLSKSRRLENLIAQLPGEKKNGLFGNLIALSLGLTPNFKSNFDLAEDAKLQLSKDTYDDDLDNLLAQIGDQYADLFLAAKNLSDAILLSDILRVNTEITKAPLSASMIKRYDEHHQDLTLLKALVRQQLPEKYKEIFFDQSKNGYAGYIDGGASQEEFYKFIKPILEKMDGTEELLVKLNREDLLRKQRTFDNGSIPHQIHLGELHAILRRQEDFYPFLKDNREKIEKILTFRIPYYVGPLARGNSRFAWMTRKSEETITPWNFEEVVDKGASAQSFIERMTNFDKNLPNEKVLPKHSLLYEYFTVYNELTKVKYVTEGMRKPAFLSGEQKKAIVDLLFKTNRKVTVKQLKEDYFKKIECFDSVEISGVEDRFNASLGTYHDLLKIIKDKDFLDNEENEDILEDIVLTLTLFEDREMIEERLKTYAHLFDDKVMKQLKRRRYTGWGRLSRKLINGIRDKQSGKTILDFLKSDGFANRNFMQLIHDDSLTFKEDIQKAQVSGQGDSLHEHIANLAGSPAIKKGILQTVKVVDELVKVMGRHKPENIVIEMARENQTTQKGQKNSRERMKRIEEGIKELGSQILKEHPVENTQLQNEKLYLYYLQNGRDMYVDQELDINRLSDYDVDHIVPQSFLKDDSIDNKVLTRSDKARGKSDNVPSEEVVKKMKNYWRQLLNAKLITQRKFDNLTKAERGGLSELDKAGFIKRQLVETRQITKHVAQILDSRMNTKYDENDKLIREVKVITLKSKLVSDFRKDFQFYKVREINNYHHAHDAYLNAVVGTALIKKYPKLESEFVYGDYKVYDVRKMIAKSEQEIGKATAKYFFYSNIMNFFKTEITLANGEIRKRPLIETNGETGEIVWDKGRDFATVRKVLSMPQVNIVKKTEVQTGGFSKESILPKRNSDKLIARKKDWDPKKYGGFDSPTVAYSVLVVAKVEKGKSKKLKSVKELLGITIMERSSFEKNPIDFLEAKGYKEVKKDLIIKLPKYSLFELENGRKRMLASAGELQKGNELALPSKYVNFLYLASHYEKLKGSPEDNEQKQLFVEQHKHYLDEIIEQISEFSKRVILADANLDKVLSAYNKHRDKPIREQAENIIHLFTLTNLGAPAAFKYFDTTIDRKRYTSTKEVLDATLIHQSITGLYETRIDLSQLGGDGGPAPGGGEAAAKGGTLNIEDEHRLHETSKEPDVSLGSTWLSDFPQAWAETGGMGLAVRQAPLIIPLKATSTPVSIKQYPMSQEARLGIKPHIQRLLDQGILVPCQSPWNTPLLPVKKPGTNDYRPVQDLREVNKRVEDIHPTVPNPYNLLSGLPPSHQWYTVLDLKDAFFCLRLHPTSQPLFAFEWRDPEMGISGQLTWTRLPQGFKNSPTLFNEALHRDLADFRIQHPDLILLQYVDDLLLAATSELDCQQGTRALLQTLGNLGYRASAKKAQICQKQVKYLGYLLKEGQRWLTEARKETVMGQPTPKTPRQLREFLGKAGFCRLFIPGFAEMAAPLYPLTKPGTLFNWGPDQQKAYQEIKQALLTAPALGLPDLTKPFELFVDEKQGYAKGVLTQKLGPWRRPVAYLSKKLDPVAAGWPPCLRMVAAIAVLTKDAGKLTMGQPLVILAPHAVEALVKQPPDRWLSNARMTHYQALLLDTDRVQFGPVVALNPATLLPLPEEGLQHNCLDILAEAHGTRPDLTDQPLPDADHTWYTDGSSLLQEGQRKAGAAVTTETEVIWAKALPAGTSAQRAELIALTQALKMAEGKKLNVYTDSRYAFATAHIHGEIYRRRGWLTSEGKEIKNKDEILALLKALFLPKRLSIIHCPGHQKGHSAEARGNRMADQAARKAAITETPDTSTLLAGKRTADGSEFEKRTADGSEFESPKKKAKVE

SEQ ID NO: 2823 - protein, 2090 aa, synthetic construct
MPAAKRVKLDGGDKKYSIGLDIGTNSVGWAVITDEYKVPSKKFKVLGNTDRHSIKKNLIGALLFDSGETAEATRLKRTARRRYTRRKNRICYLQEIFSNEMAKVDDSFFHRLEESFLVEEDKKHERHPIFGNIVDEVAYHEKYPTIYHLRKKLVDSTDKADLRLIYLALAHMIKFRGHFLIEGDLNPDNSDVDKLFIQLVQTYNQLFEENPINASGVDAKAILSARLSKSRRLENLIAQLPGEKKNGLFGNLIALSLGLTPNFKSNFDLAEDAKLQLSKDTYDDDLDNLLAQIGDQYADLFLAAKNLSDAILLSDILRVNTEITKAPLSASMIKRYDEHHQDLTLLKALVRQQLPEKYKEIFFDQSKNGYAGYIDGGASQEEFYKFIKPILEKMDGTEELLVKLNREDLLRKQRTFDNGSIPHQIHLGELHAILRRQEDFYPFLKDNREKIEKILTFRIPYYVGPLARGNSRFAWMTRKSEETITPWNFEEVVDKGASAQSFIERMTNFDKNLPNEKVLPKHSLLYEYFTVYNELTKVKYVTEGMRKPAFLSGEQKKAIVDLLFKTNRKVTVKQLKEDYFKKIECFDSVEISGVEDRFNASLGTYHDLLKIIKDKDFLDNEENEDILEDIVLTLTLFEDREMIEERLKTYAHLFDDKVMKQLKRRRYTGWGRLSRKLINGIRDKQSGKTILDFLKSDGFANRNFMQLIHDDSLTFKEDIQKAQVSGQGDSLHEHIANLAGSPAIKKGILQTVKVVDELVKVMGRHKPENIVIEMARENQTTQKGQKNSRERMKRIEEGIKELGSQILKEHPVENTQLQNEKLYLYYLQNGRDMYVDQELDINRLSDYDVDHIVPQSFLKDDSIDNKVLTRSDKARGKSDNVPSEEVVKKMKNYWRQLLNAKLITQRKFDNLTKAERGGLSELDKAGFIKRQLVETRQITKHVAQILDSRMNTKYDENDKLIREVKVITLKSKLVSDFRKDFQFYKVREINNYHHAHDAYLNAVVGTALIKKYPKLESEFVYGDYKVYDVRKMIAKSEQEIGKATAKYFFYSNIMNFFKTEITLANGEIRKRPLIETNGETGEIVWDKGRDFATVRKVLSMPQVNIVKKTEVQTGGFSKESILPKRNSDKLIARKKDWDPKKYGGFDSPTVAYSVLVVAKVEKGKSKKLKSVKELLGITIMERSSFEKNPIDFLEAKGYKEVKKDLIIKLPKYSLFELENGRKRMLASAGELQKGNELALPSKYVNFLYLASHYEKLKGSPEDNEQKQLFVEQHKHYLDEIIEQISEFSKRVILADANLDKVLSAYNKHRDKPIREQAENIIHLFTLTNLGAPAAFKYFDTTIDRKRYTSTKEVLDATLIHQSITGLYETRIDLSQLGGDGGEAAAKGGTLNIEDEHRLHETSKEPDVSLGSTWLSDFPQAWAETGGMGLAVRQAPLIIPLKATSTPVSIKQYPMSQEARLGIKPHIQRLLDQGILVPCQSPWNTPLLPVKKPGTNDYRPVQDLREVNKRVEDIHPTVPNPYNLLSGLPPSHQWYTVLDLKDAFFCLRLHPTSQPLFAFEWRDPEMGISGQLTWTRLPQGFKNSPTLFNEALHRDLADFRIQHPDLILLQYVDDLLLAATSELDCQQGTRALLQTLGNLGYRASAKKAQICQKQVKYLGYLLKEGQRWLTEARKETVMGQPTPKTPRQLREFLGKAGFCRLFIPGFAEMAAPLYPLTKPGTLFNWGPDQQKAYQEIKQALLTAPALGLPDLTKPFELFVDEKQGYAKGVLTQKLGPWRRPVAYLSKKLDPVAAGWPPCLRMVAAIAVLTKDAGKLTMGQPLVILAPHAVEALVKQPPDRWLSNARMTHYQALLLDTDRVQFGPVVALNPATLLPLPEEGLQHNCLDILAEAHGTRPDLTDQPLPDADHTWYTDGSSLLQEGQRKAGAAVTTETEVIWAKALPAGTSAQRAELIALTQALKMAEGKKLNVYTDSRYAFATAHIHGEIYRRRGWLTSEGKEIKNKDEILALLKALFLPKRLSIIHCPGHQKGHSAEARGNRMADQAARKAAITETPDTSTLLAGKRTADGSEFEKRTADGSEFESPKKKAKVE

SEQ ID NO: 2824 - protein, 2088 aa, synthetic construct
MPAAKRVKLDGGDKKYSIGLDIGTNSVGWAVITDEYKVPSKKFKVLGNTDRHSIKKNLIGALLFDSGETAEATRLKRTARRRYTRRKNRICYLQEIFSNEMAKVDDSFFHRLEESFLVEEDKKHERHPIFGNIVDEVAYHEKYPTIYHLRKKLVDSTDKADLRLIYLALAHMIKFRGHFLIEGDLNPDNSDVDKLFIQLVQTYNQLFEENPINASGVDAKAILSARLSKSRRLENLIAQLPGEKKNGLFGNLIALSLGLTPNFKSNFDLAEDAKLQLSKDTYDDDLDNLLAQIGDQYADLFLAAKNLSDAILLSDILRVNTEITKAPLSASMIKRYDEHHQDLTLLKALVRQQLPEKYKEIFFDQSKNGYAGYIDGGASQEEFYKFIKPILEKMDGTEELLVKLNREDLLRKQRTFDNGSIPHQIHLGELHAILRRQEDFYPFLKDNREKIEKILTFRIPYYVGPLARGNSRFAWMTRKSEETITPWNFEEVVDKGASAQSFIERMTNFDKNLPNEKVLPKHSLLYEYFTVYNELTKVKYVTEGMRKPAFLSGEQKKAIVDLLFKTNRKVTVKQLKEDYFKKIECFDSVEISGVEDRFNASLGTYHDLLKIIKDKDFLDNEENEDILEDIVLTLTLFEDREMIEERLKTYAHLFDDKVMKQLKRRRYTGWGRLSRKLINGIRDKQSGKTILDFLKSDGFANRNFMQLIHDDSLTFKEDIQKAQVSGQGDSLHEHIANLAGSPAIKKGILQTVKVVDELVKVMGRHKPENIVIEMARENQTTQKGQKNSRERMKRIEEGIKELGSQILKEHPVENTQLQNEKLYLYYLQNGRDMYVDQELDINRLSDYDVDHIVPQSFLKDDSIDNKVLTRSDKARGKSDNVPSEEVVKKMKNYWRQLLNAKLITQRKFDNLTKAERGGLSELDKAGFIKRQLVETRQITKHVAQILDSRMNTKYDENDKLIREVKVITLKSKLVSDFRKDFQFYKVREINNYHHAHDAYLNAVVGTALIKKYPKLESEFVYGDYKVYDVRKMIAKSEQEIGKATAKYFFYSNIMNFFKTEITLANGEIRKRPLIETNGETGEIVWDKGRDFATVRKVLSMPQVNIVKKTEVQTGGFSKESILPKRNSDKLIARKKDWDPKKYGGFDSPTVAYSVLVVAKVEKGKSKKLKSVKELLGITIMERSSFEKNPIDFLEAKGYKEVKKDLIIKLPKYSLFELENGRKRMLASAGELQKGNELALPSKYVNFLYLASHYEKLKGSPEDNEQKQLFVEQHKHYLDEIIEQISEFSKRVILADANLDKVLSAYNKHRDKPIREQAENIIHLFTLTNLGAPAAFKYFDTTIDRKRYTSTKEVLDATLIHQSITGLYETRIDLSQLGGDGGGGGGGTLNIEDEHRLHETSKEPDVSLGSTWLSDFPQAWAETGGMGLAVRQAPLIIPLKATSTPVSIKQYPMSQEARLGIKPHIQRLLDQGILVPCQSPWNTPLLPVKKPGTNDYRPVQDLREVNKRVEDIHPTVPNPYNLLSGLPPSHQWYTVLDLKDAFFCLRLHPTSQPLFAFEWRDPEMGISGQLTWTRLPQGFKNSPTLFNEALHRDLADFRIQHPDLILLQYVDDLLLAATSELDCQQGTRALLQTLGNLGYRASAKKAQICQKQVKYLGYLLKEGQRWLTEARKETVMGQPTPKTPRQLREFLGKAGFCRLFIPGFAEMAAPLYPLTKPGTLFNWGPDQQKAYQEIKQALLTAPALGLPDLTKPFELFVDEKQGYAKGVLTQKLGPWRRPVAYLSKKLDPVAAGWPPCLRMVAAIAVLTKDAGKLTMGQPLVILAPHAVEALVKQPPDRWLSNARMTHYQALLLDTDRVQFGPVVALNPATLLPLPEEGLQHNCLDILAEAHGTRPDLTDQPLPDADHTWYTDGSSLLQEGQRKAGAAVTTETEVIWAKALPAGTSAQRAELIALTQALKMAEGKKLNVYTDSRYAFATAHIHGEIYRRRGWLTSEGKEIKNKDEILALLKALFLPKRLSIIHCPGHQKGHSAEARGNRMADQAARKAAITETPDTSTLLAGKRTADGSEFEKRTADGSEFESPKKKAKVE

SEQ ID NO: 2825 - protein, 2090 aa, synthetic construct
MPAAKRVKLDGGDKKYSIGLDIGTNSVGWAVITDEYKVPSKKFKVLGNTDRHSIKKNLIGALLFDSGETAEATRLKRTARRRYTRRKNRICYLQEIFSNEMAKVDDSFFHRLEESFLVEEDKKHERHPIFGNIVDEVAYHEKYPTIYHLRKKLVDSTDKADLRLIYLALAHMIKFRGHFLIEGDLNPDNSDVDKLFIQLVQTYNQLFEENPINASGVDAKAILSARLSKSRRLENLIAQLPGEKKNGLFGNLIALSLGLTPNFKSNFDLAEDAKLQLSKDTYDDDLDNLLAQIGDQYADLFLAAKNLSDAILLSDILRVNTEITKAPLSASMIKRYDEHHQDLTLLKALVRQQLPEKYKEIFFDQSKNGYAGYIDGGASQEEFYKFIKPILEKMDGTEELLVKLNREDLLRKQRTFDNGSIPHQIHLGELHAILRRQEDFYPFLKDNREKIEKILTFRIPYYVGPLARGNSRFAWMTRKSEETITPWNFEEVVDKGASAQSFIERMTNFDKNLPNEKVLPKHSLLYEYFTVYNELTKVKYVTEGMRKPAFLSGEQKKAIVDLLFKTNRKVTVKQLKEDYFKKIECFDSVEISGVEDRFNASLGTYHDLLKIIKDKDFLDNEENEDILEDIVLTLTLFEDREMIEERLKTYAHLFDDKVMKQLKRRRYTGWGRLSRKLINGIRDKQSGKTILDFLKSDGFANRNFMQLIHDDSLTFKEDIQKAQVSGQGDSLHEHIANLAGSPAIKKGILQTVKVVDELVKVMGRHKPENIVIEMARENQTTQKGQKNSRERMKRIEEGIKELGSQILKEHPVENTQLQNEKLYLYYLQNGRDMYVDQELDINRLSDYDVDHIVPQSFLKDDSIDNKVLTRSDKARGKSDNVPSEEVVKKMKNYWRQLLNAKLITQRKFDNLTKAERGGLSELDKAGFIKRQLVETRQITKHVAQILDSRMNTKYDENDKLIREVKVITLKSKLVSDFRKDFQFYKVREINNYHHAHDAYLNAVVGTALIKKYPKLESEFVYGDYKVYDVRKMIAKSEQEIGKATAKYFFYSNIMNFFKTEITLANGEIRKRPLIETNGETGEIVWDKGRDFATVRKVLSMPQVNIVKKTEVQTGGFSKESILPKRNSDKLIARKKDWDPKKYGGFDSPTVAYSVLVVAKVEKGKSKKLKSVKELLGITIMERSSFEKNPIDFLEAKGYKEVKKDLIIKLPKYSLFELENGRKRMLASAGELQKGNELALPSKYVNFLYLASHYEKLKGSPEDNEQKQLFVEQHKHYLDEIIEQISEFSKRVILADANLDKVLSAYNKHRDKPIREQAENIIHLFTLTNLGAPAAFKYFDTTIDRKRYTSTKEVLDATLIHQSITGLYETRIDLSQLGGDGGGGGGSGGTLNIEDEHRLHETSKEPDVSLGSTWLSDFPQAWAETGGMGLAVRQAPLIIPLKATSTPVSIKQYPMSQEARLGIKPHIQRLLDQGILVPCQSPWNTPLLPVKKPGTNDYRPVQDLREVNKRVEDIHPTVPNPYNLLSGLPPSHQWYTVLDLKDAFFCLRLHPTSQPLFAFEWRDPEMGISGQLTWTRLPQGFKNSPTLFNEALHRDLADFRIQHPDLILLQYVDDLLLAATSELDCQQGTRALLQTLGNLGYRASAKKAQICQKQVKYLGYLLKEGQRWLTEARKETVMGQPTPKTPRQLREFLGKAGFCRLFIPGFAEMAAPLYPLTKPGTLFNWGPDQQKAYQEIKQALLTAPALGLPDLTKPFELFVDEKQGYAKGVLTQKLGPWRRPVAYLSKKLDPVAAGWPPCLRMVAAIAVLTKDAGKLTMGQPLVILAPHAVEALVKQPPDRWLSNARMTHYQALLLDTDRVQFGPVVALNPATLLPLPEEGLQHNCLDILAEAHGTRPDLTDQPLPDADHTWYTDGSSLLQEGQRKAGAAVTTETEVIWAKALPAGTSAQRAELIALTQALKMAEGKKLNVYTDSRYAFATAHIHGEIYRRRGWLTSEGKEIKNKDEILALLKALFLPKRLSIIHCPGHQKGHSAEARGNRMADQAARKAAITETPDTSTLLAGKRTADGSEFEKRTADGSEFESPKKKAKVE

SEQ ID NO: 2826 - protein, 2096 aa, synthetic construct
MPAAKRVKLDGGDKKYSIGLDIGTNSVGWAVITDEYKVPSKKFKVLGNTDRHSIKKNLIGALLFDSGETAEATRLKRTARRRYTRRKNRICYLQEIFSNEMAKVDDSFFHRLEESFLVEEDKKHERHPIFGNIVDEVAYHEKYPTIYHLRKKLVDSTDKADLRLIYLALAHMIKFRGHFLIEGDLNPDNSDVDKLFIQLVQTYNQLFEENPINASGVDAKAILSARLSKSRRLENLIAQLPGEKKNGLFGNLIALSLGLTPNFKSNFDLAEDAKLQLSKDTYDDDLDNLLAQIGDQYADLFLAAKNLSDAILLSDILRVNTEITKAPLSASMIKRYDEHHQDLTLLKALVRQQLPEKYKEIFFDQSKNGYAGYIDGGASQEEFYKFIKPILEKMDGTEELLVKLNREDLLRKQRTFDNGSIPHQIHLGELHAILRRQEDFYPFLKDNREKIEKILTFRIPYYVGPLARGNSRFAWMTRKSEETITPWNFEEVVDKGASAQSFIERMTNFDKNLPNEKVLPKHSLLYEYFTVYNELTKVKYVTEGMRKPAFLSGEQKKAIVDLLFKTNRKVTVKQLKEDYFKKIECFDSVEISGVEDRFNASLGTYHDLLKIIKDKDFLDNEENEDILEDIVLTLTLFEDREMIEERLKTYAHLFDDKVMKQLKRRRYTGWGRLSRKLINGIRDKQSGKTILDFLKSDGFANRNFMQLIHDDSLTFKEDIQKAQVSGQGDSLHEHIANLAGSPAIKKGILQTVKVVDELVKVMGRHKPENIVIEMARENQTTQKGQKNSRERMKRIEEGIKELGSQILKEHPVENTQLQNEKLYLYYLQNGRDMYVDQELDINRLSDYDVDHIVPQSFLKDDSIDNKVLTRSDKARGKSDNVPSEEVVKKMKNYWRQLLNAKLITQRKFDNLTKAERGGLSELDKAGFIKRQLVETRQITKHVAQILDSRMNTKYDENDKLIREVKVITLKSKLVSDFRKDFQFYKVREINNYHHAHDAYLNAVVGTALIKKYPKLESEFVYGDYKVYDVRKMIAKSEQEIGKATAKYFFYSNIMNFFKTEITLANGEIRKRPLIETNGETGEIVWDKGRDFATVRKVLSMPQVNIVKKTEVQTGGFSKESILPKRNSDKLIARKKDWDPKKYGGFDSPTVAYSVLVVAKVEKGKSKKLKSVKELLGITIMERSSFEKNPIDFLEAKGYKEVKKDLIIKLPKYSLFELENGRKRMLASAGELQKGNELALPSKYVNFLYLASHYEKLKGSPEDNEQKQLFVEQHKHYLDEIIEQISEFSKRVILADANLDKVLSAYNKHRDKPIREQAENIIHLFTLTNLGAPAAFKYFDTTIDRKRYTSTKEVLDATLIHQSITGLYETRIDLSQLGGDGGGGSEAAAKGSSGGTLNIEDEHRLHETSKEPDVSLGSTWLSDFPQAWAETGGMGLAVRQAPLIIPLKATSTPVSIKQYPMSQEARLGIKPHIQRLLDQGILVPCQSPWNTPLLPVKKPGTNDYRPVQDLREVNKRVEDIHPTVPNPYNLLSGLPPSHQWYTVLDLKDAFFCLRLHPTSQPLFAFEWRDPEMGISGQLTWTRLPQGFKNSPTLFNEALHRDLADFRIQHPDLILLQYVDDLLLAATSELDCQQGTRALLQTLGNLGYRASAKKAQICQKQVKYLGYLLKEGQRWLTEARKETVMGQPTPKTPRQLREFLGKAGFCRLFIPGFAEMAAPLYPLTKPGTLFNWGPDQQKAYQEIKQALLTAPALGLPDLTKPFELFVDEKQGYAKGVLTQKLGPWRRPVAYLSKKLDPVAAGWPPCLRMVAAIAVLTKDAGKLTMGQPLVILAPHAVEALVKQPPDRWLSNARMTHYQALLLDTDRVQFGPVVALNPATLLPLPEEGLQHNCLDILAEAHGTRPDLTDQPLPDADHTWYTDGSSLLQEGQRKAGAAVTTETEVIWAKALPAGTSAQRAELIALTQALKMAEGKKLNVYTDSRYAFATAHIHGEIYRRRGWLTSEGKEIKNKDEILALLKALFLPKRLSIIHCPGHQKGHSAEARGNRMADQAARKAAITETPDTSTLLAGKRTADGSEFEKRTADGSEFESPKKKAKVE

SEQ ID NO: 2827 - protein, 2115 aa, synthetic construct
MPAAKRVKLDGGDKKYSIGLDIGTNSVGWAVITDEYKVPSKKFKVLGNTDRHSIKKNLIGALLFDSGETAEATRLKRTARRRYTRRKNRICYLQEIFSNEMAKVDDSFFHRLEESFLVEEDKKHERHPIFGNIVDEVAYHEKYPTIYHLRKKLVDSTDKADLRLIYLALAHMIKFRGHFLIEGDLNPDNSDVDKLFIQLVQTYNQLFEENPINASGVDAKAILSARLSKSRRLENLIAQLPGEKKNGLFGNLIALSLGLTPNFKSNFDLAEDAKLQLSKDTYDDDLDNLLAQIGDQYADLFLAAKNLSDAILLSDILRVNTEITKAPLSASMIKRYDEHHQDLTLLKALVRQQLPEKYKEIFFDQSKNGYAGYIDGGASQEEFYKFIKPILEKMDGTEELLVKLNREDLLRKQRTFDNGSIPHQIHLGELHAILRRQEDFYPFLKDNREKIEKILTFRIPYYVGPLARGNSRFAWMTRKSEETITPWNFEEVVDKGASAQSFIERMTNFDKNLPNEKVLPKHSLLYEYFTVYNELTKVKYVTEGMRKPAFLSGEQKKAIVDLLFKTNRKVTVKQLKEDYFKKIECFDSVEISGVEDRFNASLGTYHDLLKIIKDKDFLDNEENEDILEDIVLTLTLFEDREMIEERLKTYAHLFDDKVMKQLKRRRYTGWGRLSRKLINGIRDKQSGKTILDFLKSDGFANRNFMQLIHDDSLTFKEDIQKAQVSGQGDSLHEHIANLAGSPAIKKGILQTVKVVDELVKVMGRHKPENIVIEMARENQTTQKGQKNSRERMKRIEEGIKELGSQILKEHPVENTQLQNEKLYLYYLQNGRDMYVDQELDINRLSDYDVDHIVPQSFLKDDSIDNKVLTRSDKARGKSDNVPSEEVVKKMKNYWRQLLNAKLITQRKFDNLTKAERGGLSELDKAGFIKRQLVETRQITKHVAQILDSRMNTKYDENDKLIREVKVITLKSKLVSDFRKDFQFYKVREINNYHHAHDAYLNAVVGTALIKKYPKLESEFVYGDYKVYDVRKMIAKSEQEIGKATAKYFFYSNIMNFFKTEITLANGEIRKRPLIETNGETGEIVWDKGRDFATVRKVLSMPQVNIVKKTEVQTGGFSKESILPKRNSDKLIARKKDWDPKKYGGFDSPTVAYSVLVVAKVEKGKSKKLKSVKELLGITIMERSSFEKNPIDFLEAKGYKEVKKDLIIKLPKYSLFELENGRKRMLASAGELQKGNELALPSKYVNFLYLASHYEKLKGSPEDNEQKQLFVEQHKHYLDEIIEQISEFSKRVILADANLDKVLSAYNKHRDKPIREQAENIIHLFTLTNLGAPAAFKYFDTTIDRKRYTSTKEVLDATLIHQSITGLYETRIDLSQLGGDGGGGGGSGGGGSGGGGSGGGGSGGGGSGGGGSGGTLNIEDEHRLHETSKEPDVSLGSTWLSDFPQAWAETGGMGLAVRQAPLIIPLKATSTPVSIKQYPMSQEARLGIKPHIQRLLDQGILVPCQSPWNTPLLPVKKPGTNDYRPVQDLREVNKRVEDIHPTVPNPYNLLSGLPPSHQWYTVLDLKDAFFCLRLHPTSQPLFAFEWRDPEMGISGQLTWTRLPQGFKNSPTLFNEALHRDLADFRIQHPDLILLQYVDDLLLAATSELDCQQGTRALLQTLGNLGYRASAKKAQICQKQVKYLGYLLKEGQRWLTEARKETVMGQPTPKTPRQLREFLGKAGFCRLFIPGFAEMAAPLYPLTKPGTLFNWGPDQQKAYQEIKQALLTAPALGLPDLTKPFELFVDEKQGYAKGVLTQKLGPWRRPVAYLSKKLDPVAAGWPPCLRMVAAIAVLTKDAGKLTMGQPLVILAPHAVEALVKQPPDRWLSNARMTHYQALLLDTDRVQFGPVVALNPATLLPLPEEGLQHNCLDILAEAHGTRPDLTDQPLPDADHTWYTDGSSLLQEGQRKAGAAVTTETEVIWAKALPAGTSAQRAELIALTQALKMAEGKKLNVYTDSRYAFATAHIHGEIYRRRGWLTSEGKEIKNKDEILALLKALFLPKRLSIIHCPGHQKGHSAEARGNRMADQAARKAAITETPDTSTLLAGKRTADGSEFEKRTADGSEFESPKKKAKVE

SEQ ID NO: 2828 - protein, 2093 aa, synthetic construct
MPAAKRVKLDGGDKKYSIGLDIGTNSVGWAVITDEYKVPSKKFKVLGNTDRHSIKKNLIGALLFDSGETAEATRLKRTARRRYTRRKNRICYLQEIFSNEMAKVDDSFFHRLEESFLVEEDKKHERHPIFGNIVDEVAYHEKYPTIYHLRKKLVDSTDKADLRLIYLALAHMIKFRGHFLIEGDLNPDNSDVDKLFIQLVQTYNQLFEENPINASGVDAKAILSARLSKSRRLENLIAQLPGEKKNGLFGNLIALSLGLTPNFKSNFDLAEDAKLQLSKDTYDDDLDNLLAQIGDQYADLFLAAKNLSDAILLSDILRVNTEITKAPLSASMIKRYDEHHQDLTLLKALVRQQLPEKYKEIFFDQSKNGYAGYIDGGASQEEFYKFIKPILEKMDGTEELLVKLNREDLLRKQRTFDNGSIPHQIHLGELHAILRRQEDFYPFLKDNREKIEKILTFRIPYYVGPLARGNSRFAWMTRKSEETITPWNFEEVVDKGASAQSFIERMTNFDKNLPNEKVLPKHSLLYEYFTVYNELTKVKYVTEGMRKPAFLSGEQKKAIVDLLFKTNRKVTVKQLKEDYFKKIECFDSVEISGVEDRFNASLGTYHDLLKIIKDKDFLDNEENEDILEDIVLTLTLFEDREMIEERLKTYAHLFDDKVMKQLKRRRYTGWGRLSRKLINGIRDKQSGKTILDFLKSDGFANRNFMQLIHDDSLTFKEDIQKAQVSGQGDSLHEHIANLAGSPAIKKGILQTVKVVDELVKVMGRHKPENIVIEMARENQTTQKGQKNSRERMKRIEEGIKELGSQILKEHPVENTQLQNEKLYLYYLQNGRDMYVDQELDINRLSDYDVDHIVPQSFLKDDSIDNKVLTRSDKARGKSDNVPSEEVVKKMKNYWRQLLNAKLITQRKFDNLTKAERGGLSELDKAGFIKRQLVETRQITKHVAQILDSRMNTKYDENDKLIREVKVITLKSKLVSDFRKDFQFYKVREINNYHHAHDAYLNAVVGTALIKKYPKLESEFVYGDYKVYDVRKMIAKSEQEIGKATAKYFFYSNIMNFFKTEITLANGEIRKRPLIETNGETGEIVWDKGRDFATVRKVLSMPQVNIVKKTEVQTGGFSKESILPKRNSDKLIARKKDWDPKKYGGFDSPTVAYSVLVVAKVEKGKSKKLKSVKELLGITIMERSSFEKNPIDFLEAKGYKEVKKDLIIKLPKYSLFELENGRKRMLASAGELQKGNELALPSKYVNFLYLASHYEKLKGSPEDNEQKQLFVEQHKHYLDEIIEQISEFSKRVILADANLDKVLSAYNKHRDKPIREQAENIIHLFTLTNLGAPAAFKYFDTTIDRKRYTSTKEVLDATLIHQSITGLYETRIDLSQLGGDGGGSSEAAAKGGTLNIEDEHRLHETSKEPDVSLGSTWLSDFPQAWAETGGMGLAVRQAPLIIPLKATSTPVSIKQYPMSQEARLGIKPHIQRLLDQGILVPCQSPWNTPLLPVKKPGTNDYRPVQDLREVNKRVEDIHPTVPNPYNLLSGLPPSHQWYTVLDLKDAFFCLRLHPTSQPLFAFEWRDPEMGISGQLTWTRLPQGFKNSPTLFNEALHRDLADFRIQHPDLILLQYVDDLLLAATSELDCQQGTRALLQTLGNLGYRASAKKAQICQKQVKYLGYLLKEGQRWLTEARKETVMGQPTPKTPRQLREFLGKAGFCRLFIPGFAEMAAPLYPLTKPGTLFNWGPDQQKAYQEIKQALLTAPALGLPDLTKPFELFVDEKQGYAKGVLTQKLGPWRRPVAYLSKKLDPVAAGWPPCLRMVAAIAVLTKDAGKLTMGQPLVILAPHAVEALVKQPPDRWLSNARMTHYQALLLDTDRVQFGPVVALNPATLLPLPEEGLQHNCLDILAEAHGTRPDLTDQPLPDADHTWYTDGSSLLQEGQRKAGAAVTTETEVIWAKALPAGTSAQRAELIALTQALKMAEGKKLNVYTDSRYAFATAHIHGEIYRRRGWLTSEGKEIKNKDEILALLKALFLPKRLSIIHCPGHQKGHSAEARGNRMADQAARKAAITETPDTSTLLAGKRTADGSEFEKRTADGSEFESPKKKAKVE

SEQ ID NO: 2829 - protein, 2096 aa, synthetic construct
MPAAKRVKLDGGDKKYSIGLDIGTNSVGWAVITDEYKVPSKKFKVLGNTDRHSIKKNLIGALLFDSGETAEATRLKRTARRRYTRRKNRICYLQEIFSNEMAKVDDSFFHRLEESFLVEEDKKHERHPIFGNIVDEVAYHEKYPTIYHLRKKLVDSTDKADLRLIYLALAHMIKFRGHFLIEGDLNPDNSDVDKLFIQLVQTYNQLFEENPINASGVDAKAILSARLSKSRRLENLIAQLPGEKKNGLFGNLIALSLGLTPNFKSNFDLAEDAKLQLSKDTYDDDLDNLLAQIGDQYADLFLAAKNLSDAILLSDILRVNTEITKAPLSASMIKRYDEHHQDLTLLKALVRQQLPEKYKEIFFDQSKNGYAGYIDGGASQEEFYKFIKPILEKMDGTEELLVKLNREDLLRKQRTFDNGSIPHQIHLGELHAILRRQEDFYPFLKDNREKIEKILTFRIPYYVGPLARGNSRFAWMTRKSEETITPWNFEEVVDKGASAQSFIERMTNFDKNLPNEKVLPKHSLLYEYFTVYNELTKVKYVTEGMRKPAFLSGEQKKAIVDLLFKTNRKVTVKQLKEDYFKKIECFDSVEISGVEDRFNASLGTYHDLLKIIKDKDFLDNEENEDILEDIVLTLTLFEDREMIEERLKTYAHLFDDKVMKQLKRRRYTGWGRLSRKLINGIRDKQSGKTILDFLKSDGFANRNFMQLIHDDSLTFKEDIQKAQVSGQGDSLHEHIANLAGSPAIKKGILQTVKVVDELVKVMGRHKPENIVIEMARENQTTQKGQKNSRERMKRIEEGIKELGSQILKEHPVENTQLQNEKLYLYYLQNGRDMYVDQELDINRLSDYDVDHIVPQSFLKDDSIDNKVLTRSDKARGKSDNVPSEEVVKKMKNYWRQLLNAKLITQRKFDNLTKAERGGLSELDKAGFIKRQLVETRQITKHVAQILDSRMNTKYDENDKLIREVKVITLKSKLVSDFRKDFQFYKVREINNYHHAHDAYLNAVVGTALIKKYPKLESEFVYGDYKVYDVRKMIAKSEQEIGKATAKYFFYSNIMNFFKTEITLANGEIRKRPLIETNGETGEIVWDKGRDFATVRKVLSMPQVNIVKKTEVQTGGFSKESILPKRNSDKLIARKKDWDPKKYGGFDSPTVAYSVLVVAKVEKGKSKKLKSVKELLGITIMERSSFEKNPIDFLEAKGYKEVKKDLIIKLPKYSLFELENGRKRMLASAGELQKGNELALPSKYVNFLYLASHYEKLKGSPEDNEQKQLFVEQHKHYLDEIIEQISEFSKRVILADANLDKVLSAYNKHRDKPIREQAENIIHLFTLTNLGAPAAFKYFDTTIDRKRYTSTKEVLDATLIHQSITGLYETRIDLSQLGGDGGPAPEAAAKGGSGGTLNIEDEHRLHETSKEPDVSLGSTWLSDFPQAWAETGGMGLAVRQAPLIIPLKATSTPVSIKQYPMSQEARLGIKPHIQRLLDQGILVPCQSPWNTPLLPVKKPGTNDYRPVQDLREVNKRVEDIHPTVPNPYNLLSGLPPSHQWYTVLDLKDAFFCLRLHPTSQPLFAFEWRDPEMGISGQLTWTRLPQGFKNSPTLFNEALHRDLADFRIQHPDLILLQYVDDLLLAATSELDCQQGTRALLQTLGNLGYRASAKKAQICQKQVKYLGYLLKEGQRWLTEARKETVMGQPTPKTPRQLREFLGKAGFCRLFIPGFAEMAAPLYPLTKPGTLFNWGPDQQKAYQEIKQALLTAPALGLPDLTKPFELFVDEKQGYAKGVLTQKLGPWRRPVAYLSKKLDPVAAGWPPCLRMVAAIAVLTKDAGKLTMGQPLVILAPHAVEALVKQPPDRWLSNARMTHYQALLLDTDRVQFGPVVALNPATLLPLPEEGLQHNCLDILAEAHGTRPDLTDQPLPDADHTWYTDGSSLLQEGQRKAGAAVTTETEVIWAKALPAGTSAQRAELIALTQALKMAEGKKLNVYTDSRYAFATAHIHGEIYRRRGWLTSEGKEIKNKDEILALLKALFLPKRLSIIHCPGHQKGHSAEARGNRMADQAARKAAITETPDTSTLLAGKRTADGSEFEKRTADGSEFESPKKKAKVE

SEQ ID NO: 2830 - protein, 2096 aa, synthetic construct
MPAAKRVKLDGGDKKYSIGLDIGTNSVGWAVITDEYKVPSKKFKVLGNTDRHSIKKNLIGALLFDSGETAEATRLKRTARRRYTRRKNRICYLQEIFSNEMAKVDDSFFHRLEESFLVEEDKKHERHPIFGNIVDEVAYHEKYPTIYHLRKKLVDSTDKADLRLIYLALAHMIKFRGHFLIEGDLNPDNSDVDKLFIQLVQTYNQLFEENPINASGVDAKAILSARLSKSRRLENLIAQLPGEKKNGLFGNLIALSLGLTPNFKSNFDLAEDAKLQLSKDTYDDDLDNLLAQIGDQYADLFLAAKNLSDAILLSDILRVNTEITKAPLSASMIKRYDEHHQDLTLLKALVRQQLPEKYKEIFFDQSKNGYAGYIDGGASQEEFYKFIKPILEKMDGTEELLVKLNREDLLRKQRTFDNGSIPHQIHLGELHAILRRQEDFYPFLKDNREKIEKILTFRIPYYVGPLARGNSRFAWMTRKSEETITPWNFEEVVDKGASAQSFIERMTNFDKNLPNEKVLPKHSLLYEYFTVYNELTKVKYVTEGMRKPAFLSGEQKKAIVDLLFKTNRKVTVKQLKEDYFKKIECFDSVEISGVEDRFNASLGTYHDLLKIIKDKDFLDNEENEDILEDIVLTLTLFEDREMIEERLKTYAHLFDDKVMKQLKRRRYTGWGRLSRKLINGIRDKQSGKTILDFLKSDGFANRNFMQLIHDDSLTFKEDIQKAQVSGQGDSLHEHIANLAGSPAIKKGILQTVKVVDELVKVMGRHKPENIVIEMARENQTTQKGQKNSRERMKRIEEGIKELGSQILKEHPVENTQLQNEKLYLYYLQNGRDMYVDQELDINRLSDYDVDHIVPQSFLKDDSIDNKVLTRSDKARGKSDNVPSEEVVKKMKNYWRQLLNAKLITQRKFDNLTKAERGGLSELDKAGFIKRQLVETRQITKHVAQILDSRMNTKYDENDKLIREVKVITLKSKLVSDFRKDFQFYKVREINNYHHAHDAYLNAVVGTALIKKYPKLESEFVYGDYKVYDVRKMIAKSEQEIGKATAKYFFYSNIMNFFKTEITLANGEIRKRPLIETNGETGEIVWDKGRDFATVRKVLSMPQVNIVKKTEVQTGGFSKESILPKRNSDKLIARKKDWDPKKYGGFDSPTVAYSVLVVAKVEKGKSKKLKSVKELLGITIMERSSFEKNPIDFLEAKGYKEVKKDLIIKLPKYSLFELENGRKRMLASAGELQKGNELALPSKYVNFLYLASHYEKLKGSPEDNEQKQLFVEQHKHYLDEIIEQISEFSKRVILADANLDKVLSAYNKHRDKPIREQAENIIHLFTLTNLGAPAAFKYFDTTIDRKRYTSTKEVLDATLIHQSITGLYETRIDLSQLGGDGGGGGEAAAKPAPGGTLNIEDEHRLHETSKEPDVSLGSTWLSDFPQAWAETGGMGLAVRQAPLIIPLKATSTPVSIKQYPMSQEARLGIKPHIQRLLDQGILVPCQSPWNTPLLPVKKPGTNDYRPVQDLREVNKRVEDIHPTVPNPYNLLSGLPPSHQWYTVLDLKDAFFCLRLHPTSQPLFAFEWRDPEMGISGQLTWTRLPQGFKNSPTLFNEALHRDLADFRIQHPDLILLQYVDDLLLAATSELDCQQGTRALLQTLGNLGYRASAKKAQICQKQVKYLGYLLKEGQRWLTEARKETVMGQPTPKTPRQLREFLGKAGFCRLFIPGFAEMAAPLYPLTKPGTLFNWGPDQQKAYQEIKQALLTAPALGLPDLTKPFELFVDEKQGYAKGVLTQKLGPWRRPVAYLSKKLDPVAAGWPPCLRMVAAIAVLTKDAGKLTMGQPLVILAPHAVEALVKQPPDRWLSNARMTHYQALLLDTDRVQFGPVVALNPATLLPLPEEGLQHNCLDILAEAHGTRPDLTDQPLPDADHTWYTDGSSLLQEGQRKAGAAVTTETEVIWAKALPAGTSAQRAELIALTQALKMAEGKKLNVYTDSRYAFATAHIHGEIYRRRGWLTSEGKEIKNKDEILALLKALFLPKRLSIIHCPGHQKGHSAEARGNRMADQAARKAAITETPDTSTLLAGKRTADGSEFEKRTADGSEFESPKKKAKVE

SEQ ID NO: 2831 - protein, 2096 aa, synthetic construct
MPAAKRVKLDGGDKKYSIGLDIGTNSVGWAVITDEYKVPSKKFKVLGNTDRHSIKKNLIGALLFDSGETAEATRLKRTARRRYTRRKNRICYLQEIFSNEMAKVDDSFFHRLEESFLVEEDKKHERHPIFGNIVDEVAYHEKYPTIYHLRKKLVDSTDKADLRLIYLALAHMIKFRGHFLIEGDLNPDNSDVDKLFIQLVQTYNQLFEENPINASGVDAKAILSARLSKSRRLENLIAQLPGEKKNGLFGNLIALSLGLTPNFKSNFDLAEDAKLQLSKDTYDDDLDNLLAQIGDQYADLFLAAKNLSDAILLSDILRVNTEITKAPLSASMIKRYDEHHQDLTLLKALVRQQLPEKYKEIFFDQSKNGYAGYIDGGASQEEFYKFIKPILEKMDGTEELLVKLNREDLLRKQRTFDNGSIPHQIHLGELHAILRRQEDFYPFLKDNREKIEKILTFRIPYYVGPLARGNSRFAWMTRKSEETITPWNFEEVVDKGASAQSFIERMTNFDKNLPNEKVLPKHSLLYEYFTVYNELTKVKYVTEGMRKPAFLSGEQKKAIVDLLFKTNRKVTVKQLKEDYFKKIECFDSVEISGVEDRFNASLGTYHDLLKIIKDKDFLDNEENEDILEDIVLTLTLFEDREMIEERLKTYAHLFDDKVMKQLKRRRYTGWGRLSRKLINGIRDKQSGKTILDFLKSDGFANRNFMQLIHDDSLTFKEDIQKAQVSGQGDSLHEHIANLAGSPAIKKGILQTVKVVDELVKVMGRHKPENIVIEMARENQTTQKGQKNSRERMKRIEEGIKELGSQILKEHPVENTQLQNEKLYLYYLQNGRDMYVDQELDINRLSDYDVDHIVPQSFLKDDSIDNKVLTRSDKARGKSDNVPSEEVVKKMKNYWRQLLNAKLITQRKFDNLTKAERGGLSELDKAGFIKRQLVETRQITKHVAQILDSRMNTKYDENDKLIREVKVITLKSKLVSDFRKDFQFYKVREINNYHHAHDAYLNAVVGTALIKKYPKLESEFVYGDYKVYDVRKMIAKSEQEIGKATAKYFFYSNIMNFFKTEITLANGEIRKRPLIETNGETGEIVWDKGRDFATVRKVLSMPQVNIVKKTEVQTGGFSKESILPKRNSDKLIARKKDWDPKKYGGFDSPTVAYSVLVVAKVEKGKSKKLKSVKELLGITIMERSSFEKNPIDFLEAKGYKEVKKDLIIKLPKYSLFELENGRKRMLASAGELQKGNELALPSKYVNFLYLASHYEKLKGSPEDNEQKQLFVEQHKHYLDEIIEQISEFSKRVILADANLDKVLSAYNKHRDKPIREQAENIIHLFTLTNLGAPAAFKYFDTTIDRKRYTSTKEVLDATLIHQSITGLYETRIDLSQLGGDGGGGGGSSEAAAKGGTLNIEDEHRLHETSKEPDVSLGSTWLSDFPQAWAETGGMGLAVRQAPLIIPLKATSTPVSIKQYPMSQEARLGIKPHIQRLLDQGILVPCQSPWNTPLLPVKKPGTNDYRPVQDLREVNKRVEDIHPTVPNPYNLLSGLPPSHQWYTVLDLKDAFFCLRLHPTSQPLFAFEWRDPEMGISGQLTWTRLPQGFKNSPTLFNEALHRDLADFRIQHPDLILLQYVDDLLLAATSELDCQQGTRALLQTLGNLGYRASAKKAQICQKQVKYLGYLLKEGQRWLTEARKETVMGQPTPKTPRQLREFLGKAGFCRLFIPGFAEMAAPLYPLTKPGTLFNWGPDQQKAYQEIKQALLTAPALGLPDLTKPFELFVDEKQGYAKGVLTQKLGPWRRPVAYLSKKLDPVAAGWPPCLRMVAAIAVLTKDAGKLTMGQPLVILAPHAVEALVKQPPDRWLSNARMTHYQALLLDTDRVQFGPVVALNPATLLPLPEEGLQHNCLDILAEAHGTRPDLTDQPLPDADHTWYTDGSSLLQEGQRKAGAAVTTETEVIWAKALPAGTSAQRAELIALTQALKMAEGKKLNVYTDSRYAFATAHIHGEIYRRRGWLTSEGKEIKNKDEILALLKALFLPKRLSIIHCPGHQKGHSAEARGNRMADQAARKAAITETPDTSTLLAGKRTADGSEFEKRTADGSEFESPKKKAKVE

SEQ ID NO: 2832 - protein, 2091 aa, synthetic construct
MPAAKRVKLDGGDKKYSIGLDIGTNSVGWAVITDEYKVPSKKFKVLGNTDRHSIKKNLIGALLFDSGETAEATRLKRTARRRYTRRKNRICYLQEIFSNEMAKVDDSFFHRLEESFLVEEDKKHERHPIFGNIVDEVAYHEKYPTIYHLRKKLVDSTDKADLRLIYLALAHMIKFRGHFLIEGDLNPDNSDVDKLFIQLVQTYNQLFEENPINASGVDAKAILSARLSKSRRLENLIAQLPGEKKNGLFGNLIALSLGLTPNFKSNFDLAEDAKLQLSKDTYDDDLDNLLAQIGDQYADLFLAAKNLSDAILLSDILRVNTEITKAPLSASMIKRYDEHHQDLTLLKALVRQQLPEKYKEIFFDQSKNGYAGYIDGGASQEEFYKFIKPILEKMDGTEELLVKLNREDLLRKQRTFDNGSIPHQIHLGELHAILRRQEDFYPFLKDNREKIEKILTFRIPYYVGPLARGNSRFAWMTRKSEETITPWNFEEVVDKGASAQSFIERMTNFDKNLPNEKVLPKHSLLYEYFTVYNELTKVKYVTEGMRKPAFLSGEQKKAIVDLLFKTNRKVTVKQLKEDYFKKIECFDSVEISGVEDRFNASLGTYHDLLKIIKDKDFLDNEENEDILEDIVLTLTLFEDREMIEERLKTYAHLFDDKVMKQLKRRRYTGWGRLSRKLINGIRDKQSGKTILDFLKSDGFANRNFMQLIHDDSLTFKEDIQKAQVSGQGDSLHEHIANLAGSPAIKKGILQTVKVVDELVKVMGRHKPENIVIEMARENQTTQKGQKNSRERMKRIEEGIKELGSQILKEHPVENTQLQNEKLYLYYLQNGRDMYVDQELDINRLSDYDVDHIVPQSFLKDDSIDNKVLTRSDKARGKSDNVPSEEVVKKMKNYWRQLLNAKLITQRKFDNLTKAERGGLSELDKAGFIKRQLVETRQITKHVAQILDSRMNTKYDENDKLIREVKVITLKSKLVSDFRKDFQFYKVREINNYHHAHDAYLNAVVGTALIKKYPKLESEFVYGDYKVYDVRKMIAKSEQEIGKATAKYFFYSNIMNFFKTEITLANGEIRKRPLIETNGETGEIVWDKGRDFATVRKVLSMPQVNIVKKTEVQTGGFSKESILPKRNSDKLIARKKDWDPKKYGGFDSPTVAYSVLVVAKVEKGKSKKLKSVKELLGITIMERSSFEKNPIDFLEAKGYKEVKKDLIIKLPKYSLFELENGRKRMLASAGELQKGNELALPSKYVNFLYLASHYEKLKGSPEDNEQKQLFVEQHKHYLDEIIEQISEFSKRVILADANLDKVLSAYNKHRDKPIREQAENIIHLFTLTNLGAPAAFKYFDTTIDRKRYTSTKEVLDATLIHQSITGLYETRIDLSQLGGDGGGSSGSSGGTLNIEDEHRLHETSKEPDVSLGSTWLSDFPQAWAETGGMGLAVRQAPLIIPLKATSTPVSIKQYPMSQEARLGIKPHIQRLLDQGILVPCQSPWNTPLLPVKKPGTNDYRPVQDLREVNKRVEDIHPTVPNPYNLLSGLPPSHQWYTVLDLKDAFFCLRLHPTSQPLFAFEWRDPEMGISGQLTWTRLPQGFKNSPTLFNEALHRDLADFRIQHPDLILLQYVDDLLLAATSELDCQQGTRALLQTLGNLGYRASAKKAQICQKQVKYLGYLLKEGQRWLTEARKETVMGQPTPKTPRQLREFLGKAGFCRLFIPGFAEMAAPLYPLTKPGTLFNWGPDQQKAYQEIKQALLTAPALGLPDLTKPFELFVDEKQGYAKGVLTQKLGPWRRPVAYLSKKLDPVAAGWPPCLRMVAAIAVLTKDAGKLTMGQPLVILAPHAVEALVKQPPDRWLSNARMTHYQALLLDTDRVQFGPVVALNPATLLPLPEEGLQHNCLDILAEAHGTRPDLTDQPLPDADHTWYTDGSSLLQEGQRKAGAAVTTETEVIWAKALPAGTSAQRAELIALTQALKMAEGKKLNVYTDSRYAFATAHIHGEIYRRRGWLTSEGKEIKNKDEILALLKALFLPKRLSIIHCPGHQKGHSAEARGNRMADQAARKAAITETPDTSTLLAGKRTADGSEFEKRTADGSEFESPKKKAKVE

SEQ ID NO: 2833 - protein, 2094 aa, synthetic construct
MPAAKRVKLDGGDKKYSIGLDIGTNSVGWAVITDEYKVPSKKFKVLGNTDRHSIKKNLIGALLFDSGETAEATRLKRTARRRYTRRKNRICYLQEIFSNEMAKVDDSFFHRLEESFLVEEDKKHERHPIFGNIVDEVAYHEKYPTIYHLRKKLVDSTDKADLRLIYLALAHMIKFRGHFLIEGDLNPDNSDVDKLFIQLVQTYNQLFEENPINASGVDAKAILSARLSKSRRLENLIAQLPGEKKNGLFGNLIALSLGLTPNFKSNFDLAEDAKLQLSKDTYDDDLDNLLAQIGDQYADLFLAAKNLSDAILLSDILRVNTEITKAPLSASMIKRYDEHHQDLTLLKALVRQQLPEKYKEIFFDQSKNGYAGYIDGGASQEEFYKFIKPILEKMDGTEELLVKLNREDLLRKQRTFDNGSIPHQIHLGELHAILRRQEDFYPFLKDNREKIEKILTFRIPYYVGPLARGNSRFAWMTRKSEETITPWNFEEVVDKGASAQSFIERMTNFDKNLPNEKVLPKHSLLYEYFTVYNELTKVKYVTEGMRKPAFLSGEQKKAIVDLLFKTNRKVTVKQLKEDYFKKIECFDSVEISGVEDRFNASLGTYHDLLKIIKDKDFLDNEENEDILEDIVLTLTLFEDREMIEERLKTYAHLFDDKVMKQLKRRRYTGWGRLSRKLINGIRDKQSGKTILDFLKSDGFANRNFMQLIHDDSLTFKEDIQKAQVSGQGDSLHEHIANLAGSPAIKKGILQTVKVVDELVKVMGRHKPENIVIEMARENQTTQKGQKNSRERMKRIEEGIKELGSQILKEHPVENTQLQNEKLYLYYLQNGRDMYVDQELDINRLSDYDVDHIVPQSFLKDDSIDNKVLTRSDKARGKSDNVPSEEVVKKMKNYWRQLLNAKLITQRKFDNLTKAERGGLSELDKAGFIKRQLVETRQITKHVAQILDSRMNTKYDENDKLIREVKVITLKSKLVSDFRKDFQFYKVREINNYHHAHDAYLNAVVGTALIKKYPKLESEFVYGDYKVYDVRKMIAKSEQEIGKATAKYFFYSNIMNFFKTEITLANGEIRKRPLIETNGETGEIVWDKGRDFATVRKVLSMPQVNIVKKTEVQTGGFSKESILPKRNSDKLIARKKDWDPKKYGGFDSPTVAYSVLVVAKVEKGKSKKLKSVKELLGITIMERSSFEKNPIDFLEAKGYKEVKKDLIIKLPKYSLFELENGRKRMLASAGELQKGNELALPSKYVNFLYLASHYEKLKGSPEDNEQKQLFVEQHKHYLDEIIEQISEFSKRVILADANLDKVLSAYNKHRDKPIREQAENIIHLFTLTNLGAPAAFKYFDTTIDRKRYTSTKEVLDATLIHQSITGLYETRIDLSQLGGDGGPAPGGSGGGGGTLNIEDEHRLHETSKEPDVSLGSTWLSDFPQAWAETGGMGLAVRQAPLIIPLKATSTPVSIKQYPMSQEARLGIKPHIQRLLDQGILVPCQSPWNTPLLPVKKPGTNDYRPVQDLREVNKRVEDIHPTVPNPYNLLSGLPPSHQWYTVLDLKDAFFCLRLHPTSQPLFAFEWRDPEMGISGQLTWTRLPQGFKNSPTLFNEALHRDLADFRIQHPDLILLQYVDDLLLAATSELDCQQGTRALLQTLGNLGYRASAKKAQICQKQVKYLGYLLKEGQRWLTEARKETVMGQPTPKTPRQLREFLGKAGFCRLFIPGFAEMAAPLYPLTKPGTLFNWGPDQQKAYQEIKQALLTAPALGLPDLTKPFELFVDEKQGYAKGVLTQKLGPWRRPVAYLSKKLDPVAAGWPPCLRMVAAIAVLTKDAGKLTMGQPLVILAPHAVEALVKQPPDRWLSNARMTHYQALLLDTDRVQFGPVVALNPATLLPLPEEGLQHNCLDILAEAHGTRPDLTDQPLPDADHTWYTDGSSLLQEGQRKAGAAVTTETEVIWAKALPAGTSAQRAELIALTQALKMAEGKKLNVYTDSRYAFATAHIHGEIYRRRGWLTSEGKEIKNKDEILALLKALFLPKRLSIIHCPGHQKGHSAEARGNRMADQAARKAAITETPDTSTLLAGKRTADGSEFEKRTADGSEFESPKKKAKVE

SEQ ID NO: 2834 - protein, 2090 aa, synthetic construct
MPAAKRVKLDGGDKKYSIGLDIGTNSVGWAVITDEYKVPSKKFKVLGNTDRHSIKKNLIGALLFDSGETAEATRLKRTARRRYTRRKNRICYLQEIFSNEMAKVDDSFFHRLEESFLVEEDKKHERHPIFGNIVDEVAYHEKYPTIYHLRKKLVDSTDKADLRLIYLALAHMIKFRGHFLIEGDLNPDNSDVDKLFIQLVQTYNQLFEENPINASGVDAKAILSARLSKSRRLENLIAQLPGEKKNGLFGNLIALSLGLTPNFKSNFDLAEDAKLQLSKDTYDDDLDNLLAQIGDQYADLFLAAKNLSDAILLSDILRVNTEITKAPLSASMIKRYDEHHQDLTLLKALVRQQLPEKYKEIFFDQSKNGYAGYIDGGASQEEFYKFIKPILEKMDGTEELLVKLNREDLLRKQRTFDNGSIPHQIHLGELHAILRRQEDFYPFLKDNREKIEKILTFRIPYYVGPLARGNSRFAWMTRKSEETITPWNFEEVVDKGASAQSFIERMTNFDKNLPNEKVLPKHSLLYEYFTVYNELTKVKYVTEGMRKPAFLSGEQKKAIVDLLFKTNRKVTVKQLKEDYFKKIECFDSVEISGVEDRFNASLGTYHDLLKIIKDKDFLDNEENEDILEDIVLTLTLFEDREMIEERLKTYAHLFDDKVMKQLKRRRYTGWGRLSRKLINGIRDKQSGKTILDFLKSDGFANRNFMQLIHDDSLTFKEDIQKAQVSGQGDSLHEHIANLAGSPAIKKGILQTVKVVDELVKVMGRHKPENIVIEMARENQTTQKGQKNSRERMKRIEEGIKELGSQILKEHPVENTQLQNEKLYLYYLQNGRDMYVDQELDINRLSDYDVDHIVPQSFLKDDSIDNKVLTRSDKARGKSDNVPSEEVVKKMKNYWRQLLNAKLITQRKFDNLTKAERGGLSELDKAGFIKRQLVETRQITKHVAQILDSRMNTKYDENDKLIREVKVITLKSKLVSDFRKDFQFYKVREINNYHHAHDAYLNAVVGTALIKKYPKLESEFVYGDYKVYDVRKMIAKSEQEIGKATAKYFFYSNIMNFFKTEITLANGEIRKRPLIETNGETGEIVWDKGRDFATVRKVLSMPQVNIVKKTEVQTGGFSKESILPKRNSDKLIARKKDWDPKKYGGFDSPTVAYSVLVVAKVEKGKSKKLKSVKELLGITIMERSSFEKNPIDFLEAKGYKEVKKDLIIKLPKYSLFELENGRKRMLASAGELQKGNELALPSKYVNFLYLASHYEKLKGSPEDNEQKQLFVEQHKHYLDEIIEQISEFSKRVILADANLDKVLSAYNKHRDKPIREQAENIIHLFTLTNLGAPAAFKYFDTTIDRKRYTSTKEVLDATLIHQSITGLYETRIDLSQLGGDGGGGGGGGGTLNIEDEHRLHETSKEPDVSLGSTWLSDFPQAWAETGGMGLAVRQAPLIIPLKATSTPVSIKQYPMSQEARLGIKPHIQRLLDQGILVPCQSPWNTPLLPVKKPGTNDYRPVQDLREVNKRVEDIHPTVPNPYNLLSGLPPSHQWYTVLDLKDAFFCLRLHPTSQPLFAFEWRDPEMGISGQLTWTRLPQGFKNSPTLFNEALHRDLADFRIQHPDLILLQYVDDLLLAATSELDCQQGTRALLQTLGNLGYRASAKKAQICQKQVKYLGYLLKEGQRWLTEARKETVMGQPTPKTPRQLREFLGKAGFCRLFIPGFAEMAAPLYPLTKPGTLFNWGPDQQKAYQEIKQALLTAPALGLPDLTKPFELFVDEKQGYAKGVLTQKLGPWRRPVAYLSKKLDPVAAGWPPCLRMVAAIAVLTKDAGKLTMGQPLVILAPHAVEALVKQPPDRWLSNARMTHYQALLLDTDRVQFGPVVALNPATLLPLPEEGLQHNCLDILAEAHGTRPDLTDQPLPDADHTWYTDGSSLLQEGQRKAGAAVTTETEVIWAKALPAGTSAQRAELIALTQALKMAEGKKLNVYTDSRYAFATAHIHGEIYRRRGWLTSEGKEIKNKDEILALLKALFLPKRLSIIHCPGHQKGHSAEARGNRMADQAARKAAITETPDTSTLLAGKRTADGSEFEKRTADGSEFESPKKKAKVE

SEQ ID NO: 2835 - protein, 2094 aa, synthetic construct
MPAAKRVKLDGGDKKYSIGLDIGTNSVGWAVITDEYKVPSKKFKVLGNTDRHSIKKNLIGALLFDSGETAEATRLKRTARRRYTRRKNRICYLQEIFSNEMAKVDDSFFHRLEESFLVEEDKKHERHPIFGNIVDEVAYHEKYPTIYHLRKKLVDSTDKADLRLIYLALAHMIKFRGHFLIEGDLNPDNSDVDKLFIQLVQTYNQLFEENPINASGVDAKAILSARLSKSRRLENLIAQLPGEKKNGLFGNLIALSLGLTPNFKSNFDLAEDAKLQLSKDTYDDDLDNLLAQIGDQYADLFLAAKNLSDAILLSDILRVNTEITKAPLSASMIKRYDEHHQDLTLLKALVRQQLPEKYKEIFFDQSKNGYAGYIDGGASQEEFYKFIKPILEKMDGTEELLVKLNREDLLRKQRTFDNGSIPHQIHLGELHAILRRQEDFYPFLKDNREKIEKILTFRIPYYVGPLARGNSRFAWMTRKSEETITPWNFEEVVDKGASAQSFIERMTNFDKNLPNEKVLPKHSLLYEYFTVYNELTKVKYVTEGMRKPAFLSGEQKKAIVDLLFKTNRKVTVKQLKEDYFKKIECFDSVEISGVEDRFNASLGTYHDLLKIIKDKDFLDNEENEDILEDIVLTLTLFEDREMIEERLKTYAHLFDDKVMKQLKRRRYTGWGRLSRKLINGIRDKQSGKTILDFLKSDGFANRNFMQLIHDDSLTFKEDIQKAQVSGQGDSLHEHIANLAGSPAIKKGILQTVKVVDELVKVMGRHKPENIVIEMARENQTTQKGQKNSRERMKRIEEGIKELGSQILKEHPVENTQLQNEKLYLYYLQNGRDMYVDQELDINRLSDYDVDHIVPQSFLKDDSIDNKVLTRSDKARGKSDNVPSEEVVKKMKNYWRQLLNAKLITQRKFDNLTKAERGGLSELDKAGFIKRQLVETRQITKHVAQILDSRMNTKYDENDKLIREVKVITLKSKLVSDFRKDFQFYKVREINNYHHAHDAYLNAVVGTALIKKYPKLESEFVYGDYKVYDVRKMIAKSEQEIGKATAKYFFYSNIMNFFKTEITLANGEIRKRPLIETNGETGEIVWDKGRDFATVRKVLSMPQVNIVKKTEVQTGGFSKESILPKRNSDKLIARKKDWDPKKYGGFDSPTVAYSVLVVAKVEKGKSKKLKSVKELLGITIMERSSFEKNPIDFLEAKGYKEVKKDLIIKLPKYSLFELENGRKRMLASAGELQKGNELALPSKYVNFLYLASHYEKLKGSPEDNEQKQLFVEQHKHYLDEIIEQISEFSKRVILADANLDKVLSAYNKHRDKPIREQAENIIHLFTLTNLGAPAAFKYFDTTIDRKRYTSTKEVLDATLIHQSITGLYETRIDLSQLGGDGGGSSPAPGGGGGTLNIEDEHRLHETSKEPDVSLGSTWLSDFPQAWAETGGMGLAVRQAPLIIPLKATSTPVSIKQYPMSQEARLGIKPHIQRLLDQGILVPCQSPWNTPLLPVKKPGTNDYRPVQDLREVNKRVEDIHPTVPNPYNLLSGLPPSHQWYTVLDLKDAFFCLRLHPTSQPLFAFEWRDPEMGISGQLTWTRLPQGFKNSPTLFNEALHRDLADFRIQHPDLILLQYVDDLLLAATSELDCQQGTRALLQTLGNLGYRASAKKAQICQKQVKYLGYLLKEGQRWLTEARKETVMGQPTPKTPRQLREFLGKAGFCRLFIPGFAEMAAPLYPLTKPGTLFNWGPDQQKAYQEIKQALLTAPALGLPDLTKPFELFVDEKQGYAKGVLTQKLGPWRRPVAYLSKKLDPVAAGWPPCLRMVAAIAVLTKDAGKLTMGQPLVILAPHAVEALVKQPPDRWLSNARMTHYQALLLDTDRVQFGPVVALNPATLLPLPEEGLQHNCLDILAEAHGTRPDLTDQPLPDADHTWYTDGSSLLQEGQRKAGAAVTTETEVIWAKALPAGTSAQRAELIALTQALKMAEGKKLNVYTDSRYAFATAHIHGEIYRRRGWLTSEGKEIKNKDEILALLKALFLPKRLSIIHCPGHQKGHSAEARGNRMADQAARKAAITETPDTSTLLAGKRTADGSEFEKRTADGSEFESPKKKAKVE

SEQ ID NO: 2836 - protein, 2100 aa, synthetic construct
MPAAKRVKLDGGDKKYSIGLDIGTNSVGWAVITDEYKVPSKKFKVLGNTDRHSIKKNLIGALLFDSGETAEATRLKRTARRRYTRRKNRICYLQEIFSNEMAKVDDSFFHRLEESFLVEEDKKHERHPIFGNIVDEVAYHEKYPTIYHLRKKLVDSTDKADLRLIYLALAHMIKFRGHFLIEGDLNPDNSDVDKLFIQLVQTYNQLFEENPINASGVDAKAILSARLSKSRRLENLIAQLPGEKKNGLFGNLIALSLGLTPNFKSNFDLAEDAKLQLSKDTYDDDLDNLLAQIGDQYADLFLAAKNLSDAILLSDILRVNTEITKAPLSASMIKRYDEHHQDLTLLKALVRQQLPEKYKEIFFDQSKNGYAGYIDGGASQEEFYKFIKPILEKMDGTEELLVKLNREDLLRKQRTFDNGSIPHQIHLGELHAILRRQEDFYPFLKDNREKIEKILTFRIPYYVGPLARGNSRFAWMTRKSEETITPWNFEEVVDKGASAQSFIERMTNFDKNLPNEKVLPKHSLLYEYFTVYNELTKVKYVTEGMRKPAFLSGEQKKAIVDLLFKTNRKVTVKQLKEDYFKKIECFDSVEISGVEDRFNASLGTYHDLLKIIKDKDFLDNEENEDILEDIVLTLTLFEDREMIEERLKTYAHLFDDKVMKQLKRRRYTGWGRLSRKLINGIRDKQSGKTILDFLKSDGFANRNFMQLIHDDSLTFKEDIQKAQVSGQGDSLHEHIANLAGSPAIKKGILQTVKVVDELVKVMGRHKPENIVIEMARENQTTQKGQKNSRERMKRIEEGIKELGSQILKEHPVENTQLQNEKLYLYYLQNGRDMYVDQELDINRLSDYDVDHIVPQSFLKDDSIDNKVLTRSDKARGKSDNVPSEEVVKKMKNYWRQLLNAKLITQRKFDNLTKAERGGLSELDKAGFIKRQLVETRQITKHVAQILDSRMNTKYDENDKLIREVKVITLKSKLVSDFRKDFQFYKVREINNYHHAHDAYLNAVVGTALIKKYPKLESEFVYGDYKVYDVRKMIAKSEQEIGKATAKYFFYSNIMNFFKTEITLANGEIRKRPLIETNGETGEIVWDKGRDFATVRKVLSMPQVNIVKKTEVQTGGFSKESILPKRNSDKLIARKKDWDPKKYGGFDSPTVAYSVLVVAKVEKGKSKKLKSVKELLGITIMERSSFEKNPIDFLEAKGYKEVKKDLIIKLPKYSLFELENGRKRMLASAGELQKGNELALPSKYVNFLYLASHYEKLKGSPEDNEQKQLFVEQHKHYLDEIIEQISEFSKRVILADANLDKVLSAYNKHRDKPIREQAENIIHLFTLTNLGAPAAFKYFDTTIDRKRYTSTKEVLDATLIHQSITGLYETRIDLSQLGGDGGGGGGSEAAAKGGGGSGGTLNIEDEHRLHETSKEPDVSLGSTWLSDFPQAWAETGGMGLAVRQAPLIIPLKATSTPVSIKQYPMSQEARLGIKPHIQRLLDQGILVPCQSPWNTPLLPVKKPGTNDYRPVQDLREVNKRVEDIHPTVPNPYNLLSGLPPSHQWYTVLDLKDAFFCLRLHPTSQPLFAFEWRDPEMGISGQLTWTRLPQGFKNSPTLFNEALHRDLADFRIQHPDLILLQYVDDLLLAATSELDCQQGTRALLQTLGNLGYRASAKKAQICQKQVKYLGYLLKEGQRWLTEARKETVMGQPTPKTPRQLREFLGKAGFCRLFIPGFAEMAAPLYPLTKPGTLFNWGPDQQKAYQEIKQALLTAPALGLPDLTKPFELFVDEKQGYAKGVLTQKLGPWRRPVAYLSKKLDPVAAGWPPCLRMVAAIAVLTKDAGKLTMGQPLVILAPHAVEALVKQPPDRWLSNARMTHYQALLLDTDRVQFGPVVALNPATLLPLPEEGLQHNCLDILAEAHGTRPDLTDQPLPDADHTWYTDGSSLLQEGQRKAGAAVTTETEVIWAKALPAGTSAQRAELIALTQALKMAEGKKLNVYTDSRYAFATAHIHGEIYRRRGWLTSEGKEIKNKDEILALLKALFLPKRLSIIHCPGHQKGHSAEARGNRMADQAARKAAITETPDTSTLLAGKRTADGSEFEKRTADGSEFESPKKKAKVE

SEQ ID NO: 2837 - protein, 2091 aa, synthetic construct
MPAAKRVKLDGGDKKYSIGLDIGTNSVGWAVITDEYKVPSKKFKVLGNTDRHSIKKNLIGALLFDSGETAEATRLKRTARRRYTRRKNRICYLQEIFSNEMAKVDDSFFHRLEESFLVEEDKKHERHPIFGNIVDEVAYHEKYPTIYHLRKKLVDSTDKADLRLIYLALAHMIKFRGHFLIEGDLNPDNSDVDKLFIQLVQTYNQLFEENPINASGVDAKAILSARLSKSRRLENLIAQLPGEKKNGLFGNLIALSLGLTPNFKSNFDLAEDAKLQLSKDTYDDDLDNLLAQIGDQYADLFLAAKNLSDAILLSDILRVNTEITKAPLSASMIKRYDEHHQDLTLLKALVRQQLPEKYKEIFFDQSKNGYAGYIDGGASQEEFYKFIKPILEKMDGTEELLVKLNREDLLRKQRTFDNGSIPHQIHLGELHAILRRQEDFYPFLKDNREKIEKILTFRIPYYVGPLARGNSRFAWMTRKSEETITPWNFEEVVDKGASAQSFIERMTNFDKNLPNEKVLPKHSLLYEYFTVYNELTKVKYVTEGMRKPAFLSGEQKKAIVDLLFKTNRKVTVKQLKEDYFKKIECFDSVEISGVEDRFNASLGTYHDLLKIIKDKDFLDNEENEDILEDIVLTLTLFEDREMIEERLKTYAHLFDDKVMKQLKRRRYTGWGRLSRKLINGIRDKQSGKTILDFLKSDGFANRNFMQLIHDDSLTFKEDIQKAQVSGQGDSLHEHIANLAGSPAIKKGILQTVKVVDELVKVMGRHKPENIVIEMARENQTTQKGQKNSRERMKRIEEGIKELGSQILKEHPVENTQLQNEKLYLYYLQNGRDMYVDQELDINRLSDYDVDHIVPQSFLKDDSIDNKVLTRSDKARGKSDNVPSEEVVKKMKNYWRQLLNAKLITQRKFDNLTKAERGGLSELDKAGFIKRQLVETRQITKHVAQILDSRMNTKYDENDKLIREVKVITLKSKLVSDFRKDFQFYKVREINNYHHAHDAYLNAVVGTALIKKYPKLESEFVYGDYKVYDVRKMIAKSEQEIGKATAKYFFYSNIMNFFKTEITLANGEIRKRPLIETNGETGEIVWDKGRDFATVRKVLSMPQVNIVKKTEVQTGGFSKESILPKRNSDKLIARKKDWDPKKYGGFDSPTVAYSVLVVAKVEKGKSKKLKSVKELLGITIMERSSFEKNPIDFLEAKGYKEVKKDLIIKLPKYSLFELENGRKRMLASAGELQKGNELALPSKYVNFLYLASHYEKLKGSPEDNEQKQLFVEQHKHYLDEIIEQISEFSKRVILADANLDKVLSAYNKHRDKPIREQAENIIHLFTLTNLGAPAAFKYFDTTIDRKRYTSTKEVLDATLIHQSITGLYETRIDLSQLGGDGGPAPGGGGGTLNIEDEHRLHETSKEPDVSLGSTWLSDFPQAWAETGGMGLAVRQAPLIIPLKATSTPVSIKQYPMSQEARLGIKPHIQRLLDQGILVPCQSPWNTPLLPVKKPGTNDYRPVQDLREVNKRVEDIHPTVPNPYNLLSGLPPSHQWYTVLDLKDAFFCLRLHPTSQPLFAFEWRDPEMGISGQLTWTRLPQGFKNSPTLFNEALHRDLADFRIQHPDLILLQYVDDLLLAATSELDCQQGTRALLQTLGNLGYRASAKKAQICQKQVKYLGYLLKEGQRWLTEARKETVMGQPTPKTPRQLREFLGKAGFCRLFIPGFAEMAAPLYPLTKPGTLFNWGPDQQKAYQEIKQALLTAPALGLPDLTKPFELFVDEKQGYAKGVLTQKLGPWRRPVAYLSKKLDPVAAGWPPCLRMVAAIAVLTKDAGKLTMGQPLVILAPHAVEALVKQPPDRWLSNARMTHYQALLLDTDRVQFGPVVALNPATLLPLPEEGLQHNCLDILAEAHGTRPDLTDQPLPDADHTWYTDGSSLLQEGQRKAGAAVTTETEVIWAKALPAGTSAQRAELIALTQALKMAEGKKLNVYTDSRYAFATAHIHGEIYRRRGWLTSEGKEIKNKDEILALLKALFLPKRLSIIHCPGHQKGHSAEARGNRMADQAARKAAITETPDTSTLLAGKRTADGSEFEKRTADGSEFESPKKKAKVE

SEQ ID NO: 2838 - protein, 2096 aa, synthetic construct
MPAAKRVKLDGGDKKYSIGLDIGTNSVGWAVITDEYKVPSKKFKVLGNTDRHSIKKNLIGALLFDSGETAEATRLKRTARRRYTRRKNRICYLQEIFSNEMAKVDDSFFHRLEESFLVEEDKKHERHPIFGNIVDEVAYHEKYPTIYHLRKKLVDSTDKADLRLIYLALAHMIKFRGHFLIEGDLNPDNSDVDKLFIQLVQTYNQLFEENPINASGVDAKAILSARLSKSRRLENLIAQLPGEKKNGLFGNLIALSLGLTPNFKSNFDLAEDAKLQLSKDTYDDDLDNLLAQIGDQYADLFLAAKNLSDAILLSDILRVNTEITKAPLSASMIKRYDEHHQDLTLLKALVRQQLPEKYKEIFFDQSKNGYAGYIDGGASQEEFYKFIKPILEKMDGTEELLVKLNREDLLRKQRTFDNGSIPHQIHLGELHAILRRQEDFYPFLKDNREKIEKILTFRIPYYVGPLARGNSRFAWMTRKSEETITPWNFEEVVDKGASAQSFIERMTNFDKNLPNEKVLPKHSLLYEYFTVYNELTKVKYVTEGMRKPAFLSGEQKKAIVDLLFKTNRKVTVKQLKEDYFKKIECFDSVEISGVEDRFNASLGTYHDLLKIIKDKDFLDNEENEDILEDIVLTLTLFEDREMIEERLKTYAHLFDDKVMKQLKRRRYTGWGRLSRKLINGIRDKQSGKTILDFLKSDGFANRNFMQLIHDDSLTFKEDIQKAQVSGQGDSLHEHIANLAGSPAIKKGILQTVKVVDELVKVMGRHKPENIVIEMARENQTTQKGQKNSRERMKRIEEGIKELGSQILKEHPVENTQLQNEKLYLYYLQNGRDMYVDQELDINRLSDYDVDHIVPQSFLKDDSIDNKVLTRSDKARGKSDNVPSEEVVKKMKNYWRQLLNAKLITQRKFDNLTKAERGGLSELDKAGFIKRQLVETRQITKHVAQILDSRMNTKYDENDKLIREVKVITLKSKLVSDFRKDFQFYKVREINNYHHAHDAYLNAVVGTALIKKYPKLESEFVYGDYKVYDVRKMIAKSEQEIGKATAKYFFYSNIMNFFKTEITLANGEIRKRPLIETNGETGEIVWDKGRDFATVRKVLSMPQVNIVKKTEVQTGGFSKESILPKRNSDKLIARKKDWDPKKYGGFDSPTVAYSVLVVAKVEKGKSKKLKSVKELLGITIMERSSFEKNPIDFLEAKGYKEVKKDLIIKLPKYSLFELENGRKRMLASAGELQKGNELALPSKYVNFLYLASHYEKLKGSPEDNEQKQLFVEQHKHYLDEIIEQISEFSKRVILADANLDKVLSAYNKHRDKPIREQAENIIHLFTLTNLGAPAAFKYFDTTIDRKRYTSTKEVLDATLIHQSITGLYETRIDLSQLGGDGGEAAAKPAPGGGGGTLNIEDEHRLHETSKEPDVSLGSTWLSDFPQAWAETGGMGLAVRQAPLIIPLKATSTPVSIKQYPMSQEARLGIKPHIQRLLDQGILVPCQSPWNTPLLPVKKPGTNDYRPVQDLREVNKRVEDIHPTVPNPYNLLSGLPPSHQWYTVLDLKDAFFCLRLHPTSQPLFAFEWRDPEMGISGQLTWTRLPQGFKNSPTLFNEALHRDLADFRIQHPDLILLQYVDDLLLAATSELDCQQGTRALLQTLGNLGYRASAKKAQICQKQVKYLGYLLKEGQRWLTEARKETVMGQPTPKTPRQLREFLGKAGFCRLFIPGFAEMAAPLYPLTKPGTLFNWGPDQQKAYQEIKQALLTAPALGLPDLTKPFELFVDEKQGYAKGVLTQKLGPWRRPVAYLSKKLDPVAAGWPPCLRMVAAIAVLTKDAGKLTMGQPLVILAPHAVEALVKQPPDRWLSNARMTHYQALLLDTDRVQFGPVVALNPATLLPLPEEGLQHNCLDILAEAHGTRPDLTDQPLPDADHTWYTDGSSLLQEGQRKAGAAVTTETEVIWAKALPAGTSAQRAELIALTQALKMAEGKKLNVYTDSRYAFATAHIHGEIYRRRGWLTSEGKEIKNKDEILALLKALFLPKRLSIIHCPGHQKGHSAEARGNRMADQAARKAAITETPDTSTLLAGKRTADGSEFEKRTADGSEFESPKKKAKVE

SEQ ID NO: 2839 - protein, 2096 aa, synthetic construct
MPAAKRVKLDGGDKKYSIGLDIGTNSVGWAVITDEYKVPSKKFKVLGNTDRHSIKKNLIGALLFDSGETAEATRLKRTARRRYTRRKNRICYLQEIFSNEMAKVDDSFFHRLEESFLVEEDKKHERHPIFGNIVDEVAYHEKYPTIYHLRKKLVDSTDKADLRLIYLALAHMIKFRGHFLIEGDLNPDNSDVDKLFIQLVQTYNQLFEENPINASGVDAKAILSARLSKSRRLENLIAQLPGEKKNGLFGNLIALSLGLTPNFKSNFDLAEDAKLQLSKDTYDDDLDNLLAQIGDQYADLFLAAKNLSDAILLSDILRVNTEITKAPLSASMIKRYDEHHQDLTLLKALVRQQLPEKYKEIFFDQSKNGYAGYIDGGASQEEFYKFIKPILEKMDGTEELLVKLNREDLLRKQRTFDNGSIPHQIHLGELHAILRRQEDFYPFLKDNREKIEKILTFRIPYYVGPLARGNSRFAWMTRKSEETITPWNFEEVVDKGASAQSFIERMTNFDKNLPNEKVLPKHSLLYEYFTVYNELTKVKYVTEGMRKPAFLSGEQKKAIVDLLFKTNRKVTVKQLKEDYFKKIECFDSVEISGVEDRFNASLGTYHDLLKIIKDKDFLDNEENEDILEDIVLTLTLFEDREMIEERLKTYAHLFDDKVMKQLKRRRYTGWGRLSRKLINGIRDKQSGKTILDFLKSDGFANRNFMQLIHDDSLTFKEDIQKAQVSGQGDSLHEHIANLAGSPAIKKGILQTVKVVDELVKVMGRHKPENIVIEMARENQTTQKGQKNSRERMKRIEEGIKELGSQILKEHPVENTQLQNEKLYLYYLQNGRDMYVDQELDINRLSDYDVDHIVPQSFLKDDSIDNKVLTRSDKARGKSDNVPSEEVVKKMKNYWRQLLNAKLITQRKFDNLTKAERGGLSELDKAGFIKRQLVETRQITKHVAQILDSRMNTKYDENDKLIREVKVITLKSKLVSDFRKDFQFYKVREINNYHHAHDAYLNAVVGTALIKKYPKLESEFVYGDYKVYDVRKMIAKSEQEIGKATAKYFFYSNIMNFFKTEITLANGEIRKRPLIETNGETGEIVWDKGRDFATVRKVLSMPQVNIVKKTEVQTGGFSKESILPKRNSDKLIARKKDWDPKKYGGFDSPTVAYSVLVVAKVEKGKSKKLKSVKELLGITIMERSSFEKNPIDFLEAKGYKEVKKDLIIKLPKYSLFELENGRKRMLASAGELQKGNELALPSKYVNFLYLASHYEKLKGSPEDNEQKQLFVEQHKHYLDEIIEQISEFSKRVILADANLDKVLSAYNKHRDKPIREQAENIIHLFTLTNLGAPAAFKYFDTTIDRKRYTSTKEVLDATLIHQSITGLYETRIDLSQLGGDGGGSSPAPEAAAKGGTLNIEDEHRLHETSKEPDVSLGSTWLSDFPQAWAETGGMGLAVRQAPLIIPLKATSTPVSIKQYPMSQEARLGIKPHIQRLLDQGILVPCQSPWNTPLLPVKKPGTNDYRPVQDLREVNKRVEDIHPTVPNPYNLLSGLPPSHQWYTVLDLKDAFFCLRLHPTSQPLFAFEWRDPEMGISGQLTWTRLPQGFKNSPTLFNEALHRDLADFRIQHPDLILLQYVDDLLLAATSELDCQQGTRALLQTLGNLGYRASAKKAQICQKQVKYLGYLLKEGQRWLTEARKETVMGQPTPKTPRQLREFLGKAGFCRLFIPGFAEMAAPLYPLTKPGTLFNWGPDQQKAYQEIKQALLTAPALGLPDLTKPFELFVDEKQGYAKGVLTQKLGPWRRPVAYLSKKLDPVAAGWPPCLRMVAAIAVLTKDAGKLTMGQPLVILAPHAVEALVKQPPDRWLSNARMTHYQALLLDTDRVQFGPVVALNPATLLPLPEEGLQHNCLDILAEAHGTRPDLTDQPLPDADHTWYTDGSSLLQEGQRKAGAAVTTETEVIWAKALPAGTSAQRAELIALTQALKMAEGKKLNVYTDSRYAFATAHIHGEIYRRRGWLTSEGKEIKNKDEILALLKALFLPKRLSIIHCPGHQKGHSAEARGNRMADQAARKAAITETPDTSTLLAGKRTADGSEFEKRTADGSEFESPKKKAKVE

SEQ ID NO: 2840 - protein, 2094 aa, synthetic construct
MPAAKRVKLDGGDKKYSIGLDIGTNSVGWAVITDEYKVPSKKFKVLGNTDRHSIKKNLIGALLFDSGETAEATRLKRTARRRYTRRKNRICYLQEIFSNEMAKVDDSFFHRLEESFLVEEDKKHERHPIFGNIVDEVAYHEKYPTIYHLRKKLVDSTDKADLRLIYLALAHMIKFRGHFLIEGDLNPDNSDVDKLFIQLVQTYNQLFEENPINASGVDAKAILSARLSKSRRLENLIAQLPGEKKNGLFGNLIALSLGLTPNFKSNFDLAEDAKLQLSKDTYDDDLDNLLAQIGDQYADLFLAAKNLSDAILLSDILRVNTEITKAPLSASMIKRYDEHHQDLTLLKALVRQQLPEKYKEIFFDQSKNGYAGYIDGGASQEEFYKFIKPILEKMDGTEELLVKLNREDLLRKQRTFDNGSIPHQIHLGELHAILRRQEDFYPFLKDNREKIEKILTFRIPYYVGPLARGNSRFAWMTRKSEETITPWNFEEVVDKGASAQSFIERMTNFDKNLPNEKVLPKHSLLYEYFTVYNELTKVKYVTEGMRKPAFLSGEQKKAIVDLLFKTNRKVTVKQLKEDYFKKIECFDSVEISGVEDRFNASLGTYHDLLKIIKDKDFLDNEENEDILEDIVLTLTLFEDREMIEERLKTYAHLFDDKVMKQLKRRRYTGWGRLSRKLINGIRDKQSGKTILDFLKSDGFANRNFMQLIHDDSLTFKEDIQKAQVSGQGDSLHEHIANLAGSPAIKKGILQTVKVVDELVKVMGRHKPENIVIEMARENQTTQKGQKNSRERMKRIEEGIKELGSQILKEHPVENTQLQNEKLYLYYLQNGRDMYVDQELDINRLSDYDVDHIVPQSFLKDDSIDNKVLTRSDKARGKSDNVPSEEVVKKMKNYWRQLLNAKLITQRKFDNLTKAERGGLSELDKAGFIKRQLVETRQITKHVAQILDSRMNTKYDENDKLIREVKVITLKSKLVSDFRKDFQFYKVREINNYHHAHDAYLNAVVGTALIKKYPKLESEFVYGDYKVYDVRKMIAKSEQEIGKATAKYFFYSNIMNFFKTEITLANGEIRKRPLIETNGETGEIVWDKGRDFATVRKVLSMPQVNIVKKTEVQTGGFSKESILPKRNSDKLIARKKDWDPKKYGGFDSPTVAYSVLVVAKVEKGKSKKLKSVKELLGITIMERSSFEKNPIDFLEAKGYKEVKKDLIIKLPKYSLFELENGRKRMLASAGELQKGNELALPSKYVNFLYLASHYEKLKGSPEDNEQKQLFVEQHKHYLDEIIEQISEFSKRVILADANLDKVLSAYNKHRDKPIREQAENIIHLFTLTNLGAPAAFKYFDTTIDRKRYTSTKEVLDATLIHQSITGLYETRIDLSQLGGDGGGGGGGSPAPGGTLNIEDEHRLHETSKEPDVSLGSTWLSDFPQAWAETGGMGLAVRQAPLIIPLKATSTPVSIKQYPMSQEARLGIKPHIQRLLDQGILVPCQSPWNTPLLPVKKPGTNDYRPVQDLREVNKRVEDIHPTVPNPYNLLSGLPPSHQWYTVLDLKDAFFCLRLHPTSQPLFAFEWRDPEMGISGQLTWTRLPQGFKNSPTLFNEALHRDLADFRIQHPDLILLQYVDDLLLAATSELDCQQGTRALLQTLGNLGYRASAKKAQICQKQVKYLGYLLKEGQRWLTEARKETVMGQPTPKTPRQLREFLGKAGFCRLFIPGFAEMAAPLYPLTKPGTLFNWGPDQQKAYQEIKQALLTAPALGLPDLTKPFELFVDEKQGYAKGVLTQKLGPWRRPVAYLSKKLDPVAAGWPPCLRMVAAIAVLTKDAGKLTMGQPLVILAPHAVEALVKQPPDRWLSNARMTHYQALLLDTDRVQFGPVVALNPATLLPLPEEGLQHNCLDILAEAHGTRPDLTDQPLPDADHTWYTDGSSLLQEGQRKAGAAVTTETEVIWAKALPAGTSAQRAELIALTQALKMAEGKKLNVYTDSRYAFATAHIHGEIYRRRGWLTSEGKEIKNKDEILALLKALFLPKRLSIIHCPGHQKGHSAEARGNRMADQAARKAAITETPDTSTLLAGKRTADGSEFEKRTADGSEFESPKKKAKVE

SEQ ID NO: 2841 - protein, 2094 aa, synthetic construct
MPAAKRVKLDGGDKKYSIGLDIGTNSVGWAVITDEYKVPSKKFKVLGNTDRHSIKKNLIGALLFDSGETAEATRLKRTARRRYTRRKNRICYLQEIFSNEMAKVDDSFFHRLEESFLVEEDKKHERHPIFGNIVDEVAYHEKYPTIYHLRKKLVDSTDKADLRLIYLALAHMIKFRGHFLIEGDLNPDNSDVDKLFIQLVQTYNQLFEENPINASGVDAKAILSARLSKSRRLENLIAQLPGEKKNGLFGNLIALSLGLTPNFKSNFDLAEDAKLQLSKDTYDDDLDNLLAQIGDQYADLFLAAKNLSDAILLSDILRVNTEITKAPLSASMIKRYDEHHQDLTLLKALVRQQLPEKYKEIFFDQSKNGYAGYIDGGASQEEFYKFIKPILEKMDGTEELLVKLNREDLLRKQRTFDNGSIPHQIHLGELHAILRRQEDFYPFLKDNREKIEKILTFRIPYYVGPLARGNSRFAWMTRKSEETITPWNFEEVVDKGASAQSFIERMTNFDKNLPNEKVLPKHSLLYEYFTVYNELTKVKYVTEGMRKPAFLSGEQKKAIVDLLFKTNRKVTVKQLKEDYFKKIECFDSVEISGVEDRFNASLGTYHDLLKIIKDKDFLDNEENEDILEDIVLTLTLFEDREMIEERLKTYAHLFDDKVMKQLKRRRYTGWGRLSRKLINGIRDKQSGKTILDFLKSDGFANRNFMQLIHDDSLTFKEDIQKAQVSGQGDSLHEHIANLAGSPAIKKGILQTVKVVDELVKVMGRHKPENIVIEMARENQTTQKGQKNSRERMKRIEEGIKELGSQILKEHPVENTQLQNEKLYLYYLQNGRDMYVDQELDINRLSDYDVDHIVPQSFLKDDSIDNKVLTRSDKARGKSDNVPSEEVVKKMKNYWRQLLNAKLITQRKFDNLTKAERGGLSELDKAGFIKRQLVETRQITKHVAQILDSRMNTKYDENDKLIREVKVITLKSKLVSDFRKDFQFYKVREINNYHHAHDAYLNAVVGTALIKKYPKLESEFVYGDYKVYDVRKMIAKSEQEIGKATAKYFFYSNIMNFFKTEITLANGEIRKRPLIETNGETGEIVWDKGRDFATVRKVLSMPQVNIVKKTEVQTGGFSKESILPKRNSDKLIARKKDWDPKKYGGFDSPTVAYSVLVVAKVEKGKSKKLKSVKELLGITIMERSSFEKNPIDFLEAKGYKEVKKDLIIKLPKYSLFELENGRKRMLASAGELQKGNELALPSKYVNFLYLASHYEKLKGSPEDNEQKQLFVEQHKHYLDEIIEQISEFSKRVILADANLDKVLSAYNKHRDKPIREQAENIIHLFTLTNLGAPAAFKYFDTTIDRKRYTSTKEVLDATLIHQSITGLYETRIDLSQLGGDGGGGGPAPGSSGGTLNIEDEHRLHETSKEPDVSLGSTWLSDFPQAWAETGGMGLAVRQAPLIIPLKATSTPVSIKQYPMSQEARLGIKPHIQRLLDQGILVPCQSPWNTPLLPVKKPGTNDYRPVQDLREVNKRVEDIHPTVPNPYNLLSGLPPSHQWYTVLDLKDAFFCLRLHPTSQPLFAFEWRDPEMGISGQLTWTRLPQGFKNSPTLFNEALHRDLADFRIQHPDLILLQYVDDLLLAATSELDCQQGTRALLQTLGNLGYRASAKKAQICQKQVKYLGYLLKEGQRWLTEARKETVMGQPTPKTPRQLREFLGKAGFCRLFIPGFAEMAAPLYPLTKPGTLFNWGPDQQKAYQEIKQALLTAPALGLPDLTKPFELFVDEKQGYAKGVLTQKLGPWRRPVAYLSKKLDPVAAGWPPCLRMVAAIAVLTKDAGKLTMGQPLVILAPHAVEALVKQPPDRWLSNARMTHYQALLLDTDRVQFGPVVALNPATLLPLPEEGLQHNCLDILAEAHGTRPDLTDQPLPDADHTWYTDGSSLLQEGQRKAGAAVTTETEVIWAKALPAGTSAQRAELIALTQALKMAEGKKLNVYTDSRYAFATAHIHGEIYRRRGWLTSEGKEIKNKDEILALLKALFLPKRLSIIHCPGHQKGHSAEARGNRMADQAARKAAITETPDTSTLLAGKRTADGSEFEKRTADGSEFESPKKKAKVE

SEQ ID NO: 2842 - protein, 2096 aa, synthetic construct
MPAAKRVKLDGGDKKYSIGLDIGTNSVGWAVITDEYKVPSKKFKVLGNTDRHSIKKNLIGALLFDSGETAEATRLKRTARRRYTRRKNRICYLQEIFSNEMAKVDDSFFHRLEESFLVEEDKKHERHPIFGNIVDEVAYHEKYPTIYHLRKKLVDSTDKADLRLIYLALAHMIKFRGHFLIEGDLNPDNSDVDKLFIQLVQTYNQLFEENPINASGVDAKAILSARLSKSRRLENLIAQLPGEKKNGLFGNLIALSLGLTPNFKSNFDLAEDAKLQLSKDTYDDDLDNLLAQIGDQYADLFLAAKNLSDAILLSDILRVNTEITKAPLSASMIKRYDEHHQDLTLLKALVRQQLPEKYKEIFFDQSKNGYAGYIDGGASQEEFYKFIKPILEKMDGTEELLVKLNREDLLRKQRTFDNGSIPHQIHLGELHAILRRQEDFYPFLKDNREKIEKILTFRIPYYVGPLARGNSRFAWMTRKSEETITPWNFEEVVDKGASAQSFIERMTNFDKNLPNEKVLPKHSLLYEYFTVYNELTKVKYVTEGMRKPAFLSGEQKKAIVDLLFKTNRKVTVKQLKEDYFKKIECFDSVEISGVEDRFNASLGTYHDLLKIIKDKDFLDNEENEDILEDIVLTLTLFEDREMIEERLKTYAHLFDDKVMKQLKRRRYTGWGRLSRKLINGIRDKQSGKTILDFLKSDGFANRNFMQLIHDDSLTFKEDIQKAQVSGQGDSLHEHIANLAGSPAIKKGILQTVKVVDELVKVMGRHKPENIVIEMARENQTTQKGQKNSRERMKRIEEGIKELGSQILKEHPVENTQLQNEKLYLYYLQNGRDMYVDQELDINRLSDYDVDHIVPQSFLKDDSIDNKVLTRSDKARGKSDNVPSEEVVKKMKNYWRQLLNAKLITQRKFDNLTKAERGGLSELDKAGFIKRQLVETRQITKHVAQILDSRMNTKYDENDKLIREVKVITLKSKLVSDFRKDFQFYKVREINNYHHAHDAYLNAVVGTALIKKYPKLESEFVYGDYKVYDVRKMIAKSEQEIGKATAKYFFYSNIMNFFKTEITLANGEIRKRPLIETNGETGEIVWDKGRDFATVRKVLSMPQVNIVKKTEVQTGGFSKESILPKRNSDKLIARKKDWDPKKYGGFDSPTVAYSVLVVAKVEKGKSKKLKSVKELLGITIMERSSFEKNPIDFLEAKGYKEVKKDLIIKLPKYSLFELENGRKRMLASAGELQKGNELALPSKYVNFLYLASHYEKLKGSPEDNEQKQLFVEQHKHYLDEIIEQISEFSKRVILADANLDKVLSAYNKHRDKPIREQAENIIHLFTLTNLGAPAAFKYFDTTIDRKRYTSTKEVLDATLIHQSITGLYETRIDLSQLGGDGGGGSGSSEAAAKGGTLNIEDEHRLHETSKEPDVSLGSTWLSDFPQAWAETGGMGLAVRQAPLIIPLKATSTPVSIKQYPMSQEARLGIKPHIQRLLDQGILVPCQSPWNTPLLPVKKPGTNDYRPVQDLREVNKRVEDIHPTVPNPYNLLSGLPPSHQWYTVLDLKDAFFCLRLHPTSQPLFAFEWRDPEMGISGQLTWTRLPQGFKNSPTLFNEALHRDLADFRIQHPDLILLQYVDDLLLAATSELDCQQGTRALLQTLGNLGYRASAKKAQICQKQVKYLGYLLKEGQRWLTEARKETVMGQPTPKTPRQLREFLGKAGFCRLFIPGFAEMAAPLYPLTKPGTLFNWGPDQQKAYQEIKQALLTAPALGLPDLTKPFELFVDEKQGYAKGVLTQKLGPWRRPVAYLSKKLDPVAAGWPPCLRMVAAIAVLTKDAGKLTMGQPLVILAPHAVEALVKQPPDRWLSNARMTHYQALLLDTDRVQFGPVVALNPATLLPLPEEGLQHNCLDILAEAHGTRPDLTDQPLPDADHTWYTDGSSLLQEGQRKAGAAVTTETEVIWAKALPAGTSAQRAELIALTQALKMAEGKKLNVYTDSRYAFATAHIHGEIYRRRGWLTSEGKEIKNKDEILALLKALFLPKRLSIIHCPGHQKGHSAEARGNRMADQAARKAAITETPDTSTLLAGKRTADGSEFEKRTADGSEFESPKKKAKVE

SEQ ID NO: 2843 - protein, 2096 aa, synthetic construct
MPAAKRVKLDGGDKKYSIGLDIGTNSVGWAVITDEYKVPSKKFKVLGNTDRHSIKKNLIGALLFDSGETAEATRLKRTARRRYTRRKNRICYLQEIFSNEMAKVDDSFFHRLEESFLVEEDKKHERHPIFGNIVDEVAYHEKYPTIYHLRKKLVDSTDKADLRLIYLALAHMIKFRGHFLIEGDLNPDNSDVDKLFIQLVQTYNQLFEENPINASGVDAKAILSARLSKSRRLENLIAQLPGEKKNGLFGNLIALSLGLTPNFKSNFDLAEDAKLQLSKDTYDDDLDNLLAQIGDQYADLFLAAKNLSDAILLSDILRVNTEITKAPLSASMIKRYDEHHQDLTLLKALVRQQLPEKYKEIFFDQSKNGYAGYIDGGASQEEFYKFIKPILEKMDGTEELLVKLNREDLLRKQRTFDNGSIPHQIHLGELHAILRRQEDFYPFLKDNREKIEKILTFRIPYYVGPLARGNSRFAWMTRKSEETITPWNFEEVVDKGASAQSFIERMTNFDKNLPNEKVLPKHSLLYEYFTVYNELTKVKYVTEGMRKPAFLSGEQKKAIVDLLFKTNRKVTVKQLKEDYFKKIECFDSVEISGVEDRFNASLGTYHDLLKIIKDKDFLDNEENEDILEDIVLTLTLFEDREMIEERLKTYAHLFDDKVMKQLKRRRYTGWGRLSRKLINGIRDKQSGKTILDFLKSDGFANRNFMQLIHDDSLTFKEDIQKAQVSGQGDSLHEHIANLAGSPAIKKGILQTVKVVDELVKVMGRHKPENIVIEMARENQTTQKGQKNSRERMKRIEEGIKELGSQILKEHPVENTQLQNEKLYLYYLQNGRDMYVDQELDINRLSDYDVDHIVPQSFLKDDSIDNKVLTRSDKARGKSDNVPSEEVVKKMKNYWRQLLNAKLITQRKFDNLTKAERGGLSELDKAGFIKRQLVETRQITKHVAQILDSRMNTKYDENDKLIREVKVITLKSKLVSDFRKDFQFYKVREINNYHHAHDAYLNAVVGTALIKKYPKLESEFVYGDYKVYDVRKMIAKSEQEIGKATAKYFFYSNIMNFFKTEITLANGEIRKRPLIETNGETGEIVWDKGRDFATVRKVLSMPQVNIVKKTEVQTGGFSKESILPKRNSDKLIARKKDWDPKKYGGFDSPTVAYSVLVVAKVEKGKSKKLKSVKELLGITIMERSSFEKNPIDFLEAKGYKEVKKDLIIKLPKYSLFELENGRKRMLASAGELQKGNELALPSKYVNFLYLASHYEKLKGSPEDNEQKQLFVEQHKHYLDEIIEQISEFSKRVILADANLDKVLSAYNKHRDKPIREQAENIIHLFTLTNLGAPAAFKYFDTTIDRKRYTSTKEVLDATLIHQSITGLYETRIDLSQLGGDGGEAAAKGGGPAPGGTLNIEDEHRLHETSKEPDVSLGSTWLSDFPQAWAETGGMGLAVRQAPLIIPLKATSTPVSIKQYPMSQEARLGIKPHIQRLLDQGILVPCQSPWNTPLLPVKKPGTNDYRPVQDLREVNKRVEDIHPTVPNPYNLLSGLPPSHQWYTVLDLKDAFFCLRLHPTSQPLFAFEWRDPEMGISGQLTWTRLPQGFKNSPTLFNEALHRDLADFRIQHPDLILLQYVDDLLLAATSELDCQQGTRALLQTLGNLGYRASAKKAQICQKQVKYLGYLLKEGQRWLTEARKETVMGQPTPKTPRQLREFLGKAGFCRLFIPGFAEMAAPLYPLTKPGTLFNWGPDQQKAYQEIKQALLTAPALGLPDLTKPFELFVDEKQGYAKGVLTQKLGPWRRPVAYLSKKLDPVAAGWPPCLRMVAAIAVLTKDAGKLTMGQPLVILAPHAVEALVKQPPDRWLSNARMTHYQALLLDTDRVQFGPVVALNPATLLPLPEEGLQHNCLDILAEAHGTRPDLTDQPLPDADHTWYTDGSSLLQEGQRKAGAAVTTETEVIWAKALPAGTSAQRAELIALTQALKMAEGKKLNVYTDSRYAFATAHIHGEIYRRRGWLTSEGKEIKNKDEILALLKALFLPKRLSIIHCPGHQKGHSAEARGNRMADQAARKAAITETPDTSTLLAGKRTADGSEFEKRTADGSEFESPKKKAKVE

SEQ ID NO: 2844 - protein, 2105 aa, synthetic construct
MPAAKRVKLDGGDKKYSIGLDIGTNSVGWAVITDEYKVPSKKFKVLGNTDRHSIKKNLIGALLFDSGETAEATRLKRTARRRYTRRKNRICYLQEIFSNEMAKVDDSFFHRLEESFLVEEDKKHERHPIFGNIVDEVAYHEKYPTIYHLRKKLVDSTDKADLRLIYLALAHMIKFRGHFLIEGDLNPDNSDVDKLFIQLVQTYNQLFEENPINASGVDAKAILSARLSKSRRLENLIAQLPGEKKNGLFGNLIALSLGLTPNFKSNFDLAEDAKLQLSKDTYDDDLDNLLAQIGDQYADLFLAAKNLSDAILLSDILRVNTEITKAPLSASMIKRYDEHHQDLTLLKALVRQQLPEKYKEIFFDQSKNGYAGYIDGGASQEEFYKFIKPILEKMDGTEELLVKLNREDLLRKQRTFDNGSIPHQIHLGELHAILRRQEDFYPFLKDNREKIEKILTFRIPYYVGPLARGNSRFAWMTRKSEETITPWNFEEVVDKGASAQSFIERMTNFDKNLPNEKVLPKHSLLYEYFTVYNELTKVKYVTEGMRKPAFLSGEQKKAIVDLLFKTNRKVTVKQLKEDYFKKIECFDSVEISGVEDRFNASLGTYHDLLKIIKDKDFLDNEENEDILEDIVLTLTLFEDREMIEERLKTYAHLFDDKVMKQLKRRRYTGWGRLSRKLINGIRDKQSGKTILDFLKSDGFANRNFMQLIHDDSLTFKEDIQKAQVSGQGDSLHEHIANLAGSPAIKKGILQTVKVVDELVKVMGRHKPENIVIEMARENQTTQKGQKNSRERMKRIEEGIKELGSQILKEHPVENTQLQNEKLYLYYLQNGRDMYVDQELDINRLSDYDVDHIVPQSFLKDDSIDNKVLTRSDKARGKSDNVPSEEVVKKMKNYWRQLLNAKLITQRKFDNLTKAERGGLSELDKAGFIKRQLVETRQITKHVAQILDSRMNTKYDENDKLIREVKVITLKSKLVSDFRKDFQFYKVREINNYHHAHDAYLNAVVGTALIKKYPKLESEFVYGDYKVYDVRKMIAKSEQEIGKATAKYFFYSNIMNFFKTEITLANGEIRKRPLIETNGETGEIVWDKGRDFATVRKVLSMPQVNIVKKTEVQTGGFSKESILPKRNSDKLIARKKDWDPKKYGGFDSPTVAYSVLVVAKVEKGKSKKLKSVKELLGITIMERSSFEKNPIDFLEAKGYKEVKKDLIIKLPKYSLFELENGRKRMLASAGELQKGNELALPSKYVNFLYLASHYEKLKGSPEDNEQKQLFVEQHKHYLDEIIEQISEFSKRVILADANLDKVLSAYNKHRDKPIREQAENIIHLFTLTNLGAPAAFKYFDTTIDRKRYTSTKEVLDATLIHQSITGLYETRIDLSQLGGDGGEAAAKEAAAKEAAAKEAAAKGGTLNIEDEHRLHETSKEPDVSLGSTWLSDFPQAWAETGGMGLAVRQAPLIIPLKATSTPVSIKQYPMSQEARLGIKPHIQRLLDQGILVPCQSPWNTPLLPVKKPGTNDYRPVQDLREVNKRVEDIHPTVPNPYNLLSGLPPSHQWYTVLDLKDAFFCLRLHPTSQPLFAFEWRDPEMGISGQLTWTRLPQGFKNSPTLFNEALHRDLADFRIQHPDLILLQYVDDLLLAATSELDCQQGTRALLQTLGNLGYRASAKKAQICQKQVKYLGYLLKEGQRWLTEARKETVMGQPTPKTPRQLREFLGKAGFCRLFIPGFAEMAAPLYPLTKPGTLFNWGPDQQKAYQEIKQALLTAPALGLPDLTKPFELFVDEKQGYAKGVLTQKLGPWRRPVAYLSKKLDPVAAGWPPCLRMVAAIAVLTKDAGKLTMGQPLVILAPHAVEALVKQPPDRWLSNARMTHYQALLLDTDRVQFGPVVALNPATLLPLPEEGLQHNCLDILAEAHGTRPDLTDQPLPDADHTWYTDGSSLLQEGQRKAGAAVTTETEVIWAKALPAGTSAQRAELIALTQALKMAEGKKLNVYTDSRYAFATAHIHGEIYRRRGWLTSEGKEIKNKDEILALLKALFLPKRLSIIHCPGHQKGHSAEARGNRMADQAARKAAITETPDTSTLLAGKRTADGSEFEKRTADGSEFESPKKKAKVE

SEQ ID NO: 2845 - protein, 2095 aa, synthetic construct
MPAAKRVKLDGGDKKYSIGLDIGTNSVGWAVITDEYKVPSKKFKVLGNTDRHSIKKNLIGALLFDSGETAEATRLKRTARRRYTRRKNRICYLQEIFSNEMAKVDDSFFHRLEESFLVEEDKKHERHPIFGNIVDEVAYHEKYPTIYHLRKKLVDSTDKADLRLIYLALAHMIKFRGHFLIEGDLNPDNSDVDKLFIQLVQTYNQLFEENPINASGVDAKAILSARLSKSRRLENLIAQLPGEKKNGLFGNLIALSLGLTPNFKSNFDLAEDAKLQLSKDTYDDDLDNLLAQIGDQYADLFLAAKNLSDAILLSDILRVNTEITKAPLSASMIKRYDEHHQDLTLLKALVRQQLPEKYKEIFFDQSKNGYAGYIDGGASQEEFYKFIKPILEKMDGTEELLVKLNREDLLRKQRTFDNGSIPHQIHLGELHAILRRQEDFYPFLKDNREKIEKILTFRIPYYVGPLARGNSRFAWMTRKSEETITPWNFEEVVDKGASAQSFIERMTNFDKNLPNEKVLPKHSLLYEYFTVYNELTKVKYVTEGMRKPAFLSGEQKKAIVDLLFKTNRKVTVKQLKEDYFKKIECFDSVEISGVEDRFNASLGTYHDLLKIIKDKDFLDNEENEDILEDIVLTLTLFEDREMIEERLKTYAHLFDDKVMKQLKRRRYTGWGRLSRKLINGIRDKQSGKTILDFLKSDGFANRNFMQLIHDDSLTFKEDIQKAQVSGQGDSLHEHIANLAGSPAIKKGILQTVKVVDELVKVMGRHKPENIVIEMARENQTTQKGQKNSRERMKRIEEGIKELGSQILKEHPVENTQLQNEKLYLYYLQNGRDMYVDQELDINRLSDYDVDHIVPQSFLKDDSIDNKVLTRSDKARGKSDNVPSEEVVKKMKNYWRQLLNAKLITQRKFDNLTKAERGGLSELDKAGFIKRQLVETRQITKHVAQILDSRMNTKYDENDKLIREVKVITLKSKLVSDFRKDFQFYKVREINNYHHAHDAYLNAVVGTALIKKYPKLESEFVYGDYKVYDVRKMIAKSEQEIGKATAKYFFYSNIMNFFKTEITLANGEIRKRPLIETNGETGEIVWDKGRDFATVRKVLSMPQVNIVKKTEVQTGGFSKESILPKRNSDKLIARKKDWDPKKYGGFDSPTVAYSVLVVAKVEKGKSKKLKSVKELLGITIMERSSFEKNPIDFLEAKGYKEVKKDLIIKLPKYSLFELENGRKRMLASAGELQKGNELALPSKYVNFLYLASHYEKLKGSPEDNEQKQLFVEQHKHYLDEIIEQISEFSKRVILADANLDKVLSAYNKHRDKPIREQAENIIHLFTLTNLGAPAAFKYFDTTIDRKRYTSTKEVLDATLIHQSITGLYETRIDLSQLGGDGGEAAAKEAAAKGGTLNIEDEHRLHETSKEPDVSLGSTWLSDFPQAWAETGGMGLAVRQAPLIIPLKATSTPVSIKQYPMSQEARLGIKPHIQRLLDQGILVPCQSPWNTPLLPVKKPGTNDYRPVQDLREVNKRVEDIHPTVPNPYNLLSGLPPSHQWYTVLDLKDAFFCLRLHPTSQPLFAFEWRDPEMGISGQLTWTRLPQGFKNSPTLFNEALHRDLADFRIQHPDLILLQYVDDLLLAATSELDCQQGTRALLQTLGNLGYRASAKKAQICQKQVKYLGYLLKEGQRWLTEARKETVMGQPTPKTPRQLREFLGKAGFCRLFIPGFAEMAAPLYPLTKPGTLFNWGPDQQKAYQEIKQALLTAPALGLPDLTKPFELFVDEKQGYAKGVLTQKLGPWRRPVAYLSKKLDPVAAGWPPCLRMVAAIAVLTKDAGKLTMGQPLVILAPHAVEALVKQPPDRWLSNARMTHYQALLLDTDRVQFGPVVALNPATLLPLPEEGLQHNCLDILAEAHGTRPDLTDQPLPDADHTWYTDGSSLLQEGQRKAGAAVTTETEVIWAKALPAGTSAQRAELIALTQALKMAEGKKLNVYTDSRYAFATAHIHGEIYRRRGWLTSEGKEIKNKDEILALLKALFLPKRLSIIHCPGHQKGHSAEARGNRMADQAARKAAITETPDTSTLLAGKRTADGSEFEKRTADGSEFESPKKKAKVE

SEQ ID NO: 2846 - protein, 2094 aa, synthetic construct
MPAAKRVKLDGGDKKYSIGLDIGTNSVGWAVITDEYKVPSKKFKVLGNTDRHSIKKNLIGALLFDSGETAEATRLKRTARRRYTRRKNRICYLQEIFSNEMAKVDDSFFHRLEESFLVEEDKKHERHPIFGNIVDEVAYHEKYPTIYHLRKKLVDSTDKADLRLIYLALAHMIKFRGHFLIEGDLNPDNSDVDKLFIQLVQTYNQLFEENPINASGVDAKAILSARLSKSRRLENLIAQLPGEKKNGLFGNLIALSLGLTPNFKSNFDLAEDAKLQLSKDTYDDDLDNLLAQIGDQYADLFLAAKNLSDAILLSDILRVNTEITKAPLSASMIKRYDEHHQDLTLLKALVRQQLPEKYKEIFFDQSKNGYAGYIDGGASQEEFYKFIKPILEKMDGTEELLVKLNREDLLRKQRTFDNGSIPHQIHLGELHAILRRQEDFYPFLKDNREKIEKILTFRIPYYVGPLARGNSRFAWMTRKSEETITPWNFEEVVDKGASAQSFIERMTNFDKNLPNEKVLPKHSLLYEYFTVYNELTKVKYVTEGMRKPAFLSGEQKKAIVDLLFKTNRKVTVKQLKEDYFKKIECFDSVEISGVEDRFNASLGTYHDLLKIIKDKDFLDNEENEDILEDIVLTLTLFEDREMIEERLKTYAHLFDDKVMKQLKRRRYTGWGRLSRKLINGIRDKQSGKTILDFLKSDGFANRNFMQLIHDDSLTFKEDIQKAQVSGQGDSLHEHIANLAGSPAIKKGILQTVKVVDELVKVMGRHKPENIVIEMARENQTTQKGQKNSRERMKRIEEGIKELGSQILKEHPVENTQLQNEKLYLYYLQNGRDMYVDQELDINRLSDYDVDHIVPQSFLKDDSIDNKVLTRSDKARGKSDNVPSEEVVKKMKNYWRQLLNAKLITQRKFDNLTKAERGGLSELDKAGFIKRQLVETRQITKHVAQILDSRMNTKYDENDKLIREVKVITLKSKLVSDFRKDFQFYKVREINNYHHAHDAYLNAVVGTALIKKYPKLESEFVYGDYKVYDVRKMIAKSEQEIGKATAKYFFYSNIMNFFKTEITLANGEIRKRPLIETNGETGEIVWDKGRDFATVRKVLSMPQVNIVKKTEVQTGGFSKESILPKRNSDKLIARKKDWDPKKYGGFDSPTVAYSVLVVAKVEKGKSKKLKSVKELLGITIMERSSFEKNPIDFLEAKGYKEVKKDLIIKLPKYSLFELENGRKRMLASAGELQKGNELALPSKYVNFLYLASHYEKLKGSPEDNEQKQLFVEQHKHYLDEIIEQISEFSKRVILADANLDKVLSAYNKHRDKPIREQAENIIHLFTLTNLGAPAAFKYFDTTIDRKRYTSTKEVLDATLIHQSITGLYETRIDLSQLGGDGGGGGGGSGSSGGTLNIEDEHRLHETSKEPDVSLGSTWLSDFPQAWAETGGMGLAVRQAPLIIPLKATSTPVSIKQYPMSQEARLGIKPHIQRLLDQGILVPCQSPWNTPLLPVKKPGTNDYRPVQDLREVNKRVEDIHPTVPNPYNLLSGLPPSHQWYTVLDLKDAFFCLRLHPTSQPLFAFEWRDPEMGISGQLTWTRLPQGFKNSPTLFNEALHRDLADFRIQHPDLILLQYVDDLLLAATSELDCQQGTRALLQTLGNLGYRASAKKAQICQKQVKYLGYLLKEGQRWLTEARKETVMGQPTPKTPRQLREFLGKAGFCRLFIPGFAEMAAPLYPLTKPGTLFNWGPDQQKAYQEIKQALLTAPALGLPDLTKPFELFVDEKQGYAKGVLTQKLGPWRRPVAYLSKKLDPVAAGWPPCLRMVAAIAVLTKDAGKLTMGQPLVILAPHAVEALVKQPPDRWLSNARMTHYQALLLDTDRVQFGPVVALNPATLLPLPEEGLQHNCLDILAEAHGTRPDLTDQPLPDADHTWYTDGSSLLQEGQRKAGAAVTTETEVIWAKALPAGTSAQRAELIALTQALKMAEGKKLNVYTDSRYAFATAHIHGEIYRRRGWLTSEGKEIKNKDEILALLKALFLPKRLSIIHCPGHQKGHSAEARGNRMADQAARKAAITETPDTSTLLAGKRTADGSEFEKRTADGSEFESPKKKAKVE

SEQ ID NO: 2847 - protein, 2094 aa, synthetic construct
MPAAKRVKLDGGDKKYSIGLDIGTNSVGWAVITDEYKVPSKKFKVLGNTDRHSIKKNLIGALLFDSGETAEATRLKRTARRRYTRRKNRICYLQEIFSNEMAKVDDSFFHRLEESFLVEEDKKHERHPIFGNIVDEVAYHEKYPTIYHLRKKLVDSTDKADLRLIYLALAHMIKFRGHFLIEGDLNPDNSDVDKLFIQLVQTYNQLFEENPINASGVDAKAILSARLSKSRRLENLIAQLPGEKKNGLFGNLIALSLGLTPNFKSNFDLAEDAKLQLSKDTYDDDLDNLLAQIGDQYADLFLAAKNLSDAILLSDILRVNTEITKAPLSASMIKRYDEHHQDLTLLKALVRQQLPEKYKEIFFDQSKNGYAGYIDGGASQEEFYKFIKPILEKMDGTEELLVKLNREDLLRKQRTFDNGSIPHQIHLGELHAILRRQEDFYPFLKDNREKIEKILTFRIPYYVGPLARGNSRFAWMTRKSEETITPWNFEEVVDKGASAQSFIERMTNFDKNLPNEKVLPKHSLLYEYFTVYNELTKVKYVTEGMRKPAFLSGEQKKAIVDLLFKTNRKVTVKQLKEDYFKKIECFDSVEISGVEDRFNASLGTYHDLLKIIKDKDFLDNEENEDILEDIVLTLTLFEDREMIEERLKTYAHLFDDKVMKQLKRRRYTGWGRLSRKLINGIRDKQSGKTILDFLKSDGFANRNFMQLIHDDSLTFKEDIQKAQVSGQGDSLHEHIANLAGSPAIKKGILQTVKVVDELVKVMGRHKPENIVIEMARENQTTQKGQKNSRERMKRIEEGIKELGSQILKEHPVENTQLQNEKLYLYYLQNGRDMYVDQELDINRLSDYDVDHIVPQSFLKDDSIDNKVLTRSDKARGKSDNVPSEEVVKKMKNYWRQLLNAKLITQRKFDNLTKAERGGLSELDKAGFIKRQLVETRQITKHVAQILDSRMNTKYDENDKLIREVKVITLKSKLVSDFRKDFQFYKVREINNYHHAHDAYLNAVVGTALIKKYPKLESEFVYGDYKVYDVRKMIAKSEQEIGKATAKYFFYSNIMNFFKTEITLANGEIRKRPLIETNGETGEIVWDKGRDFATVRKVLSMPQVNIVKKTEVQTGGFSKESILPKRNSDKLIARKKDWDPKKYGGFDSPTVAYSVLVVAKVEKGKSKKLKSVKELLGITIMERSSFEKNPIDFLEAKGYKEVKKDLIIKLPKYSLFELENGRKRMLASAGELQKGNELALPSKYVNFLYLASHYEKLKGSPEDNEQKQLFVEQHKHYLDEIIEQISEFSKRVILADANLDKVLSAYNKHRDKPIREQAENIIHLFTLTNLGAPAAFKYFDTTIDRKRYTSTKEVLDATLIHQSITGLYETRIDLSQLGGDGGPAPGSSGGGGGTLNIEDEHRLHETSKEPDVSLGSTWLSDFPQAWAETGGMGLAVRQAPLIIPLKATSTPVSIKQYPMSQEARLGIKPHIQRLLDQGILVPCQSPWNTPLLPVKKPGTNDYRPVQDLREVNKRVEDIHPTVPNPYNLLSGLPPSHQWYTVLDLKDAFFCLRLHPTSQPLFAFEWRDPEMGISGQLTWTRLPQGFKNSPTLFNEALHRDLADFRIQHPDLILLQYVDDLLLAATSELDCQQGTRALLQTLGNLGYRASAKKAQICQKQVKYLGYLLKEGQRWLTEARKETVMGQPTPKTPRQLREFLGKAGFCRLFIPGFAEMAAPLYPLTKPGTLFNWGPDQQKAYQEIKQALLTAPALGLPDLTKPFELFVDEKQGYAKGVLTQKLGPWRRPVAYLSKKLDPVAAGWPPCLRMVAAIAVLTKDAGKLTMGQPLVILAPHAVEALVKQPPDRWLSNARMTHYQALLLDTDRVQFGPVVALNPATLLPLPEEGLQHNCLDILAEAHGTRPDLTDQPLPDADHTWYTDGSSLLQEGQRKAGAAVTTETEVIWAKALPAGTSAQRAELIALTQALKMAEGKKLNVYTDSRYAFATAHIHGEIYRRRGWLTSEGKEIKNKDEILALLKALFLPKRLSIIHCPGHQKGHSAEARGNRMADQAARKAAITETPDTSTLLAGKRTADGSEFEKRTADGSEFESPKKKAKVE

SEQ ID NO: 2848 - protein, 2094 aa, synthetic construct
MPAAKRVKLDGGDKKYSIGLDIGTNSVGWAVITDEYKVPSKKFKVLGNTDRHSIKKNLIGALLFDSGETAEATRLKRTARRRYTRRKNRICYLQEIFSNEMAKVDDSFFHRLEESFLVEEDKKHERHPIFGNIVDEVAYHEKYPTIYHLRKKLVDSTDKADLRLIYLALAHMIKFRGHFLIEGDLNPDNSDVDKLFIQLVQTYNQLFEENPINASGVDAKAILSARLSKSRRLENLIAQLPGEKKNGLFGNLIALSLGLTPNFKSNFDLAEDAKLQLSKDTYDDDLDNLLAQIGDQYADLFLAAKNLSDAILLSDILRVNTEITKAPLSASMIKRYDEHHQDLTLLKALVRQQLPEKYKEIFFDQSKNGYAGYIDGGASQEEFYKFIKPILEKMDGTEELLVKLNREDLLRKQRTFDNGSIPHQIHLGELHAILRRQEDFYPFLKDNREKIEKILTFRIPYYVGPLARGNSRFAWMTRKSEETITPWNFEEVVDKGASAQSFIERMTNFDKNLPNEKVLPKHSLLYEYFTVYNELTKVKYVTEGMRKPAFLSGEQKKAIVDLLFKTNRKVTVKQLKEDYFKKIECFDSVEISGVEDRFNASLGTYHDLLKIIKDKDFLDNEENEDILEDIVLTLTLFEDREMIEERLKTYAHLFDDKVMKQLKRRRYTGWGRLSRKLINGIRDKQSGKTILDFLKSDGFANRNFMQLIHDDSLTFKEDIQKAQVSGQGDSLHEHIANLAGSPAIKKGILQTVKVVDELVKVMGRHKPENIVIEMARENQTTQKGQKNSRERMKRIEEGIKELGSQILKEHPVENTQLQNEKLYLYYLQNGRDMYVDQELDINRLSDYDVDHIVPQSFLKDDSIDNKVLTRSDKARGKSDNVPSEEVVKKMKNYWRQLLNAKLITQRKFDNLTKAERGGLSELDKAGFIKRQLVETRQITKHVAQILDSRMNTKYDENDKLIREVKVITLKSKLVSDFRKDFQFYKVREINNYHHAHDAYLNAVVGTALIKKYPKLESEFVYGDYKVYDVRKMIAKSEQEIGKATAKYFFYSNIMNFFKTEITLANGEIRKRPLIETNGETGEIVWDKGRDFATVRKVLSMPQVNIVKKTEVQTGGFSKESILPKRNSDKLIARKKDWDPKKYGGFDSPTVAYSVLVVAKVEKGKSKKLKSVKELLGITIMERSSFEKNPIDFLEAKGYKEVKKDLIIKLPKYSLFELENGRKRMLASAGELQKGNELALPSKYVNFLYLASHYEKLKGSPEDNEQKQLFVEQHKHYLDEIIEQISEFSKRVILADANLDKVLSAYNKHRDKPIREQAENIIHLFTLTNLGAPAAFKYFDTTIDRKRYTSTKEVLDATLIHQSITGLYETRIDLSQLGGDGGGGGGSSPAPGGTLNIEDEHRLHETSKEPDVSLGSTWLSDFPQAWAETGGMGLAVRQAPLIIPLKATSTPVSIKQYPMSQEARLGIKPHIQRLLDQGILVPCQSPWNTPLLPVKKPGTNDYRPVQDLREVNKRVEDIHPTVPNPYNLLSGLPPSHQWYTVLDLKDAFFCLRLHPTSQPLFAFEWRDPEMGISGQLTWTRLPQGFKNSPTLFNEALHRDLADFRIQHPDLILLQYVDDLLLAATSELDCQQGTRALLQTLGNLGYRASAKKAQICQKQVKYLGYLLKEGQRWLTEARKETVMGQPTPKTPRQLREFLGKAGFCRLFIPGFAEMAAPLYPLTKPGTLFNWGPDQQKAYQEIKQALLTAPALGLPDLTKPFELFVDEKQGYAKGVLTQKLGPWRRPVAYLSKKLDPVAAGWPPCLRMVAAIAVLTKDAGKLTMGQPLVILAPHAVEALVKQPPDRWLSNARMTHYQALLLDTDRVQFGPVVALNPATLLPLPEEGLQHNCLDILAEAHGTRPDLTDQPLPDADHTWYTDGSSLLQEGQRKAGAAVTTETEVIWAKALPAGTSAQRAELIALTQALKMAEGKKLNVYTDSRYAFATAHIHGEIYRRRGWLTSEGKEIKNKDEILALLKALFLPKRLSIIHCPGHQKGHSAEARGNRMADQAARKAAITETPDTSTLLAGKRTADGSEFEKRTADGSEFESPKKKAKVE

SEQ ID NO: 2849 - protein, 2093 aa, synthetic construct
MPAAKRVKLDGGDKKYSIGLDIGTNSVGWAVITDEYKVPSKKFKVLGNTDRHSIKKNLIGALLFDSGETAEATRLKRTARRRYTRRKNRICYLQEIFSNEMAKVDDSFFHRLEESFLVEEDKKHERHPIFGNIVDEVAYHEKYPTIYHLRKKLVDSTDKADLRLIYLALAHMIKFRGHFLIEGDLNPDNSDVDKLFIQLVQTYNQLFEENPINASGVDAKAILSARLSKSRRLENLIAQLPGEKKNGLFGNLIALSLGLTPNFKSNFDLAEDAKLQLSKDTYDDDLDNLLAQIGDQYADLFLAAKNLSDAILLSDILRVNTEITKAPLSASMIKRYDEHHQDLTLLKALVRQQLPEKYKEIFFDQSKNGYAGYIDGGASQEEFYKFIKPILEKMDGTEELLVKLNREDLLRKQRTFDNGSIPHQIHLGELHAILRRQEDFYPFLKDNREKIEKILTFRIPYYVGPLARGNSRFAWMTRKSEETITPWNFEEVVDKGASAQSFIERMTNFDKNLPNEKVLPKHSLLYEYFTVYNELTKVKYVTEGMRKPAFLSGEQKKAIVDLLFKTNRKVTVKQLKEDYFKKIECFDSVEISGVEDRFNASLGTYHDLLKIIKDKDFLDNEENEDILEDIVLTLTLFEDREMIEERLKTYAHLFDDKVMKQLKRRRYTGWGRLSRKLINGIRDKQSGKTILDFLKSDGFANRNFMQLIHDDSLTFKEDIQKAQVSGQGDSLHEHIANLAGSPAIKKGILQTVKVVDELVKVMGRHKPENIVIEMARENQTTQKGQKNSRERMKRIEEGIKELGSQILKEHPVENTQLQNEKLYLYYLQNGRDMYVDQELDINRLSDYDVDHIVPQSFLKDDSIDNKVLTRSDKARGKSDNVPSEEVVKKMKNYWRQLLNAKLITQRKFDNLTKAERGGLSELDKAGFIKRQLVETRQITKHVAQILDSRMNTKYDENDKLIREVKVITLKSKLVSDFRKDFQFYKVREINNYHHAHDAYLNAVVGTALIKKYPKLESEFVYGDYKVYDVRKMIAKSEQEIGKATAKYFFYSNIMNFFKTEITLANGEIRKRPLIETNGETGEIVWDKGRDFATVRKVLSMPQVNIVKKTEVQTGGFSKESILPKRNSDKLIARKKDWDPKKYGGFDSPTVAYSVLVVAKVEKGKSKKLKSVKELLGITIMERSSFEKNPIDFLEAKGYKEVKKDLIIKLPKYSLFELENGRKRMLASAGELQKGNELALPSKYVNFLYLASHYEKLKGSPEDNEQKQLFVEQHKHYLDEIIEQISEFSKRVILADANLDKVLSAYNKHRDKPIREQAENIIHLFTLTNLGAPAAFKYFDTTIDRKRYTSTKEVLDATLIHQSITGLYETRIDLSQLGGDGGGGSEAAAKGGTLNIEDEHRLHETSKEPDVSLGSTWLSDFPQAWAETGGMGLAVRQAPLIIPLKATSTPVSIKQYPMSQEARLGIKPHIQRLLDQGILVPCQSPWNTPLLPVKKPGTNDYRPVQDLREVNKRVEDIHPTVPNPYNLLSGLPPSHQWYTVLDLKDAFFCLRLHPTSQPLFAFEWRDPEMGISGQLTWTRLPQGFKNSPTLFNEALHRDLADFRIQHPDLILLQYVDDLLLAATSELDCQQGTRALLQTLGNLGYRASAKKAQICQKQVKYLGYLLKEGQRWLTEARKETVMGQPTPKTPRQLREFLGKAGFCRLFIPGFAEMAAPLYPLTKPGTLFNWGPDQQKAYQEIKQALLTAPALGLPDLTKPFELFVDEKQGYAKGVLTQKLGPWRRPVAYLSKKLDPVAAGWPPCLRMVAAIAVLTKDAGKLTMGQPLVILAPHAVEALVKQPPDRWLSNARMTHYQALLLDTDRVQFGPVVALNPATLLPLPEEGLQHNCLDILAEAHGTRPDLTDQPLPDADHTWYTDGSSLLQEGQRKAGAAVTTETEVIWAKALPAGTSAQRAELIALTQALKMAEGKKLNVYTDSRYAFATAHIHGEIYRRRGWLTSEGKEIKNKDEILALLKALFLPKRLSIIHCPGHQKGHSAEARGNRMADQAARKAAITETPDTSTLLAGKRTADGSEFEKRTADGSEFESPKKKAKVE

SEQ ID NO: 2850 - protein, 2093 aa, synthetic construct
MPAAKRVKLDGGDKKYSIGLDIGTNSVGWAVITDEYKVPSKKFKVLGNTDRHSIKKNLIGALLFDSGETAEATRLKRTARRRYTRRKNRICYLQEIFSNEMAKVDDSFFHRLEESFLVEEDKKHERHPIFGNIVDEVAYHEKYPTIYHLRKKLVDSTDKADLRLIYLALAHMIKFRGHFLIEGDLNPDNSDVDKLFIQLVQTYNQLFEENPINASGVDAKAILSARLSKSRRLENLIAQLPGEKKNGLFGNLIALSLGLTPNFKSNFDLAEDAKLQLSKDTYDDDLDNLLAQIGDQYADLFLAAKNLSDAILLSDILRVNTEITKAPLSASMIKRYDEHHQDLTLLKALVRQQLPEKYKEIFFDQSKNGYAGYIDGGASQEEFYKFIKPILEKMDGTEELLVKLNREDLLRKQRTFDNGSIPHQIHLGELHAILRRQEDFYPFLKDNREKIEKILTFRIPYYVGPLARGNSRFAWMTRKSEETITPWNFEEVVDKGASAQSFIERMTNFDKNLPNEKVLPKHSLLYEYFTVYNELTKVKYVTEGMRKPAFLSGEQKKAIVDLLFKTNRKVTVKQLKEDYFKKIECFDSVEISGVEDRFNASLGTYHDLLKIIKDKDFLDNEENEDILEDIVLTLTLFEDREMIEERLKTYAHLFDDKVMKQLKRRRYTGWGRLSRKLINGIRDKQSGKTILDFLKSDGFANRNFMQLIHDDSLTFKEDIQKAQVSGQGDSLHEHIANLAGSPAIKKGILQTVKVVDELVKVMGRHKPENIVIEMARENQTTQKGQKNSRERMKRIEEGIKELGSQILKEHPVENTQLQNEKLYLYYLQNGRDMYVDQELDINRLSDYDVDHIVPQSFLKDDSIDNKVLTRSDKARGKSDNVPSEEVVKKMKNYWRQLLNAKLITQRKFDNLTKAERGGLSELDKAGFIKRQLVETRQITKHVAQILDSRMNTKYDENDKLIREVKVITLKSKLVSDFRKDFQFYKVREINNYHHAHDAYLNAVVGTALIKKYPKLESEFVYGDYKVYDVRKMIAKSEQEIGKATAKYFFYSNIMNFFKTEITLANGEIRKRPLIETNGETGEIVWDKGRDFATVRKVLSMPQVNIVKKTEVQTGGFSKESILPKRNSDKLIARKKDWDPKKYGGFDSPTVAYSVLVVAKVEKGKSKKLKSVKELLGITIMERSSFEKNPIDFLEAKGYKEVKKDLIIKLPKYSLFELENGRKRMLASAGELQKGNELALPSKYVNFLYLASHYEKLKGSPEDNEQKQLFVEQHKHYLDEIIEQISEFSKRVILADANLDKVLSAYNKHRDKPIREQAENIIHLFTLTNLGAPAAFKYFDTTIDRKRYTSTKEVLDATLIHQSITGLYETRIDLSQLGGDGGEAAAKPAPGGTLNIEDEHRLHETSKEPDVSLGSTWLSDFPQAWAETGGMGLAVRQAPLIIPLKATSTPVSIKQYPMSQEARLGIKPHIQRLLDQGILVPCQSPWNTPLLPVKKPGTNDYRPVQDLREVNKRVEDIHPTVPNPYNLLSGLPPSHQWYTVLDLKDAFFCLRLHPTSQPLFAFEWRDPEMGISGQLTWTRLPQGFKNSPTLFNEALHRDLADFRIQHPDLILLQYVDDLLLAATSELDCQQGTRALLQTLGNLGYRASAKKAQICQKQVKYLGYLLKEGQRWLTEARKETVMGQPTPKTPRQLREFLGKAGFCRLFIPGFAEMAAPLYPLTKPGTLFNWGPDQQKAYQEIKQALLTAPALGLPDLTKPFELFVDEKQGYAKGVLTQKLGPWRRPVAYLSKKLDPVAAGWPPCLRMVAAIAVLTKDAGKLTMGQPLVILAPHAVEALVKQPPDRWLSNARMTHYQALLLDTDRVQFGPVVALNPATLLPLPEEGLQHNCLDILAEAHGTRPDLTDQPLPDADHTWYTDGSSLLQEGQRKAGAAVTTETEVIWAKALPAGTSAQRAELIALTQALKMAEGKKLNVYTDSRYAFATAHIHGEIYRRRGWLTSEGKEIKNKDEILALLKALFLPKRLSIIHCPGHQKGHSAEARGNRMADQAARKAAITETPDTSTLLAGKRTADGSEFEKRTADGSEFESPKKKAKVE

SEQ ID NO: 2851 - protein, 2096 aa, synthetic construct
MPAAKRVKLDGGDKKYSIGLDIGTNSVGWAVITDEYKVPSKKFKVLGNTDRHSIKKNLIGALLFDSGETAEATRLKRTARRRYTRRKNRICYLQEIFSNEMAKVDDSFFHRLEESFLVEEDKKHERHPIFGNIVDEVAYHEKYPTIYHLRKKLVDSTDKADLRLIYLALAHMIKFRGHFLIEGDLNPDNSDVDKLFIQLVQTYNQLFEENPINASGVDAKAILSARLSKSRRLENLIAQLPGEKKNGLFGNLIALSLGLTPNFKSNFDLAEDAKLQLSKDTYDDDLDNLLAQIGDQYADLFLAAKNLSDAILLSDILRVNTEITKAPLSASMIKRYDEHHQDLTLLKALVRQQLPEKYKEIFFDQSKNGYAGYIDGGASQEEFYKFIKPILEKMDGTEELLVKLNREDLLRKQRTFDNGSIPHQIHLGELHAILRRQEDFYPFLKDNREKIEKILTFRIPYYVGPLARGNSRFAWMTRKSEETITPWNFEEVVDKGASAQSFIERMTNFDKNLPNEKVLPKHSLLYEYFTVYNELTKVKYVTEGMRKPAFLSGEQKKAIVDLLFKTNRKVTVKQLKEDYFKKIECFDSVEISGVEDRFNASLGTYHDLLKIIKDKDFLDNEENEDILEDIVLTLTLFEDREMIEERLKTYAHLFDDKVMKQLKRRRYTGWGRLSRKLINGIRDKQSGKTILDFLKSDGFANRNFMQLIHDDSLTFKEDIQKAQVSGQGDSLHEHIANLAGSPAIKKGILQTVKVVDELVKVMGRHKPENIVIEMARENQTTQKGQKNSRERMKRIEEGIKELGSQILKEHPVENTQLQNEKLYLYYLQNGRDMYVDQELDINRLSDYDVDHIVPQSFLKDDSIDNKVLTRSDKARGKSDNVPSEEVVKKMKNYWRQLLNAKLITQRKFDNLTKAERGGLSELDKAGFIKRQLVETRQITKHVAQILDSRMNTKYDENDKLIREVKVITLKSKLVSDFRKDFQFYKVREINNYHHAHDAYLNAVVGTALIKKYPKLESEFVYGDYKVYDVRKMIAKSEQEIGKATAKYFFYSNIMNFFKTEITLANGEIRKRPLIETNGETGEIVWDKGRDFATVRKVLSMPQVNIVKKTEVQTGGFSKESILPKRNSDKLIARKKDWDPKKYGGFDSPTVAYSVLVVAKVEKGKSKKLKSVKELLGITIMERSSFEKNPIDFLEAKGYKEVKKDLIIKLPKYSLFELENGRKRMLASAGELQKGNELALPSKYVNFLYLASHYEKLKGSPEDNEQKQLFVEQHKHYLDEIIEQISEFSKRVILADANLDKVLSAYNKHRDKPIREQAENIIHLFTLTNLGAPAAFKYFDTTIDRKRYTSTKEVLDATLIHQSITGLYETRIDLSQLGGDGGPAPAPAPAPAPGGTLNIEDEHRLHETSKEPDVSLGSTWLSDFPQAWAETGGMGLAVRQAPLIIPLKATSTPVSIKQYPMSQEARLGIKPHIQRLLDQGILVPCQSPWNTPLLPVKKPGTNDYRPVQDLREVNKRVEDIHPTVPNPYNLLSGLPPSHQWYTVLDLKDAFFCLRLHPTSQPLFAFEWRDPEMGISGQLTWTRLPQGFKNSPTLFNEALHRDLADFRIQHPDLILLQYVDDLLLAATSELDCQQGTRALLQTLGNLGYRASAKKAQICQKQVKYLGYLLKEGQRWLTEARKETVMGQPTPKTPRQLREFLGKAGFCRLFIPGFAEMAAPLYPLTKPGTLFNWGPDQQKAYQEIKQALLTAPALGLPDLTKPFELFVDEKQGYAKGVLTQKLGPWRRPVAYLSKKLDPVAAGWPPCLRMVAAIAVLTKDAGKLTMGQPLVILAPHAVEALVKQPPDRWLSNARMTHYQALLLDTDRVQFGPVVALNPATLLPLPEEGLQHNCLDILAEAHGTRPDLTDQPLPDADHTWYTDGSSLLQEGQRKAGAAVTTETEVIWAKALPAGTSAQRAELIALTQALKMAEGKKLNVYTDSRYAFATAHIHGEIYRRRGWLTSEGKEIKNKDEILALLKALFLPKRLSIIHCPGHQKGHSAEARGNRMADQAARKAAITETPDTSTLLAGKRTADGSEFEKRTADGSEFESPKKKAKVE

SEQ ID NO: 2852 - protein, 2094 aa, synthetic construct
MPAAKRVKLDGGDKKYSIGLDIGTNSVGWAVITDEYKVPSKKFKVLGNTDRHSIKKNLIGALLFDSGETAEATRLKRTARRRYTRRKNRICYLQEIFSNEMAKVDDSFFHRLEESFLVEEDKKHERHPIFGNIVDEVAYHEKYPTIYHLRKKLVDSTDKADLRLIYLALAHMIKFRGHFLIEGDLNPDNSDVDKLFIQLVQTYNQLFEENPINASGVDAKAILSARLSKSRRLENLIAQLPGEKKNGLFGNLIALSLGLTPNFKSNFDLAEDAKLQLSKDTYDDDLDNLLAQIGDQYADLFLAAKNLSDAILLSDILRVNTEITKAPLSASMIKRYDEHHQDLTLLKALVRQQLPEKYKEIFFDQSKNGYAGYIDGGASQEEFYKFIKPILEKMDGTEELLVKLNREDLLRKQRTFDNGSIPHQIHLGELHAILRRQEDFYPFLKDNREKIEKILTFRIPYYVGPLARGNSRFAWMTRKSEETITPWNFEEVVDKGASAQSFIERMTNFDKNLPNEKVLPKHSLLYEYFTVYNELTKVKYVTEGMRKPAFLSGEQKKAIVDLLFKTNRKVTVKQLKEDYFKKIECFDSVEISGVEDRFNASLGTYHDLLKIIKDKDFLDNEENEDILEDIVLTLTLFEDREMIEERLKTYAHLFDDKVMKQLKRRRYTGWGRLSRKLINGIRDKQSGKTILDFLKSDGFANRNFMQLIHDDSLTFKEDIQKAQVSGQGDSLHEHIANLAGSPAIKKGILQTVKVVDELVKVMGRHKPENIVIEMARENQTTQKGQKNSRERMKRIEEGIKELGSQILKEHPVENTQLQNEKLYLYYLQNGRDMYVDQELDINRLSDYDVDHIVPQSFLKDDSIDNKVLTRSDKARGKSDNVPSEEVVKKMKNYWRQLLNAKLITQRKFDNLTKAERGGLSELDKAGFIKRQLVETRQITKHVAQILDSRMNTKYDENDKLIREVKVITLKSKLVSDFRKDFQFYKVREINNYHHAHDAYLNAVVGTALIKKYPKLESEFVYGDYKVYDVRKMIAKSEQEIGKATAKYFFYSNIMNFFKTEITLANGEIRKRPLIETNGETGEIVWDKGRDFATVRKVLSMPQVNIVKKTEVQTGGFSKESILPKRNSDKLIARKKDWDPKKYGGFDSPTVAYSVLVVAKVEKGKSKKLKSVKELLGITIMERSSFEKNPIDFLEAKGYKEVKKDLIIKLPKYSLFELENGRKRMLASAGELQKGNELALPSKYVNFLYLASHYEKLKGSPEDNEQKQLFVEQHKHYLDEIIEQISEFSKRVILADANLDKVLSAYNKHRDKPIREQAENIIHLFTLTNLGAPAAFKYFDTTIDRKRYTSTKEVLDATLIHQSITGLYETRIDLSQLGGDGGGGSPAPGSSGGTLNIEDEHRLHETSKEPDVSLGSTWLSDFPQAWAETGGMGLAVRQAPLIIPLKATSTPVSIKQYPMSQEARLGIKPHIQRLLDQGILVPCQSPWNTPLLPVKKPGTNDYRPVQDLREVNKRVEDIHPTVPNPYNLLSGLPPSHQWYTVLDLKDAFFCLRLHPTSQPLFAFEWRDPEMGISGQLTWTRLPQGFKNSPTLFNEALHRDLADFRIQHPDLILLQYVDDLLLAATSELDCQQGTRALLQTLGNLGYRASAKKAQICQKQVKYLGYLLKEGQRWLTEARKETVMGQPTPKTPRQLREFLGKAGFCRLFIPGFAEMAAPLYPLTKPGTLFNWGPDQQKAYQEIKQALLTAPALGLPDLTKPFELFVDEKQGYAKGVLTQKLGPWRRPVAYLSKKLDPVAAGWPPCLRMVAAIAVLTKDAGKLTMGQPLVILAPHAVEALVKQPPDRWLSNARMTHYQALLLDTDRVQFGPVVALNPATLLPLPEEGLQHNCLDILAEAHGTRPDLTDQPLPDADHTWYTDGSSLLQEGQRKAGAAVTTETEVIWAKALPAGTSAQRAELIALTQALKMAEGKKLNVYTDSRYAFATAHIHGEIYRRRGWLTSEGKEIKNKDEILALLKALFLPKRLSIIHCPGHQKGHSAEARGNRMADQAARKAAITETPDTSTLLAGKRTADGSEFEKRTADGSEFESPKKKAKVE

SEQ ID NO: 2853 - protein, 2091 aa, synthetic construct
MPAAKRVKLDGGDKKYSIGLDIGTNSVGWAVITDEYKVPSKKFKVLGNTDRHSIKKNLIGALLFDSGETAEATRLKRTARRRYTRRKNRICYLQEIFSNEMAKVDDSFFHRLEESFLVEEDKKHERHPIFGNIVDEVAYHEKYPTIYHLRKKLVDSTDKADLRLIYLALAHMIKFRGHFLIEGDLNPDNSDVDKLFIQLVQTYNQLFEENPINASGVDAKAILSARLSKSRRLENLIAQLPGEKKNGLFGNLIALSLGLTPNFKSNFDLAEDAKLQLSKDTYDDDLDNLLAQIGDQYADLFLAAKNLSDAILLSDILRVNTEITKAPLSASMIKRYDEHHQDLTLLKALVRQQLPEKYKEIFFDQSKNGYAGYIDGGASQEEFYKFIKPILEKMDGTEELLVKLNREDLLRKQRTFDNGSIPHQIHLGELHAILRRQEDFYPFLKDNREKIEKILTFRIPYYVGPLARGNSRFAWMTRKSEETITPWNFEEVVDKGASAQSFIERMTNFDKNLPNEKVLPKHSLLYEYFTVYNELTKVKYVTEGMRKPAFLSGEQKKAIVDLLFKTNRKVTVKQLKEDYFKKIECFDSVEISGVEDRFNASLGTYHDLLKIIKDKDFLDNEENEDILEDIVLTLTLFEDREMIEERLKTYAHLFDDKVMKQLKRRRYTGWGRLSRKLINGIRDKQSGKTILDFLKSDGFANRNFMQLIHDDSLTFKEDIQKAQVSGQGDSLHEHIANLAGSPAIKKGILQTVKVVDELVKVMGRHKPENIVIEMARENQTTQKGQKNSRERMKRIEEGIKELGSQILKEHPVENTQLQNEKLYLYYLQNGRDMYVDQELDINRLSDYDVDHIVPQSFLKDDSIDNKVLTRSDKARGKSDNVPSEEVVKKMKNYWRQLLNAKLITQRKFDNLTKAERGGLSELDKAGFIKRQLVETRQITKHVAQILDSRMNTKYDENDKLIREVKVITLKSKLVSDFRKDFQFYKVREINNYHHAHDAYLNAVVGTALIKKYPKLESEFVYGDYKVYDVRKMIAKSEQEIGKATAKYFFYSNIMNFFKTEITLANGEIRKRPLIETNGETGEIVWDKGRDFATVRKVLSMPQVNIVKKTEVQTGGFSKESILPKRNSDKLIARKKDWDPKKYGGFDSPTVAYSVLVVAKVEKGKSKKLKSVKELLGITIMERSSFEKNPIDFLEAKGYKEVKKDLIIKLPKYSLFELENGRKRMLASAGELQKGNELALPSKYVNFLYLASHYEKLKGSPEDNEQKQLFVEQHKHYLDEIIEQISEFSKRVILADANLDKVLSAYNKHRDKPIREQAENIIHLFTLTNLGAPAAFKYFDTTIDRKRYTSTKEVLDATLIHQSITGLYETRIDLSQLGGDGGGGSGGSGGTLNIEDEHRLHETSKEPDVSLGSTWLSDFPQAWAETGGMGLAVRQAPLIIPLKATSTPVSIKQYPMSQEARLGIKPHIQRLLDQGILVPCQSPWNTPLLPVKKPGTNDYRPVQDLREVNKRVEDIHPTVPNPYNLLSGLPPSHQWYTVLDLKDAFFCLRLHPTSQPLFAFEWRDPEMGISGQLTWTRLPQGFKNSPTLFNEALHRDLADFRIQHPDLILLQYVDDLLLAATSELDCQQGTRALLQTLGNLGYRASAKKAQICQKQVKYLGYLLKEGQRWLTEARKETVMGQPTPKTPRQLREFLGKAGFCRLFIPGFAEMAAPLYPLTKPGTLFNWGPDQQKAYQEIKQALLTAPALGLPDLTKPFELFVDEKQGYAKGVLTQKLGPWRRPVAYLSKKLDPVAAGWPPCLRMVAAIAVLTKDAGKLTMGQPLVILAPHAVEALVKQPPDRWLSNARMTHYQALLLDTDRVQFGPVVALNPATLLPLPEEGLQHNCLDILAEAHGTRPDLTDQPLPDADHTWYTDGSSLLQEGQRKAGAAVTTETEVIWAKALPAGTSAQRAELIALTQALKMAEGKKLNVYTDSRYAFATAHIHGEIYRRRGWLTSEGKEIKNKDEILALLKALFLPKRLSIIHCPGHQKGHSAEARGNRMADQAARKAAITETPDTSTLLAGKRTADGSEFEKRTADGSEFESPKKKAKVE

SEQ ID NO: 2854 - protein, 2094 aa, synthetic construct
MPAAKRVKLDGGDKKYSIGLDIGTNSVGWAVITDEYKVPSKKFKVLGNTDRHSIKKNLIGALLFDSGETAEATRLKRTARRRYTRRKNRICYLQEIFSNEMAKVDDSFFHRLEESFLVEEDKKHERHPIFGNIVDEVAYHEKYPTIYHLRKKLVDSTDKADLRLIYLALAHMIKFRGHFLIEGDLNPDNSDVDKLFIQLVQTYNQLFEENPINASGVDAKAILSARLSKSRRLENLIAQLPGEKKNGLFGNLIALSLGLTPNFKSNFDLAEDAKLQLSKDTYDDDLDNLLAQIGDQYADLFLAAKNLSDAILLSDILRVNTEITKAPLSASMIKRYDEHHQDLTLLKALVRQQLPEKYKEIFFDQSKNGYAGYIDGGASQEEFYKFIKPILEKMDGTEELLVKLNREDLLRKQRTFDNGSIPHQIHLGELHAILRRQEDFYPFLKDNREKIEKILTFRIPYYVGPLARGNSRFAWMTRKSEETITPWNFEEVVDKGASAQSFIERMTNFDKNLPNEKVLPKHSLLYEYFTVYNELTKVKYVTEGMRKPAFLSGEQKKAIVDLLFKTNRKVTVKQLKEDYFKKIECFDSVEISGVEDRFNASLGTYHDLLKIIKDKDFLDNEENEDILEDIVLTLTLFEDREMIEERLKTYAHLFDDKVMKQLKRRRYTGWGRLSRKLINGIRDKQSGKTILDFLKSDGFANRNFMQLIHDDSLTFKEDIQKAQVSGQGDSLHEHIANLAGSPAIKKGILQTVKVVDELVKVMGRHKPENIVIEMARENQTTQKGQKNSRERMKRIEEGIKELGSQILKEHPVENTQLQNEKLYLYYLQNGRDMYVDQELDINRLSDYDVDHIVPQSFLKDDSIDNKVLTRSDKARGKSDNVPSEEVVKKMKNYWRQLLNAKLITQRKFDNLTKAERGGLSELDKAGFIKRQLVETRQITKHVAQILDSRMNTKYDENDKLIREVKVITLKSKLVSDFRKDFQFYKVREINNYHHAHDAYLNAVVGTALIKKYPKLESEFVYGDYKVYDVRKMIAKSEQEIGKATAKYFFYSNIMNFFKTEITLANGEIRKRPLIETNGETGEIVWDKGRDFATVRKVLSMPQVNIVKKTEVQTGGFSKESILPKRNSDKLIARKKDWDPKKYGGFDSPTVAYSVLVVAKVEKGKSKKLKSVKELLGITIMERSSFEKNPIDFLEAKGYKEVKKDLIIKLPKYSLFELENGRKRMLASAGELQKGNELALPSKYVNFLYLASHYEKLKGSPEDNEQKQLFVEQHKHYLDEIIEQISEFSKRVILADANLDKVLSAYNKHRDKPIREQAENIIHLFTLTNLGAPAAFKYFDTTIDRKRYTSTKEVLDATLIHQSITGLYETRIDLSQLGGDGGGGGGSSGGSGGTLNIEDEHRLHETSKEPDVSLGSTWLSDFPQAWAETGGMGLAVRQAPLIIPLKATSTPVSIKQYPMSQEARLGIKPHIQRLLDQGILVPCQSPWNTPLLPVKKPGTNDYRPVQDLREVNKRVEDIHPTVPNPYNLLSGLPPSHQWYTVLDLKDAFFCLRLHPTSQPLFAFEWRDPEMGISGQLTWTRLPQGFKNSPTLFNEALHRDLADFRIQHPDLILLQYVDDLLLAATSELDCQQGTRALLQTLGNLGYRASAKKAQICQKQVKYLGYLLKEGQRWLTEARKETVMGQPTPKTPRQLREFLGKAGFCRLFIPGFAEMAAPLYPLTKPGTLFNWGPDQQKAYQEIKQALLTAPALGLPDLTKPFELFVDEKQGYAKGVLTQKLGPWRRPVAYLSKKLDPVAAGWPPCLRMVAAIAVLTKDAGKLTMGQPLVILAPHAVEALVKQPPDRWLSNARMTHYQALLLDTDRVQFGPVVALNPATLLPLPEEGLQHNCLDILAEAHGTRPDLTDQPLPDADHTWYTDGSSLLQEGQRKAGAAVTTETEVIWAKALPAGTSAQRAELIALTQALKMAEGKKLNVYTDSRYAFATAHIHGEIYRRRGWLTSEGKEIKNKDEILALLKALFLPKRLSIIHCPGHQKGHSAEARGNRMADQAARKAAITETPDTSTLLAGKRTADGSEFEKRTADGSEFESPKKKAKVE

SEQ ID NO: 2855 - protein, 2091 aa, synthetic construct
MPAAKRVKLDGGDKKYSIGLDIGTNSVGWAVITDEYKVPSKKFKVLGNTDRHSIKKNLIGALLFDSGETAEATRLKRTARRRYTRRKNRICYLQEIFSNEMAKVDDSFFHRLEESFLVEEDKKHERHPIFGNIVDEVAYHEKYPTIYHLRKKLVDSTDKADLRLIYLALAHMIKFRGHFLIEGDLNPDNSDVDKLFIQLVQTYNQLFEENPINASGVDAKAILSARLSKSRRLENLIAQLPGEKKNGLFGNLIALSLGLTPNFKSNFDLAEDAKLQLSKDTYDDDLDNLLAQIGDQYADLFLAAKNLSDAILLSDILRVNTEITKAPLSASMIKRYDEHHQDLTLLKALVRQQLPEKYKEIFFDQSKNGYAGYIDGGASQEEFYKFIKPILEKMDGTEELLVKLNREDLLRKQRTFDNGSIPHQIHLGELHAILRRQEDFYPFLKDNREKIEKILTFRIPYYVGPLARGNSRFAWMTRKSEETITPWNFEEVVDKGASAQSFIERMTNFDKNLPNEKVLPKHSLLYEYFTVYNELTKVKYVTEGMRKPAFLSGEQKKAIVDLLFKTNRKVTVKQLKEDYFKKIECFDSVEISGVEDRFNASLGTYHDLLKIIKDKDFLDNEENEDILEDIVLTLTLFEDREMIEERLKTYAHLFDDKVMKQLKRRRYTGWGRLSRKLINGIRDKQSGKTILDFLKSDGFANRNFMQLIHDDSLTFKEDIQKAQVSGQGDSLHEHIANLAGSPAIKKGILQTVKVVDELVKVMGRHKPENIVIEMARENQTTQKGQKNSRERMKRIEEGIKELGSQILKEHPVENTQLQNEKLYLYYLQNGRDMYVDQELDINRLSDYDVDHIVPQSFLKDDSIDNKVLTRSDKARGKSDNVPSEEVVKKMKNYWRQLLNAKLITQRKFDNLTKAERGGLSELDKAGFIKRQLVETRQITKHVAQILDSRMNTKYDENDKLIREVKVITLKSKLVSDFRKDFQFYKVREINNYHHAHDAYLNAVVGTALIKKYPKLESEFVYGDYKVYDVRKMIAKSEQEIGKATAKYFFYSNIMNFFKTEITLANGEIRKRPLIETNGETGEIVWDKGRDFATVRKVLSMPQVNIVKKTEVQTGGFSKESILPKRNSDKLIARKKDWDPKKYGGFDSPTVAYSVLVVAKVEKGKSKKLKSVKELLGITIMERSSFEKNPIDFLEAKGYKEVKKDLIIKLPKYSLFELENGRKRMLASAGELQKGNELALPSKYVNFLYLASHYEKLKGSPEDNEQKQLFVEQHKHYLDEIIEQISEFSKRVILADANLDKVLSAYNKHRDKPIREQAENIIHLFTLTNLGAPAAFKYFDTTIDRKRYTSTKEVLDATLIHQSITGLYETRIDLSQLGGDGGGSSGGSGGTLNIEDEHRLHETSKEPDVSLGSTWLSDFPQAWAETGGMGLAVRQAPLIIPLKATSTPVSIKQYPMSQEARLGIKPHIQRLLDQGILVPCQSPWNTPLLPVKKPGTNDYRPVQDLREVNKRVEDIHPTVPNPYNLLSGLPPSHQWYTVLDLKDAFFCLRLHPTSQPLFAFEWRDPEMGISGQLTWTRLPQGFKNSPTLFNEALHRDLADFRIQHPDLILLQYVDDLLLAATSELDCQQGTRALLQTLGNLGYRASAKKAQICQKQVKYLGYLLKEGQRWLTEARKETVMGQPTPKTPRQLREFLGKAGFCRLFIPGFAEMAAPLYPLTKPGTLFNWGPDQQKAYQEIKQALLTAPALGLPDLTKPFELFVDEKQGYAKGVLTQKLGPWRRPVAYLSKKLDPVAAGWPPCLRMVAAIAVLTKDAGKLTMGQPLVILAPHAVEALVKQPPDRWLSNARMTHYQALLLDTDRVQFGPVVALNPATLLPLPEEGLQHNCLDILAEAHGTRPDLTDQPLPDADHTWYTDGSSLLQEGQRKAGAAVTTETEVIWAKALPAGTSAQRAELIALTQALKMAEGKKLNVYTDSRYAFATAHIHGEIYRRRGWLTSEGKEIKNKDEILALLKALFLPKRLSIIHCPGHQKGHSAEARGNRMADQAARKAAITETPDTSTLLAGKRTADGSEFEKRTADGSEFESPKKKAKVE

SEQ ID NO: 2856 - protein, 2093 aa, synthetic construct
MPAAKRVKLDGGDKKYSIGLDIGTNSVGWAVITDEYKVPSKKFKVLGNTDRHSIKKNLIGALLFDSGETAEATRLKRTARRRYTRRKNRICYLQEIFSNEMAKVDDSFFHRLEESFLVEEDKKHERHPIFGNIVDEVAYHEKYPTIYHLRKKLVDSTDKADLRLIYLALAHMIKFRGHFLIEGDLNPDNSDVDKLFIQLVQTYNQLFEENPINASGVDAKAILSARLSKSRRLENLIAQLPGEKKNGLFGNLIALSLGLTPNFKSNFDLAEDAKLQLSKDTYDDDLDNLLAQIGDQYADLFLAAKNLSDAILLSDILRVNTEITKAPLSASMIKRYDEHHQDLTLLKALVRQQLPEKYKEIFFDQSKNGYAGYIDGGASQEEFYKFIKPILEKMDGTEELLVKLNREDLLRKQRTFDNGSIPHQIHLGELHAILRRQEDFYPFLKDNREKIEKILTFRIPYYVGPLARGNSRFAWMTRKSEETITPWNFEEVVDKGASAQSFIERMTNFDKNLPNEKVLPKHSLLYEYFTVYNELTKVKYVTEGMRKPAFLSGEQKKAIVDLLFKTNRKVTVKQLKEDYFKKIECFDSVEISGVEDRFNASLGTYHDLLKIIKDKDFLDNEENEDILEDIVLTLTLFEDREMIEERLKTYAHLFDDKVMKQLKRRRYTGWGRLSRKLINGIRDKQSGKTILDFLKSDGFANRNFMQLIHDDSLTFKEDIQKAQVSGQGDSLHEHIANLAGSPAIKKGILQTVKVVDELVKVMGRHKPENIVIEMARENQTTQKGQKNSRERMKRIEEGIKELGSQILKEHPVENTQLQNEKLYLYYLQNGRDMYVDQELDINRLSDYDVDHIVPQSFLKDDSIDNKVLTRSDKARGKSDNVPSEEVVKKMKNYWRQLLNAKLITQRKFDNLTKAERGGLSELDKAGFIKRQLVETRQITKHVAQILDSRMNTKYDENDKLIREVKVITLKSKLVSDFRKDFQFYKVREINNYHHAHDAYLNAVVGTALIKKYPKLESEFVYGDYKVYDVRKMIAKSEQEIGKATAKYFFYSNIMNFFKTEITLANGEIRKRPLIETNGETGEIVWDKGRDFATVRKVLSMPQVNIVKKTEVQTGGFSKESILPKRNSDKLIARKKDWDPKKYGGFDSPTVAYSVLVVAKVEKGKSKKLKSVKELLGITIMERSSFEKNPIDFLEAKGYKEVKKDLIIKLPKYSLFELENGRKRMLASAGELQKGNELALPSKYVNFLYLASHYEKLKGSPEDNEQKQLFVEQHKHYLDEIIEQISEFSKRVILADANLDKVLSAYNKHRDKPIREQAENIIHLFTLTNLGAPAAFKYFDTTIDRKRYTSTKEVLDATLIHQSITGLYETRIDLSQLGGDGGGGGEAAAKGGTLNIEDEHRLHETSKEPDVSLGSTWLSDFPQAWAETGGMGLAVRQAPLIIPLKATSTPVSIKQYPMSQEARLGIKPHIQRLLDQGILVPCQSPWNTPLLPVKKPGTNDYRPVQDLREVNKRVEDIHPTVPNPYNLLSGLPPSHQWYTVLDLKDAFFCLRLHPTSQPLFAFEWRDPEMGISGQLTWTRLPQGFKNSPTLFNEALHRDLADFRIQHPDLILLQYVDDLLLAATSELDCQQGTRALLQTLGNLGYRASAKKAQICQKQVKYLGYLLKEGQRWLTEARKETVMGQPTPKTPRQLREFLGKAGFCRLFIPGFAEMAAPLYPLTKPGTLFNWGPDQQKAYQEIKQALLTAPALGLPDLTKPFELFVDEKQGYAKGVLTQKLGPWRRPVAYLSKKLDPVAAGWPPCLRMVAAIAVLTKDAGKLTMGQPLVILAPHAVEALVKQPPDRWLSNARMTHYQALLLDTDRVQFGPVVALNPATLLPLPEEGLQHNCLDILAEAHGTRPDLTDQPLPDADHTWYTDGSSLLQEGQRKAGAAVTTETEVIWAKALPAGTSAQRAELIALTQALKMAEGKKLNVYTDSRYAFATAHIHGEIYRRRGWLTSEGKEIKNKDEILALLKALFLPKRLSIIHCPGHQKGHSAEARGNRMADQAARKAAITETPDTSTLLAGKRTADGSEFEKRTADGSEFESPKKKAKVE

SEQ ID NO: 2857 - protein, 2096 aa, synthetic construct
MPAAKRVKLDGGDKKYSIGLDIGTNSVGWAVITDEYKVPSKKFKVLGNTDRHSIKKNLIGALLFDSGETAEATRLKRTARRRYTRRKNRICYLQEIFSNEMAKVDDSFFHRLEESFLVEEDKKHERHPIFGNIVDEVAYHEKYPTIYHLRKKLVDSTDKADLRLIYLALAHMIKFRGHFLIEGDLNPDNSDVDKLFIQLVQTYNQLFEENPINASGVDAKAILSARLSKSRRLENLIAQLPGEKKNGLFGNLIALSLGLTPNFKSNFDLAEDAKLQLSKDTYDDDLDNLLAQIGDQYADLFLAAKNLSDAILLSDILRVNTEITKAPLSASMIKRYDEHHQDLTLLKALVRQQLPEKYKEIFFDQSKNGYAGYIDGGASQEEFYKFIKPILEKMDGTEELLVKLNREDLLRKQRTFDNGSIPHQIHLGELHAILRRQEDFYPFLKDNREKIEKILTFRIPYYVGPLARGNSRFAWMTRKSEETITPWNFEEVVDKGASAQSFIERMTNFDKNLPNEKVLPKHSLLYEYFTVYNELTKVKYVTEGMRKPAFLSGEQKKAIVDLLFKTNRKVTVKQLKEDYFKKIECFDSVEISGVEDRFNASLGTYHDLLKIIKDKDFLDNEENEDILEDIVLTLTLFEDREMIEERLKTYAHLFDDKVMKQLKRRRYTGWGRLSRKLINGIRDKQSGKTILDFLKSDGFANRNFMQLIHDDSLTFKEDIQKAQVSGQGDSLHEHIANLAGSPAIKKGILQTVKVVDELVKVMGRHKPENIVIEMARENQTTQKGQKNSRERMKRIEEGIKELGSQILKEHPVENTQLQNEKLYLYYLQNGRDMYVDQELDINRLSDYDVDHIVPQSFLKDDSIDNKVLTRSDKARGKSDNVPSEEVVKKMKNYWRQLLNAKLITQRKFDNLTKAERGGLSELDKAGFIKRQLVETRQITKHVAQILDSRMNTKYDENDKLIREVKVITLKSKLVSDFRKDFQFYKVREINNYHHAHDAYLNAVVGTALIKKYPKLESEFVYGDYKVYDVRKMIAKSEQEIGKATAKYFFYSNIMNFFKTEITLANGEIRKRPLIETNGETGEIVWDKGRDFATVRKVLSMPQVNIVKKTEVQTGGFSKESILPKRNSDKLIARKKDWDPKKYGGFDSPTVAYSVLVVAKVEKGKSKKLKSVKELLGITIMERSSFEKNPIDFLEAKGYKEVKKDLIIKLPKYSLFELENGRKRMLASAGELQKGNELALPSKYVNFLYLASHYEKLKGSPEDNEQKQLFVEQHKHYLDEIIEQISEFSKRVILADANLDKVLSAYNKHRDKPIREQAENIIHLFTLTNLGAPAAFKYFDTTIDRKRYTSTKEVLDATLIHQSITGLYETRIDLSQLGGDGGGGSEAAAKPAPGGTLNIEDEHRLHETSKEPDVSLGSTWLSDFPQAWAETGGMGLAVRQAPLIIPLKATSTPVSIKQYPMSQEARLGIKPHIQRLLDQGILVPCQSPWNTPLLPVKKPGTNDYRPVQDLREVNKRVEDIHPTVPNPYNLLSGLPPSHQWYTVLDLKDAFFCLRLHPTSQPLFAFEWRDPEMGISGQLTWTRLPQGFKNSPTLFNEALHRDLADFRIQHPDLILLQYVDDLLLAATSELDCQQGTRALLQTLGNLGYRASAKKAQICQKQVKYLGYLLKEGQRWLTEARKETVMGQPTPKTPRQLREFLGKAGFCRLFIPGFAEMAAPLYPLTKPGTLFNWGPDQQKAYQEIKQALLTAPALGLPDLTKPFELFVDEKQGYAKGVLTQKLGPWRRPVAYLSKKLDPVAAGWPPCLRMVAAIAVLTKDAGKLTMGQPLVILAPHAVEALVKQPPDRWLSNARMTHYQALLLDTDRVQFGPVVALNPATLLPLPEEGLQHNCLDILAEAHGTRPDLTDQPLPDADHTWYTDGSSLLQEGQRKAGAAVTTETEVIWAKALPAGTSAQRAELIALTQALKMAEGKKLNVYTDSRYAFATAHIHGEIYRRRGWLTSEGKEIKNKDEILALLKALFLPKRLSIIHCPGHQKGHSAEARGNRMADQAARKAAITETPDTSTLLAGKRTADGSEFEKRTADGSEFESPKKKAKVE

SEQ ID NO: 2858 - protein, 2101 aa, synthetic construct
MPAAKRVKLDGGDKKYSIGLDIGTNSVGWAVITDEYKVPSKKFKVLGNTDRHSIKKNLIGALLFDSGETAEATRLKRTARRRYTRRKNRICYLQEIFSNEMAKVDDSFFHRLEESFLVEEDKKHERHPIFGNIVDEVAYHEKYPTIYHLRKKLVDSTDKADLRLIYLALAHMIKFRGHFLIEGDLNPDNSDVDKLFIQLVQTYNQLFEENPINASGVDAKAILSARLSKSRRLENLIAQLPGEKKNGLFGNLIALSLGLTPNFKSNFDLAEDAKLQLSKDTYDDDLDNLLAQIGDQYADLFLAAKNLSDAILLSDILRVNTEITKAPLSASMIKRYDEHHQDLTLLKALVRQQLPEKYKEIFFDQSKNGYAGYIDGGASQEEFYKFIKPILEKMDGTEELLVKLNREDLLRKQRTFDNGSIPHQIHLGELHAILRRQEDFYPFLKDNREKIEKILTFRIPYYVGPLARGNSRFAWMTRKSEETITPWNFEEVVDKGASAQSFIERMTNFDKNLPNEKVLPKHSLLYEYFTVYNELTKVKYVTEGMRKPAFLSGEQKKAIVDLLFKTNRKVTVKQLKEDYFKKIECFDSVEISGVEDRFNASLGTYHDLLKIIKDKDFLDNEENEDILEDIVLTLTLFEDREMIEERLKTYAHLFDDKVMKQLKRRRYTGWGRLSRKLINGIRDKQSGKTILDFLKSDGFANRNFMQLIHDDSLTFKEDIQKAQVSGQGDSLHEHIANLAGSPAIKKGILQTVKVVDELVKVMGRHKPENIVIEMARENQTTQKGQKNSRERMKRIEEGIKELGSQILKEHPVENTQLQNEKLYLYYLQNGRDMYVDQELDINRLSDYDVDHIVPQSFLKDDSIDNKVLTRSDKARGKSDNVPSEEVVKKMKNYWRQLLNAKLITQRKFDNLTKAERGGLSELDKAGFIKRQLVETRQITKHVAQILDSRMNTKYDENDKLIREVKVITLKSKLVSDFRKDFQFYKVREINNYHHAHDAYLNAVVGTALIKKYPKLESEFVYGDYKVYDVRKMIAKSEQEIGKATAKYFFYSNIMNFFKTEITLANGEIRKRPLIETNGETGEIVWDKGRDFATVRKVLSMPQVNIVKKTEVQTGGFSKESILPKRNSDKLIARKKDWDPKKYGGFDSPTVAYSVLVVAKVEKGKSKKLKSVKELLGITIMERSSFEKNPIDFLEAKGYKEVKKDLIIKLPKYSLFELENGRKRMLASAGELQKGNELALPSKYVNFLYLASHYEKLKGSPEDNEQKQLFVEQHKHYLDEIIEQISEFSKRVILADANLDKVLSAYNKHRDKPIREQAENIIHLFTLTNLGAPAAFKYFDTTIDRKRYTSTKEVLDATLIHQSITGLYETRIDLSQLGGDGGSGSETPGTSESATPESGGTLNIEDEHRLHETSKEPDVSLGSTWLSDFPQAWAETGGMGLAVRQAPLIIPLKATSTPVSIKQYPMSQEARLGIKPHIQRLLDQGILVPCQSPWNTPLLPVKKPGTNDYRPVQDLREVNKRVEDIHPTVPNPYNLLSGLPPSHQWYTVLDLKDAFFCLRLHPTSQPLFAFEWRDPEMGISGQLTWTRLPQGFKNSPTLFNEALHRDLADFRIQHPDLILLQYVDDLLLAATSELDCQQGTRALLQTLGNLGYRASAKKAQICQKQVKYLGYLLKEGQRWLTEARKETVMGQPTPKTPRQLREFLGKAGFCRLFIPGFAEMAAPLYPLTKPGTLFNWGPDQQKAYQEIKQALLTAPALGLPDLTKPFELFVDEKQGYAKGVLTQKLGPWRRPVAYLSKKLDPVAAGWPPCLRMVAAIAVLTKDAGKLTMGQPLVILAPHAVEALVKQPPDRWLSNARMTHYQALLLDTDRVQFGPVVALNPATLLPLPEEGLQHNCLDILAEAHGTRPDLTDQPLPDADHTWYTDGSSLLQEGQRKAGAAVTTETEVIWAKALPAGTSAQRAELIALTQALKMAEGKKLNVYTDSRYAFATAHIHGEIYRRRGWLTSEGKEIKNKDEILALLKALFLPKRLSIIHCPGHQKGHSAEARGNRMADQAARKAAITETPDTSTLLAGKRTADGSEFEKRTADGSEFESPKKKAKVE

SEQ ID NO: 2859 - protein, 2094 aa, synthetic construct
MPAAKRVKLDGGDKKYSIGLDIGTNSVGWAVITDEYKVPSKKFKVLGNTDRHSIKKNLIGALLFDSGETAEATRLKRTARRRYTRRKNRICYLQEIFSNEMAKVDDSFFHRLEESFLVEEDKKHERHPIFGNIVDEVAYHEKYPTIYHLRKKLVDSTDKADLRLIYLALAHMIKFRGHFLIEGDLNPDNSDVDKLFIQLVQTYNQLFEENPINASGVDAKAILSARLSKSRRLENLIAQLPGEKKNGLFGNLIALSLGLTPNFKSNFDLAEDAKLQLSKDTYDDDLDNLLAQIGDQYADLFLAAKNLSDAILLSDILRVNTEITKAPLSASMIKRYDEHHQDLTLLKALVRQQLPEKYKEIFFDQSKNGYAGYIDGGASQEEFYKFIKPILEKMDGTEELLVKLNREDLLRKQRTFDNGSIPHQIHLGELHAILRRQEDFYPFLKDNREKIEKILTFRIPYYVGPLARGNSRFAWMTRKSEETITPWNFEEVVDKGASAQSFIERMTNFDKNLPNEKVLPKHSLLYEYFTVYNELTKVKYVTEGMRKPAFLSGEQKKAIVDLLFKTNRKVTVKQLKEDYFKKIECFDSVEISGVEDRFNASLGTYHDLLKIIKDKDFLDNEENEDILEDIVLTLTLFEDREMIEERLKTYAHLFDDKVMKQLKRRRYTGWGRLSRKLINGIRDKQSGKTILDFLKSDGFANRNFMQLIHDDSLTFKEDIQKAQVSGQGDSLHEHIANLAGSPAIKKGILQTVKVVDELVKVMGRHKPENIVIEMARENQTTQKGQKNSRERMKRIEEGIKELGSQILKEHPVENTQLQNEKLYLYYLQNGRDMYVDQELDINRLSDYDVDHIVPQSFLKDDSIDNKVLTRSDKARGKSDNVPSEEVVKKMKNYWRQLLNAKLITQRKFDNLTKAERGGLSELDKAGFIKRQLVETRQITKHVAQILDSRMNTKYDENDKLIREVKVITLKSKLVSDFRKDFQFYKVREINNYHHAHDAYLNAVVGTALIKKYPKLESEFVYGDYKVYDVRKMIAKSEQEIGKATAKYFFYSNIMNFFKTEITLANGEIRKRPLIETNGETGEIVWDKGRDFATVRKVLSMPQVNIVKKTEVQTGGFSKESILPKRNSDKLIARKKDWDPKKYGGFDSPTVAYSVLVVAKVEKGKSKKLKSVKELLGITIMERSSFEKNPIDFLEAKGYKEVKKDLIIKLPKYSLFELENGRKRMLASAGELQKGNELALPSKYVNFLYLASHYEKLKGSPEDNEQKQLFVEQHKHYLDEIIEQISEFSKRVILADANLDKVLSAYNKHRDKPIREQAENIIHLFTLTNLGAPAAFKYFDTTIDRKRYTSTKEVLDATLIHQSITGLYETRIDLSQLGGDGGGSSGGSGGGGGTLNIEDEHRLHETSKEPDVSLGSTWLSDFPQAWAETGGMGLAVRQAPLIIPLKATSTPVSIKQYPMSQEARLGIKPHIQRLLDQGILVPCQSPWNTPLLPVKKPGTNDYRPVQDLREVNKRVEDIHPTVPNPYNLLSGLPPSHQWYTVLDLKDAFFCLRLHPTSQPLFAFEWRDPEMGISGQLTWTRLPQGFKNSPTLFNEALHRDLADFRIQHPDLILLQYVDDLLLAATSELDCQQGTRALLQTLGNLGYRASAKKAQICQKQVKYLGYLLKEGQRWLTEARKETVMGQPTPKTPRQLREFLGKAGFCRLFIPGFAEMAAPLYPLTKPGTLFNWGPDQQKAYQEIKQALLTAPALGLPDLTKPFELFVDEKQGYAKGVLTQKLGPWRRPVAYLSKKLDPVAAGWPPCLRMVAAIAVLTKDAGKLTMGQPLVILAPHAVEALVKQPPDRWLSNARMTHYQALLLDTDRVQFGPVVALNPATLLPLPEEGLQHNCLDILAEAHGTRPDLTDQPLPDADHTWYTDGSSLLQEGQRKAGAAVTTETEVIWAKALPAGTSAQRAELIALTQALKMAEGKKLNVYTDSRYAFATAHIHGEIYRRRGWLTSEGKEIKNKDEILALLKALFLPKRLSIIHCPGHQKGHSAEARGNRMADQAARKAAITETPDTSTLLAGKRTADGSEFEKRTADGSEFESPKKKAKVE

SEQ ID NO: 2860 - protein, 2096 aa, synthetic construct
MPAAKRVKLDGGDKKYSIGLDIGTNSVGWAVITDEYKVPSKKFKVLGNTDRHSIKKNLIGALLFDSGETAEATRLKRTARRRYTRRKNRICYLQEIFSNEMAKVDDSFFHRLEESFLVEEDKKHERHPIFGNIVDEVAYHEKYPTIYHLRKKLVDSTDKADLRLIYLALAHMIKFRGHFLIEGDLNPDNSDVDKLFIQLVQTYNQLFEENPINASGVDAKAILSARLSKSRRLENLIAQLPGEKKNGLFGNLIALSLGLTPNFKSNFDLAEDAKLQLSKDTYDDDLDNLLAQIGDQYADLFLAAKNLSDAILLSDILRVNTEITKAPLSASMIKRYDEHHQDLTLLKALVRQQLPEKYKEIFFDQSKNGYAGYIDGGASQEEFYKFIKPILEKMDGTEELLVKLNREDLLRKQRTFDNGSIPHQIHLGELHAILRRQEDFYPFLKDNREKIEKILTFRIPYYVGPLARGNSRFAWMTRKSEETITPWNFEEVVDKGASAQSFIERMTNFDKNLPNEKVLPKHSLLYEYFTVYNELTKVKYVTEGMRKPAFLSGEQKKAIVDLLFKTNRKVTVKQLKEDYFKKIECFDSVEISGVEDRFNASLGTYHDLLKIIKDKDFLDNEENEDILEDIVLTLTLFEDREMIEERLKTYAHLFDDKVMKQLKRRRYTGWGRLSRKLINGIRDKQSGKTILDFLKSDGFANRNFMQLIHDDSLTFKEDIQKAQVSGQGDSLHEHIANLAGSPAIKKGILQTVKVVDELVKVMGRHKPENIVIEMARENQTTQKGQKNSRERMKRIEEGIKELGSQILKEHPVENTQLQNEKLYLYYLQNGRDMYVDQELDINRLSDYDVDHIVPQSFLKDDSIDNKVLTRSDKARGKSDNVPSEEVVKKMKNYWRQLLNAKLITQRKFDNLTKAERGGLSELDKAGFIKRQLVETRQITKHVAQILDSRMNTKYDENDKLIREVKVITLKSKLVSDFRKDFQFYKVREINNYHHAHDAYLNAVVGTALIKKYPKLESEFVYGDYKVYDVRKMIAKSEQEIGKATAKYFFYSNIMNFFKTEITLANGEIRKRPLIETNGETGEIVWDKGRDFATVRKVLSMPQVNIVKKTEVQTGGFSKESILPKRNSDKLIARKKDWDPKKYGGFDSPTVAYSVLVVAKVEKGKSKKLKSVKELLGITIMERSSFEKNPIDFLEAKGYKEVKKDLIIKLPKYSLFELENGRKRMLASAGELQKGNELALPSKYVNFLYLASHYEKLKGSPEDNEQKQLFVEQHKHYLDEIIEQISEFSKRVILADANLDKVLSAYNKHRDKPIREQAENIIHLFTLTNLGAPAAFKYFDTTIDRKRYTSTKEVLDATLIHQSITGLYETRIDLSQLGGDGGGSSGGSEAAAKGGTLNIEDEHRLHETSKEPDVSLGSTWLSDFPQAWAETGGMGLAVRQAPLIIPLKATSTPVSIKQYPMSQEARLGIKPHIQRLLDQGILVPCQSPWNTPLLPVKKPGTNDYRPVQDLREVNKRVEDIHPTVPNPYNLLSGLPPSHQWYTVLDLKDAFFCLRLHPTSQPLFAFEWRDPEMGISGQLTWTRLPQGFKNSPTLFNEALHRDLADFRIQHPDLILLQYVDDLLLAATSELDCQQGTRALLQTLGNLGYRASAKKAQICQKQVKYLGYLLKEGQRWLTEARKETVMGQPTPKTPRQLREFLGKAGFCRLFIPGFAEMAAPLYPLTKPGTLFNWGPDQQKAYQEIKQALLTAPALGLPDLTKPFELFVDEKQGYAKGVLTQKLGPWRRPVAYLSKKLDPVAAGWPPCLRMVAAIAVLTKDAGKLTMGQPLVILAPHAVEALVKQPPDRWLSNARMTHYQALLLDTDRVQFGPVVALNPATLLPLPEEGLQHNCLDILAEAHGTRPDLTDQPLPDADHTWYTDGSSLLQEGQRKAGAAVTTETEVIWAKALPAGTSAQRAELIALTQALKMAEGKKLNVYTDSRYAFATAHIHGEIYRRRGWLTSEGKEIKNKDEILALLKALFLPKRLSIIHCPGHQKGHSAEARGNRMADQAARKAAITETPDTSTLLAGKRTADGSEFEKRTADGSEFESPKKKAKVE

SEQ ID NO: 2861 - protein, 2091 aa, synthetic construct
MPAAKRVKLDGGDKKYSIGLDIGTNSVGWAVITDEYKVPSKKFKVLGNTDRHSIKKNLIGALLFDSGETAEATRLKRTARRRYTRRKNRICYLQEIFSNEMAKVDDSFFHRLEESFLVEEDKKHERHPIFGNIVDEVAYHEKYPTIYHLRKKLVDSTDKADLRLIYLALAHMIKFRGHFLIEGDLNPDNSDVDKLFIQLVQTYNQLFEENPINASGVDAKAILSARLSKSRRLENLIAQLPGEKKNGLFGNLIALSLGLTPNFKSNFDLAEDAKLQLSKDTYDDDLDNLLAQIGDQYADLFLAAKNLSDAILLSDILRVNTEITKAPLSASMIKRYDEHHQDLTLLKALVRQQLPEKYKEIFFDQSKNGYAGYIDGGASQEEFYKFIKPILEKMDGTEELLVKLNREDLLRKQRTFDNGSIPHQIHLGELHAILRRQEDFYPFLKDNREKIEKILTFRIPYYVGPLARGNSRFAWMTRKSEETITPWNFEEVVDKGASAQSFIERMTNFDKNLPNEKVLPKHSLLYEYFTVYNELTKVKYVTEGMRKPAFLSGEQKKAIVDLLFKTNRKVTVKQLKEDYFKKIECFDSVEISGVEDRFNASLGTYHDLLKIIKDKDFLDNEENEDILEDIVLTLTLFEDREMIEERLKTYAHLFDDKVMKQLKRRRYTGWGRLSRKLINGIRDKQSGKTILDFLKSDGFANRNFMQLIHDDSLTFKEDIQKAQVSGQGDSLHEHIANLAGSPAIKKGILQTVKVVDELVKVMGRHKPENIVIEMARENQTTQKGQKNSRERMKRIEEGIKELGSQILKEHPVENTQLQNEKLYLYYLQNGRDMYVDQELDINRLSDYDVDHIVPQSFLKDDSIDNKVLTRSDKARGKSDNVPSEEVVKKMKNYWRQLLNAKLITQRKFDNLTKAERGGLSELDKAGFIKRQLVETRQITKHVAQILDSRMNTKYDENDKLIREVKVITLKSKLVSDFRKDFQFYKVREINNYHHAHDAYLNAVVGTALIKKYPKLESEFVYGDYKVYDVRKMIAKSEQEIGKATAKYFFYSNIMNFFKTEITLANGEIRKRPLIETNGETGEIVWDKGRDFATVRKVLSMPQVNIVKKTEVQTGGFSKESILPKRNSDKLIARKKDWDPKKYGGFDSPTVAYSVLVVAKVEKGKSKKLKSVKELLGITIMERSSFEKNPIDFLEAKGYKEVKKDLIIKLPKYSLFELENGRKRMLASAGELQKGNELALPSKYVNFLYLASHYEKLKGSPEDNEQKQLFVEQHKHYLDEIIEQISEFSKRVILADANLDKVLSAYNKHRDKPIREQAENIIHLFTLTNLGAPAAFKYFDTTIDRKRYTSTKEVLDATLIHQSITGLYETRIDLSQLGGDGGGGSGGGGGTLNIEDEHRLHETSKEPDVSLGSTWLSDFPQAWAETGGMGLAVRQAPLIIPLKATSTPVSIKQYPMSQEARLGIKPHIQRLLDQGILVPCQSPWNTPLLPVKKPGTNDYRPVQDLREVNKRVEDIHPTVPNPYNLLSGLPPSHQWYTVLDLKDAFFCLRLHPTSQPLFAFEWRDPEMGISGQLTWTRLPQGFKNSPTLFNEALHRDLADFRIQHPDLILLQYVDDLLLAATSELDCQQGTRALLQTLGNLGYRASAKKAQICQKQVKYLGYLLKEGQRWLTEARKETVMGQPTPKTPRQLREFLGKAGFCRLFIPGFAEMAAPLYPLTKPGTLFNWGPDQQKAYQEIKQALLTAPALGLPDLTKPFELFVDEKQGYAKGVLTQKLGPWRRPVAYLSKKLDPVAAGWPPCLRMVAAIAVLTKDAGKLTMGQPLVILAPHAVEALVKQPPDRWLSNARMTHYQALLLDTDRVQFGPVVALNPATLLPLPEEGLQHNCLDILAEAHGTRPDLTDQPLPDADHTWYTDGSSLLQEGQRKAGAAVTTETEVIWAKALPAGTSAQRAELIALTQALKMAEGKKLNVYTDSRYAFATAHIHGEIYRRRGWLTSEGKEIKNKDEILALLKALFLPKRLSIIHCPGHQKGHSAEARGNRMADQAARKAAITETPDTSTLLAGKRTADGSEFEKRTADGSEFESPKKKAKVE

SEQ ID NO: 2862 - protein, 2116 aa, synthetic construct; identical to SEQ ID NO: 2637

SEQ ID NO: 2863 - protein, 2116 aa, synthetic construct
MPAAKRVKLDGGDKKYSIGLDIGTNSVGWAVITDEYKVPSKKFKVLGNTDRHSIKKNLIGALLFDSGETAEATRLKRTARRRYTRRKNRICYLQEIFSNEMAKVDDSFFHRLEESFLVEEDKKHERHPIFGNIVDEVAYHEKYPTIYHLRKKLVDSTDKADLRLIYLALAHMIKFRGHFLIEGDLNPDNSDVDKLFIQLVQTYNQLFEENPINASGVDAKAILSARLSKSRRLENLIAQLPGEKKNGLFGNLIALSLGLTPNFKSNFDLAEDAKLQLSKDTYDDDLDNLLAQIGDQYADLFLAAKNLSDAILLSDILRVNTEITKAPLSASMIKRYDEHHQDLTLLKALVRQQLPEKYKEIFFDQSKNGYAGYIDGGASQEEFYKFIKPILEKMDGTEELLVKLNREDLLRKQRTFDNGSIPHQIHLGELHAILRRQEDFYPFLKDNREKIEKILTFRIPYYVGPLARGNSRFAWMTRKSEETITPWNFEEVVDKGASAQSFIERMTNFDKNLPNEKVLPKHSLLYEYFTVYNELTKVKYVTEGMRKPAFLSGEQKKAIVDLLFKTNRKVTVKQLKEDYFKKIECFDSVEISGVEDRFNASLGTYHDLLKIIKDKDFLDNEENEDILEDIVLTLTLFEDREMIEERLKTYAHLFDDKVMKQLKRRRYTGWGRLSRKLINGIRDKQSGKTILDFLKSDGFANRNFMQLIHDDSLTFKEDIQKAQVSGQGDSLHEHIANLAGSPAIKKGILQTVKVVDELVKVMGRHKPENIVIEMARENQTTQKGQKNSRERMKRIEEGIKELGSQILKEHPVENTQLQNEKLYLYYLQNGRDMYVDQELDINRLSDYDVDHIVPQSFLKDDSIDNKVLTRSDKARGKSDNVPSEEVVKKMKNYWRQLLNAKLITQRKFDNLTKAERGGLSELDKAGFIKRQLVETRQITKHVAQILDSRMNTKYDENDKLIREVKVITLKSKLVSDFRKDFQFYKVREINNYHHAHDAYLNAVVGTALIKKYPKLESEFVYGDYKVYDVRKMIAKSEQEIGKATAKYFFYSNIMNFFKTEITLANGEIRKRPLIETNGETGEIVWDKGRDFATVRKVLSMPQVNIVKKTEVQTGGFSKESILPKRNSDKLIARKKDWDPKKYGGFDSPTVAYSVLVVAKVEKGKSKKLKSVKELLGITIMERSSFEKNPIDFLEAKGYKEVKKDLIIKLPKYSLFELENGRKRMLASAGELQKGNELALPSKYVNFLYLASHYEKLKGSPEDNEQKQLFVEQHKHYLDEIIEQISEFSKRVILADANLDKVLSAYNKHRDKPIREQAENIIHLFTLTNLGAPAAFKYFDTTIDRKRYTSTKEVLDATLIHQSITGLYETRIDLSQLGGDGGEAAAKGGGGGSGGTLNIEDEYRLHETSKEPDVSLGSTWLSDFPQAWAETGGMGLAVRQAPLIIPLKATSTPVSIKQYPMSQEARLGIKPHIQRLLDQGILVPCQSPWNTPLLPVKKPGTNDYRPVQDLREVNKRVEDIHPTVPNPYNLLSGLPPSHQWYTVLDLKDAFFCLRLHPTSQPLFAFEWRDPEMGISGQLTWTRLPQGFKNSPTLFNEALHRDLADFRIQHPDLILLQYVDDLLLAATSELDCQQGTRALLQTLGNLGYRASAKKAQICQKQVKYLGYLLKEGQRWLTEARKETVMGQPTPKTPRQLREFLGKAGFCRLFIPGFAEMAAPLYPLTKPGTLFNWGPDQQKAYQEIKQALLTAPALGLPDLTKPFELFVDEKQGYAKGVLTQKLGPWRRPVAYLSKKLDPVAAGWPPCLRMVAAIAVLTKDAGKLTMGQPLVILAPHAVEALVKQPPDRWLSNARMTHYQALLLDTDRVQFGPVVALNPATLLPLPEEGLQHNCLDILAEAHGTRPDLTDQPLPDADHTWYTDGSSLLQEGQRKAGAAVTTETEVIWAKALPAGTSAQRAELIALTQALKMAEGKKLNVYTDSRYAFATAHIHGEIYRRRGWLTSEGKEIKNKDEILALLKALFLPKRLSIIHCPGHQKGHSAEARGNRMADQAARKAAITETPDTSTLLIENSSPSGGSKRTADGSEFEAGKRTADGSEFEKRTADGSEFESPKKKAKVE

SEQ ID NO: 2864 - protein, 2108 aa, synthetic construct; identical to SEQ ID NO: 2655

SEQ ID NO: 2865 - protein, 2108 aa, synthetic construct; identical to SEQ ID NO: 2624

SEQ ID NO: 2866 - protein, 2116 aa, synthetic construct; identical to SEQ ID NO: 2692

SEQ ID NO: 2867 - protein, 2117 aa, synthetic construct; identical to SEQ ID NO: 2665

SEQ ID NO: 2868 - protein, 2118 aa, synthetic construct
MPAAKRVKLDGGDKKYSIGLDIGTNSVGWAVITDEYKVPSKKFKVLGNTDRHSIKKNLIGALLFDSGETAEATRLKRTARRRYTRRKNRICYLQEIFSNEMAKVDDSFFHRLEESFLVEEDKKHERHPIFGNIVDEVAYHEKYPTIYHLRKKLVDSTDKADLRLIYLALAHMIKFRGHFLIEGDLNPDNSDVDKLFIQLVQTYNQLFEENPINASGVDAKAILSARLSKSRRLENLIAQLPGEKKNGLFGNLIALSLGLTPNFKSNFDLAEDAKLQLSKDTYDDDLDNLLAQIGDQYADLFLAAKNLSDAILLSDILRVNTEITKAPLSASMIKRYDEHHQDLTLLKALVRQQLPEKYKEIFFDQSKNGYAGYIDGGASQEEFYKFIKPILEKMDGTEELLVKLNREDLLRKQRTFDNGSIPHQIHLGELHAILRRQEDFYPFLKDNREKIEKILTFRIPYYVGPLARGNSRFAWMTRKSEETITPWNFEEVVDKGASAQSFIERMTNFDKNLPNEKVLPKHSLLYEYFTVYNELTKVKYVTEGMRKPAFLSGEQKKAIVDLLFKTNRKVTVKQLKEDYFKKIECFDSVEISGVEDRFNASLGTYHDLLKIIKDKDFLDNEENEDILEDIVLTLTLFEDREMIEERLKTYAHLFDDKVMKQLKRRRYTGWGRLSRKLINGIRDKQSGKTILDFLKSDGFANRNFMQLIHDDSLTFKEDIQKAQVSGQGDSLHEHIANLAGSPAIKKGILQTVKVVDELVKVMGRHKPENIVIEMARENQTTQKGQKNSRERMKRIEEGIKELGSQILKEHPVENTQLQNEKLYLYYLQNGRDMYVDQELDINRLSDYDVDHIVPQSFLKDDSIDNKVLTRSDKARGKSDNVPSEEVVKKMKNYWRQLLNAKLITQRKFDNLTKAERGGLSELDKAGFIKRQLVETRQITKHVAQILDSRMNTKYDENDKLIREVKVITLKSKLVSDFRKDFQFYKVREINNYHHAHDAYLNAVVGTALIKKYPKLESEFVYGDYKVYDVRKMIAKSEQEIGKATAKYFFYSNIMNFFKTEITLANGEIRKRPLIETNGETGEIVWDKGRDFATVRKVLSMPQVNIVKKTEVQTGGFSKESILPKRNSDKLIARKKDWDPKKYGGFDSPTVAYSVLVVAKVEKGKSKKLKSVKELLGITIMERSSFEKNPIDFLEAKGYKEVKKDLIIKLPKYSLFELENGRKRMLASAGELQKGNELALPSKYVNFLYLASHYEKLKGSPEDNEQKQLFVEQHKHYLDEIIEQISEFSKRVILADANLDKVLSAYNKHRDKPIREQAENIIHLFTLTNLGAPAAFKYFDTTIDRKRYTSTKEVLDATLIHQSITGLYETRIDLSQLGGDGGPAPAPAPAPAPAPGGTLNIEDEYRLHETSKEPDVSLGSTWLSDFPQAWAETGGMGLAVRQAPLIIPLKATSTPVSIKQYPMSQEARLGIKPHIQRLLDQGILVPCQSPWNTPLLPVKKPGTNDYRPVQDLREVNKRVEDIHPTVPNPYNLLSGLPPSHQWYTVLDLKDAFFCLRLHPTSQPLFAFEWRDPEMGISGQLTWTRLPQGFKNSPTLFNEALHRDLADFRIQHPDLILLQYVDDLLLAATSELDCQQGTRALLQTLGNLGYRASAKKAQICQKQVKYLGYLLKEGQRWLTEARKETVMGQPTPKTPRQLREFLGKAGFCRLFIPGFAEMAAPLYPLTKPGTLFNWGPDQQKAYQEIKQALLTAPALGLPDLTKPFELFVDEKQGYAKGVLTQKLGPWRRPVAYLSKKLDPVAAGWPPCLRMVAAIAVLTKDAGKLTMGQPLVILAPHAVEALVKQPPDRWLSNARMTHYQALLLDTDRVQFGPVVALNPATLLPLPEEGLQHNCLDILAEAHGTRPDLTDQPLPDADHTWYTDGSSLLQEGQRKAGAAVTTETEVIWAKALPAGTSAQRAELIALTQALKMAEGKKLNVYTDSRYAFATAHIHGEIYRRRGWLTSEGKEIKNKDEILALLKALFLPKRLSIIHCPGHQKGHSAEARGNRMADQAARKAAITETPDTSTLLIENSSPSGGSKRTADGSEFEAGKRTADGSEFEKRTADGSEFESPKKKAKVE

SEQ ID NO: 2869 - protein, 2114 aa, synthetic construct
MPAAKRVKLDGGDKKYSIGLDIGTNSVGWAVITDEYKVPSKKFKVLGNTDRHSIKKNLIGALLFDSGETAEATRLKRTARRRYTRRKNRICYLQEIFSNEMAKVDDSFFHRLEESFLVEEDKKHERHPIFGNIVDEVAYHEKYPTIYHLRKKLVDSTDKADLRLIYLALAHMIKFRGHFLIEGDLNPDNSDVDKLFIQLVQTYNQLFEENPINASGVDAKAILSARLSKSRRLENLIAQLPGEKKNGLFGNLIALSLGLTPNFKSNFDLAEDAKLQLSKDTYDDDLDNLLAQIGDQYADLFLAAKNLSDAILLSDILRVNTEITKAPLSASMIKRYDEHHQDLTLLKALVRQQLPEKYKEIFFDQSKNGYAGYIDGGASQEEFYKFIKPILEKMDGTEELLVKLNREDLLRKQRTFDNGSIPHQIHLGELHAILRRQEDFYPFLKDNREKIEKILTFRIPYYVGPLARGNSRFAWMTRKSEETITPWNFEEVVDKGASAQSFIERMTNFDKNLPNEKVLPKHSLLYEYFTVYNELTKVKYVTEGMRKPAFLSGEQKKAIVDLLFKTNRKVTVKQLKEDYFKKIECFDSVEISGVEDRFNASLGTYHDLLKIIKDKDFLDNEENEDILEDIVLTLTLFEDREMIEERLKTYAHLFDDKVMKQLKRRRYTGWGRLSRKLINGIRDKQSGKTILDFLKSDGFANRNFMQLIHDDSLTFKEDIQKAQVSGQGDSLHEHIANLAGSPAIKKGILQTVKVVDELVKVMGRHKPENIVIEMARENQTTQKGQKNSRERMKRIEEGIKELGSQILKEHPVENTQLQNEKLYLYYLQNGRDMYVDQELDINRLSDYDVDHIVPQSFLKDDSIDNKVLTRSDKARGKSDNVPSEEVVKKMKNYWRQLLNAKLITQRKFDNLTKAERGGLSELDKAGFIKRQLVETRQITKHVAQILDSRMNTKYDENDKLIREVKVITLKSKLVSDFRKDFQFYKVREINNYHHAHDAYLNAVVGTALIKKYPKLESEFVYGDYKVYDVRKMIAKSEQEIGKATAKYFFYSNIMNFFKTEITLANGEIRKRPLIETNGETGEIVWDKGRDFATVRKVLSMPQVNIVKKTEVQTGGFSKESILPKRNSDKLIARKKDWDPKKYGGFDSPTVAYSVLVVAKVEKGKSKKLKSVKELLGITIMERSSFEKNPIDFLEAKGYKEVKKDLIIKLPKYSLFELENGRKRMLASAGELQKGNELALPSKYVNFLYLASHYEKLKGSPEDNEQKQLFVEQHKHYLDEIIEQISEFSKRVILADANLDKVLSAYNKHRDKPIREQAENIIHLFTLTNLGAPAAFKYFDTTIDRKRYTSTKEVLDATLIHQSITGLYETRIDLSQLGGDGGPAPGGGGSSGGTLNIEDEYRLHETSKEPDVSLGSTWLSDFPQAWAETGGMGLAVRQAPLIIPLKATSTPVSIKQYPMSQEARLGIKPHIQRLLDQGILVPCQSPWNTPLLPVKKPGTNDYRPVQDLREVNKRVEDIHPTVPNPYNLLSGLPPSHQWYTVLDLKDAFFCLRLHPTSQPLFAFEWRDPEMGISGQLTWTRLPQGFKNSPTLFNEALHRDLADFRIQHPDLILLQYVDDLLLAATSELDCQQGTRALLQTLGNLGYRASAKKAQICQKQVKYLGYLLKEGQRWLTEARKETVMGQPTPKTPRQLREFLGKAGFCRLFIPGFAEMAAPLYPLTKPGTLFNWGPDQQKAYQEIKQALLTAPALGLPDLTKPFELFVDEKQGYAKGVLTQKLGPWRRPVAYLSKKLDPVAAGWPPCLRMVAAIAVLTKDAGKLTMGQPLVILAPHAVEALVKQPPDRWLSNARMTHYQALLLDTDRVQFGPVVALNPATLLPLPEEGLQHNCLDILAEAHGTRPDLTDQPLPDADHTWYTDGSSLLQEGQRKAGAAVTTETEVIWAKALPAGTSAQRAELIALTQALKMAEGKKLNVYTDSRYAFATAHIHGEIYRRRGWLTSEGKEIKNKDEILALLKALFLPKRLSIIHCPGHQKGHSAEARGNRMADQAARKAAITETPDTSTLLIENSSPSGGSKRTADGSEFEAGKRTADGSEFEKRTADGSEFESPKKKAKVE

SEQ ID NO: 2870 - protein, 2116 aa, synthetic construct; identical to SEQ ID NO: 2677

SEQ ID NO: 2871 - protein, 2111 aa, synthetic construct; identical to SEQ ID NO: 2676

SEQ ID NO: 2872 - protein, 2116 aa, synthetic construct
MPAAKRVKLDGGDKKYSIGLDIGTNSVGWAVITDEYKVPSKKFKVLGNTDRHSIKKNLIGALLFDSGETAEATRLKRTARRRYTRRKNRICYLQEIFSNEMAKVDDSFFHRLEESFLVEEDKKHERHPIFGNIVDEVAYHEKYPTIYHLRKKLVDSTDKADLRLIYLALAHMIKFRGHFLIEGDLNPDNSDVDKLFIQLVQTYNQLFEENPINASGVDAKAILSARLSKSRRLENLIAQLPGEKKNGLFGNLIALSLGLTPNFKSNFDLAEDAKLQLSKDTYDDDLDNLLAQIGDQYADLFLAAKNLSDAILLSDILRVNTEITKAPLSASMIKRYDEHHQDLTLLKALVRQQLPEKYKEIFFDQSKNGYAGYIDGGASQEEFYKFIKPILEKMDGTEELLVKLNREDLLRKQRTFDNGSIPHQIHLGELHAILRRQEDFYPFLKDNREKIEKILTFRIPYYVGPLARGNSRFAWMTRKSEETITPWNFEEVVDKGASAQSFIERMTNFDKNLPNEKVLPKHSLLYEYFTVYNELTKVKYVTEGMRKPAFLSGEQKKAIVDLLFKTNRKVTVKQLKEDYFKKIECFDSVEISGVEDRFNASLGTYHDLLKIIKDKDFLDNEENEDILEDIVLTLTLFEDREMIEERLKTYAHLFDDKVMKQLKRRRYTGWGRLSRKLINGIRDKQSGKTILDFLKSDGFANRNFMQLIHDDSLTFKEDIQKAQVSGQGDSLHEHIANLAGSPAIKKGILQTVKVVDELVKVMGRHKPENIVIEMARENQTTQKGQKNSRERMKRIEEGIKELGSQILKEHPVENTQLQNEKLYLYYLQNGRDMYVDQELDINRLSDYDVDHIVPQSFLKDDSIDNKVLTRSDKARGKSDNVPSEEVVKKMKNYWRQLLNAKLITQRKFDNLTKAERGGLSELDKAGFIKRQLVETRQITKHVAQILDSRMNTKYDENDKLIREVKVITLKSKLVSDFRKDFQFYKVREINNYHHAHDAYLNAVVGTALIKKYPKLESEFVYGDYKVYDVRKMIAKSEQEIGKATAKYFFYSNIMNFFKTEITLANGEIRKRPLIETNGETGEIVWDKGRDFATVRKVLSMPQVNIVKKTEVQTGGFSKESILPKRNSDKLIARKKDWDPKKYGGFDSPTVAYSVLVVAKVEKGKSKKLKSVKELLGITIMERSSFEKNPIDFLEAKGYKEVKKDLIIKLPKYSLFELENGRKRMLASAGELQKGNELALPSKYVNFLYLASHYEKLKGSPEDNEQKQLFVEQHKHYLDEIIEQISEFSKRVILADANLDKVLSAYNKHRDKPIREQAENIIHLFTLTNLGAPAAFKYFDTTIDRKRYTSTKEVLDATLIHQSITGLYETRIDLSQLGGDGGPAPGGGEAAAKGGTLNIEDEYRLHETSKEPDVSLGSTWLSDFPQAWAETGGMGLAVRQAPLIIPLKATSTPVSIKQYPMSQEARLGIKPHIQRLLDQGILVPCQSPWNTPLLPVKKPGTNDYRPVQDLREVNKRVEDIHPTVPNPYNLLSGLPPSHQWYTVLDLKDAFFCLRLHPTSQPLFAFEWRDPEMGISGQLTWTRLPQGFKNSPTLFNEALHRDLADFRIQHPDLILLQYVDDLLLAATSELDCQQGTRALLQTLGNLGYRASAKKAQICQKQVKYLGYLLKEGQRWLTEARKETVMGQPTPKTPRQLREFLGKAGFCRLFIPGFAEMAAPLYPLTKPGTLFNWGPDQQKAYQEIKQALLTAPALGLPDLTKPFELFVDEKQGYAKGVLTQKLGPWRRPVAYLSKKLDPVAAGWPPCLRMVAAIAVLTKDAGKLTMGQPLVILAPHAVEALVKQPPDRWLSNARMTHYQALLLDTDRVQFGPVVALNPATLLPLPEEGLQHNCLDILAEAHGTRPDLTDQPLPDADHTWYTDGSSLLQEGQRKAGAAVTTETEVIWAKALPAGTSAQRAELIALTQALKMAEGKKLNVYTDSRYAFATAHIHGEIYRRRGWLTSEGKEIKNKDEILALLKALFLPKRLSIIHCPGHQKGHSAEARGNRMADQAARKAAITETPDTSTLLIENSSPSGGSKRTADGSEFEAGKRTADGSEFEKRTADGSEFESPKKKAKVE

SEQ ID NO: 2873 - protein, 2116 aa, synthetic construct; identical to SEQ ID NO: 2651

SEQ ID NO: 2874 - protein, 2116 aa, synthetic construct; identical to SEQ ID NO: 2638

SEQ ID NO: 2875 - protein, 2114 aa, synthetic construct; identical to SEQ ID NO: 2685

SEQ ID NO: 2876 - protein, 2114 aa, synthetic construct; identical to SEQ ID NO: 2698

SEQ ID NO: 2877 - protein, 2120 aa, synthetic construct; identical to SEQ ID NO: 2627

SEQ ID NO: 2878 - protein, 2114 aa, synthetic construct; identical to SEQ ID NO: 2649

SEQ ID NO: 2879 - protein, 2116 aa, synthetic construct
MPAAKRVKLDGGDKKYSIGLDIGTNSVGWAVITDEYKVPSKKFKVLGNTDRHSIKKNLIGALLFDSGETAEATRLKRTARRRYTRRKNRICYLQEIFSNEMAKVDDSFFHRLEESFLVEEDKKHERHPIFGNIVDEVAYHEKYPTIYHLRKKLVDSTDKADLRLIYLALAHMIKFRGHFLIEGDLNPDNSDVDKLFIQLVQTYNQLFEENPINASGVDAKAILSARLSKSRRLENLIAQLPGEKKNGLFGNLIALSLGLTPNFKSNFDLAEDAKLQLSKDTYDDDLDNLLAQIGDQYADLFLAAKNLSDAILLSDILRVNTEITKAPLSASMIKRYDEHHQDLTLLKALVRQQLPEKYKEIFFDQSKNGYAGYIDGGASQEEFYKFIKPILEKMDGTEELLVKLNREDLLRKQRTFDNGSIPHQIHLGELHAILRRQEDFYPFLKDNREKIEKILTFRIPYYVGPLARGNSRFAWMTRKSEETITPWNFEEVVDKGASAQSFIERMTNFDKNLPNEKVLPKHSLLYEYFTVYNELTKVKYVTEGMRKPAFLSGEQKKAIVDLLFKTNRKVTVKQLKEDYFKKIECFDSVEISGVEDRFNASLGTYHDLLKIIKDKDFLDNEENEDILEDIVLTLTLFEDREMIEERLKTYAHLFDDKVMKQLKRRRYTGWGRLSRKLINGIRDKQSGKTILDFLKSDGFANRNFMQLIHDDSLTFKEDIQKAQVSGQGDSLHEHIANLAGSPAIKKGILQTVKVVDELVKVMGRHKPENIVIEMARENQTTQKGQKNSRERMKRIEEGIKELGSQILKEHPVENTQLQNEKLYLYYLQNGRDMYVDQELDINRLSDYDVDHIVPQSFLKDDSIDNKVLTRSDKARGKSDNVPSEEVVKKMKNYWRQLLNAKLITQRKFDNLTKAERGGLSELDKAGFIKRQLVETRQITKHVAQILDSRMNTKYDENDKLIREVKVITLKSKLVSDFRKDFQFYKVREINNYHHAHDAYLNAVVGTALIKKYPKLESEFVYGDYKVYDVRKMIAKSEQEIGKATAKYFFYSNIMNFFKTEITLANGEIRKRPLIETNGETGEIVWDKGRDFATVRKVLSMPQVNIVKKTEVQTGGFSKESILPKRNSDKLIARKKDWDPKKYGGFDSPTVAYSVLVVAKVEKGKSKKLKSVKELLGITIMERSSFEKNPIDFLEAKGYKEVKKDLIIKLPKYSLFELENGRKRMLASAGELQKGNELALPSKYVNFLYLASHYEKLKGSPEDNEQKQLFVEQHKHYLDEIIEQISEFSKRVILADANLDKVLSAYNKHRDKPIREQAENIIHLFTLTNLGAPAAFKYFDTTIDRKRYTSTKEVLDATLIHQSITGLYETRIDLSQLGGDGGGGGEAAAKPAPGGTLNIEDEYRLHETSKEPDVSLGSTWLSDFPQAWAETGGMGLAVRQAPLIIPLKATSTPVSIKQYPMSQEARLGIKPHIQRLLDQGILVPCQSPWNTPLLPVKKPGTNDYRPVQDLREVNKRVEDIHPTVPNPYNLLSGLPPSHQWYTVLDLKDAFFCLRLHPTSQPLFAFEWRDPEMGISGQLTWTRLPQGFKNSPTLFNEALHRDLADFRIQHPDLILLQYVDDLLLAATSELDCQQGTRALLQTLGNLGYRASAKKAQICQKQVKYLGYLLKEGQRWLTEARKETVMGQPTPKTPRQLREFLGKAGFCRLFIPGFAEMAAPLYPLTKPGTLFNWGPDQQKAYQEIKQALLTAPALGLPDLTKPFELFVDEKQGYAKGVLTQKLGPWRRPVAYLSKKLDPVAAGWPPCLRMVAAIAVLTKDAGKLTMGQPLVILAPHAVEALVKQPPDRWLSNARMTHYQALLLDTDRVQFGPVVALNPATLLPLPEEGLQHNCLDILAEAHGTRPDLTDQPLPDADHTWYTDGSSLLQEGQRKAGAAVTTETEVIWAKALPAGTSAQRAELIALTQALKMAEGKKLNVYTDSRYAFATAHIHGEIYRRRGWLTSEGKEIKNKDEILALLKALFLPKRLSIIHCPGHQKGHSAEARGNRMADQAARKAAITETPDTSTLLIENSSPSGGSKRTADGSEFEAGKRTADGSEFEKRTADGSEFESPKKKAKVE

SEQ ID NO: 2880 - protein, 2130 aa, synthetic construct; identical to SEQ ID NO: 2678

SEQ ID NO: 2881 - protein, 2110 aa, synthetic construct; identical to SEQ ID NO: 2620

SEQ ID NO: 2882 - protein, 2117 aa, synthetic construct; identical to SEQ ID NO: 2687

SEQ ID NO: 2883 - protein, 2113 aa, synthetic construct
MPAAKRVKLDGGDKKYSIGLDIGTNSVGWAVITDEYKVPSKKFKVLGNTDRHSIKKNLIGALLFDSGETAEATRLKRTARRRYTRRKNRICYLQEIFSNEMAKVDDSFFHRLEESFLVEEDKKHERHPIFGNIVDEVAYHEKYPTIYHLRKKLVDSTDKADLRLIYLALAHMIKFRGHFLIEGDLNPDNSDVDKLFIQLVQTYNQLFEENPINASGVDAKAILSARLSKSRRLENLIAQLPGEKKNGLFGNLIALSLGLTPNFKSNFDLAEDAKLQLSKDTYDDDLDNLLAQIGDQYADLFLAAKNLSDAILLSDILRVNTEITKAPLSASMIKRYDEHHQDLTLLKALVRQQLPEKYKEIFFDQSKNGYAGYIDGGASQEEFYKFIKPILEKMDGTEELLVKLNREDLLRKQRTFDNGSIPHQIHLGELHAILRRQEDFYPFLKDNREKIEKILTFRIPYYVGPLARGNSRFAWMTRKSEETITPWNFEEVVDKGASAQSFIERMTNFDKNLPNEKVLPKHSLLYEYFTVYNELTKVKYVTEGMRKPAFLSGEQKKAIVDLLFKTNRKVTVKQLKEDYFKKIECFDSVEISGVEDRFNASLGTYHDLLKIIKDKDFLDNEENEDILEDIVLTLTLFEDREMIEERLKTYAHLFDDKVMKQLKRRRYTGWGRLSRKLINGIRDKQSGKTILDFLKSDGFANRNFMQLIHDDSLTFKEDIQKAQVSGQGDSLHEHIANLAGSPAIKKGILQTVKVVDELVKVMGRHKPENIVIEMARENQTTQKGQKNSRERMKRIEEGIKELGSQILKEHPVENTQLQNEKLYLYYLQNGRDMYVDQELDINRLSDYDVDHIVPQSFLKDDSIDNKVLTRSDKARGKSDNVPSEEVVKKMKNYWRQLLNAKLITQRKFDNLTKAERGGLSELDKAGFIKRQLVETRQITKHVAQILDSRMNTKYDENDKLIREVKVITLKSKLVSDFRKDFQFYKVREINNYHHAHDAYLNAVVGTALIKKYPKLESEFVYGDYKVYDVRKMIAKSEQEIGKATAKYFFYSNIMNFFKTEITLANGEIRKRPLIETNGETGEIVWDKGRDFATVRKVLSMPQVNIVKKTEVQTGGFSKESILPKRNSDKLIARKKDWDPKKYGGFDSPTVAYSVLVVAKVEKGKSKKLKSVKELLGITIMERSSFEKNPIDFLEAKGYKEVKKDLIIKLPKYSLFELENGRKRMLASAGELQKGNELALPSKYVNFLYLASHYEKLKGSPEDNEQKQLFVEQHKHYLDEIIEQISEFSKRVILADANLDKVLSAYNKHRDKPIREQAENIIHLFTLTNLGAPAAFKYFDTTIDRKRYTSTKEVLDATLIHQSITGLYETRIDLSQLGGDGGPAPEAAAKGGTLNIEDEYRLHETSKEPDVSLGSTWLSDFPQAWAETGGMGLAVRQAPLIIPLKATSTPVSIKQYPMSQEARLGIKPHIQRLLDQGILVPCQSPWNTPLLPVKKPGTNDYRPVQDLREVNKRVEDIHPTVPNPYNLLSGLPPSHQWYTVLDLKDAFFCLRLHPTSQPLFAFEWRDPEMGISGQLTWTRLPQGFKNSPTLFNEALHRDLADFRIQHPDLILLQYVDDLLLAATSELDCQQGTRALLQTLGNLGYRASAKKAQICQKQVKYLGYLLKEGQRWLTEARKETVMGQPTPKTPRQLREFLGKAGFCRLFIPGFAEMAAPLYPLTKPGTLFNWGPDQQKAYQEIKQALLTAPALGLPDLTKPFELFVDEKQGYAKGVLTQKLGPWRRPVAYLSKKLDPVAAGWPPCLRMVAAIAVLTKDAGKLTMGQPLVILAPHAVEALVKQPPDRWLSNARMTHYQALLLDTDRVQFGPVVALNPATLLPLPEEGLQHNCLDILAEAHGTRPDLTDQPLPDADHTWYTDGSSLLQEGQRKAGAAVTTETEVIWAKALPAGTSAQRAELIALTQALKMAEGKKLNVYTDSRYAFATAHIHGEIYRRRGWLTSEGKEIKNKDEILALLKALFLPKRLSIIHCPGHQKGHSAEARGNRMADQAARKAAITETPDTSTLLIENSSPSGGSKRTADGSEFEAGKRTADGSEFEKRTADGSEFESPKKKAKVE

SEQ ID NO: 2884 - protein, 2116 aa, synthetic construct; identical to SEQ ID NO: 2674

SEQ ID NO: 2885 - protein, 2116 aa, synthetic construct; identical to SEQ ID NO: 2688

SEQ ID NO: 2886 - protein, 2111 aa, synthetic construct; identical to SEQ ID NO: 2653

SEQ ID NO: 2887 - protein, 2115 aa, synthetic construct; identical to SEQ ID NO: 2647

SEQ ID NO: 2888 - protein, 2125 aa, synthetic construct; identical to SEQ ID NO: 2610

SEQ ID NO: 2889 - protein, 2116 aa, synthetic construct; identical to SEQ ID NO: 2683

SEQ ID NO: 2890 - protein, 2114 aa, synthetic construct; identical to SEQ ID NO: 2633

SEQ ID NO: 2891 - protein, 2116 aa, synthetic construct; identical to SEQ ID NO: 2641

SEQ ID NO: 2892 - protein, 2138 aa, synthetic construct
MPAAKRVKLDGGDKKYSIGLDIGTNSVGWAVITDEYKVPSKKFKVLGNTDRHSIKKNLIGALLFDSGETAEATRLKRTARRRYTRRKNRICYLQEIFSNEMAKVDDSFFHRLEESFLVEEDKKHERHPIFGNIVDEVAYHEKYPTIYHLRKKLVDSTDKADLRLIYLALAHMIKFRGHFLIEGDLNPDNSDVDKLFIQLVQTYNQLFEENPINASGVDAKAILSARLSKSRRLENLIAQLPGEKKNGLFGNLIALSLGLTPNFKSNFDLAEDAKLQLSKDTYDDDLDNLLAQIGDQYADLFLAAKNLSDAILLSDILRVNTEITKAPLSASMIKRYDEHHQDLTLLKALVRQQLPEKYKEIFFDQSKNGYAGYIDGGASQEEFYKFIKPILEKMDGTEELLVKLNREDLLRKQRTFDNGSIPHQIHLGELHAILRRQEDFYPFLKDNREKIEKILTFRIPYYVGPLARGNSRFAWMTRKSEETITPWNFEEVVDKGASAQSFIERMTNFDKNLPNEKVLPKHSLLYEYFTVYNELTKVKYVTEGMRKPAFLSGEQKKAIVDLLFKTNRKVTVKQLKEDYFKKIECFDSVEISGVEDRFNASLGTYHDLLKIIKDKDFLDNEENEDILEDIVLTLTLFEDREMIEERLKTYAHLFDDKVMKQLKRRRYTGWGRLSRKLINGIRDKQSGKTILDFLKSDGFANRNFMQLIHDDSLTFKEDIQKAQVSGQGDSLHEHIANLAGSPAIKKGILQTVKVVDELVKVMGRHKPENIVIEMARENQTTQKGQKNSRERMKRIEEGIKELGSQILKEHPVENTQLQNEKLYLYYLQNGRDMYVDQELDINRLSDYDVDHIVPQSFLKDDSIDNKVLTRSDKARGKSDNVPSEEVVKKMKNYWRQLLNAKLITQRKFDNLTKAERGGLSELDKAGFIKRQLVETRQITKHVAQILDSRMNTKYDENDKLIREVKVITLKSKLVSDFRKDFQFYKVREINNYHHAHDAYLNAVVGTALIKKYPKLESEFVYGDYKVYDVRKMIAKSEQEIGKATAKYFFYSNIMNFFKTEITLANGEIRKRPLIETNGETGEIVWDKGRDFATVRKVLSMPQVNIVKKTEVQTGGFSKESILPKRNSDKLIARKKDWDPKKYGGFDSPTVAYSVLVVAKVEKGKSKKLKSVKELLGITIMERSSFEKNPIDFLEAKGYKEVKKDLIIKLPKYSLFELENGRKRMLASAGELQKGNELALPSKYVNFLYLASHYEKLKGSPEDNEQKQLFVEQHKHYLDEIIEQISEFSKRVILADANLDKVLSAYNKHRDKPIREQAENIIHLFTLTNLGAPAAFKYFDTTIDRKRYTSTKEVLDATLIHQSITGLYETRIDLSQLGGDGGSGGSSGGSSGSETPGTSESATPESSGGSSGGSSGGTLNIEDEYRLHETSKEPDVSLGSTWLSDFPQAWAETGGMGLAVRQAPLIIPLKATSTPVSIKQYPMSQEARLGIKPHIQRLLDQGILVPCQSPWNTPLLPVKKPGTNDYRPVQDLREVNKRVEDIHPTVPNPYNLLSGLPPSHQWYTVLDLKDAFFCLRLHPTSQPLFAFEWRDPEMGISGQLTWTRLPQGFKNSPTLFNEALHRDLADFRIQHPDLILLQYVDDLLLAATSELDCQQGTRALLQTLGNLGYRASAKKAQICQKQVKYLGYLLKEGQRWLTEARKETVMGQPTPKTPRQLREFLGKAGFCRLFIPGFAEMAAPLYPLTKPGTLFNWGPDQQKAYQEIKQALLTAPALGLPDLTKPFELFVDEKQGYAKGVLTQKLGPWRRPVAYLSKKLDPVAAGWPPCLRMVAAIAVLTKDAGKLTMGQPLVILAPHAVEALVKQPPDRWLSNARMTHYQALLLDTDRVQFGPVVALNPATLLPLPEEGLQHNCLDILAEAHGTRPDLTDQPLPDADHTWYTDGSSLLQEGQRKAGAAVTTETEVIWAKALPAGTSAQRAELIALTQALKMAEGKKLNVYTDSRYAFATAHIHGEIYRRRGWLTSEGKEIKNKDEILALLKALFLPKRLSIIHCPGHQKGHSAEARGNRMADQAARKAAITETPDTSTLLIENSSPSGGSKRTADGSEFEAGKRTADGSEFEKRTADGSEFESPKKKAKVE

SEQ ID NO: 2893 - protein, 2116 aa, synthetic construct; identical to SEQ ID NO: 2701

SEQ ID NO: 2894 - protein, 2114 aa, synthetic construct; identical to SEQ ID NO: 2684

SEQ ID NO: 2895 - protein, 2114 aa, synthetic construct; identical to SEQ ID NO: 2622

SEQ ID NO: 2896 - protein, 2116 aa, synthetic construct; identical to SEQ ID NO: 2645

SEQ ID NO: 2897 - protein, 2116 aa, synthetic construct; identical to SEQ ID NO: 2658

SEQ ID NO: 2898 - protein, 2114 aa, synthetic construct; identical to SEQ ID NO: 2670

SEQ ID NO: 2899 - protein, 2110 aa, synthetic construct
MPAAKRVKLDGGDKKYSIGLDIGTNSVGWAVITDEYKVPSKKFKVLGNTDRHSIKKNLIGALLFDSGETAEATRLKRTARRRYTRRKNRICYLQEIFSNEMAKVDDSFFHRLEESFLVEEDKKHERHPIFGNIVDEVAYHEKYPTIYHLRKKLVDSTDKADLRLIYLALAHMIKFRGHFLIEGDLNPDNSDVDKLFIQLVQTYNQLFEENPINASGVDAKAILSARLSKSRRLENLIAQLPGEKKNGLFGNLIALSLGLTPNFKSNFDLAEDAKLQLSKDTYDDDLDNLLAQIGDQYADLFLAAKNLSDAILLSDILRVNTEITKAPLSASMIKRYDEHHQDLTLLKALVRQQLPEKYKEIFFDQSKNGYAGYIDGGASQEEFYKFIKPILEKMDGTEELLVKLNREDLLRKQRTFDNGSIPHQIHLGELHAILRRQEDFYPFLKDNREKIEKILTFRIPYYVGPLARGNSRFAWMTRKSEETITPWNFEEVVDKGASAQSFIERMTNFDKNLPNEKVLPKHSLLYEYFTVYNELTKVKYVTEGMRKPAFLSGEQKKAIVDLLFKTNRKVTVKQLKEDYFKKIECFDSVEISGVEDRFNASLGTYHDLLKIIKDKDFLDNEENEDILEDIVLTLTLFEDREMIEERLKTYAHLFDDKVMKQLKRRRYTGWGRLSRKLINGIRDKQSGKTILDFLKSDGFANRNFMQLIHDDSLTFKEDIQKAQVSGQGDSLHEHIANLAGSPAIKKGILQTVKVVDELVKVMGRHKPENIVIEMARENQTTQKGQKNSRERMKRIEEGIKELGSQILKEHPVENTQLQNEKLYLYYLQNGRDMYVDQELDINRLSDYDVDHIVPQSFLKDDSIDNKVLTRSDKARGKSDNVPSEEVVKKMKNYWRQLLNAKLITQRKFDNLTKAERGGLSELDKAGFIKRQLVETRQITKHVAQILDSRMNTKYDENDKLIREVKVITLKSKLVSDFRKDFQFYKVREINNYHHAHDAYLNAVVGTALIKKYPKLESEFVYGDYKVYDVRKMIAKSEQEIGKATAKYFFYSNIMNFFKTEITLANGEIRKRPLIETNGETGEIVWDKGRDFATVRKVLSMPQVNIVKKTEVQTGGFSKESILPKRNSDKLIARKKDWDPKKYGGFDSPTVAYSVLVVAKVEKGKSKKLKSVKELLGITIMERSSFEKNPIDFLEAKGYKEVKKDLIIKLPKYSLFELENGRKRMLASAGELQKGNELALPSKYVNFLYLASHYEKLKGSPEDNEQKQLFVEQHKHYLDEIIEQISEFSKRVILADANLDKVLSAYNKHRDKPIREQAENIIHLFTLTNLGAPAAFKYFDTTIDRKRYTSTKEVLDATLIHQSITGLYETRIDLSQLGGDGGGGGGGGGTLNIEDEYRLHETSKEPDVSLGSTWLSDFPQAWAETGGMGLAVRQAPLIIPLKATSTPVSIKQYPMSQEARLGIKPHIQRLLDQGILVPCQSPWNTPLLPVKKPGTNDYRPVQDLREVNKRVEDIHPTVPNPYNLLSGLPPSHQWYTVLDLKDAFFCLRLHPTSQPLFAFEWRDPEMGISGQLTWTRLPQGFKNSPTLFNEALHRDLADFRIQHPDLILLQYVDDLLLAATSELDCQQGTRALLQTLGNLGYRASAKKAQICQKQVKYLGYLLKEGQRWLTEARKETVMGQPTPKTPRQLREFLGKAGFCRLFIPGFAEMAAPLYPLTKPGTLFNWGPDQQKAYQEIKQALLTAPALGLPDLTKPFELFVDEKQGYAKGVLTQKLGPWRRPVAYLSKKLDPVAAGWPPCLRMVAAIAVLTKDAGKLTMGQPLVILAPHAVEALVKQPPDRWLSNARMTHYQALLLDTDRVQFGPVVALNPATLLPLPEEGLQHNCLDILAEAHGTRPDLTDQPLPDADHTWYTDGSSLLQEGQRKAGAAVTTETEVIWAKALPAGTSAQRAELIALTQALKMAEGKKLNVYTDSRYAFATAHIHGEIYRRRGWLTSEGKEIKNKDEILALLKALFLPKRLSIIHCPGHQKGHSAEARGNRMADQAARKAAITETPDTSTLLIENSSPSGGSKRTADGSEFEAGKRTADGSEFEKRTADGSEFESPKKKAKVE

SEQ ID NO: 2900 - protein, 2120 aa, synthetic construct; identical to SEQ ID NO: 2662

SEQ ID NO: 2901 - protein, 2116 aa, synthetic construct; identical to SEQ ID NO: 2629

SEQ ID NO: 2902 - protein, 2117 aa, synthetic construct; identical to SEQ ID NO: 2696

SEQ ID NO: 2903 - protein, 2114 aa, synthetic construct; identical to SEQ ID NO: 2634

SEQ ID NO: 2904 - protein, 2114 aa, synthetic construct; identical to SEQ ID NO: 2618

SEQ ID NO: 2905 - protein, 2111 aa, synthetic construct
MPAAKRVKLDGGDKKYSIGLDIGTNSVGWAVITDEYKVPSKKFKVLGNTDRHSIKKNLIGALLFDSGETAEATRLKRTARRRYTRRKNRICYLQEIFSNEMAKVDDSFFHRLEESFLVEEDKKHERHPIFGNIVDEVAYHEKYPTIYHLRKKLVDSTDKADLRLIYLALAHMIKFRGHFLIEGDLNPDNSDVDKLFIQLVQTYNQLFEENPINASGVDAKAILSARLSKSRRLENLIAQLPGEKKNGLFGNLIALSLGLTPNFKSNFDLAEDAKLQLSKDTYDDDLDNLLAQIGDQYADLFLAAKNLSDAILLSDILRVNTEITKAPLSASMIKRYDEHHQDLTLLKALVRQQLPEKYKEIFFDQSKNGYAGYIDGGASQEEFYKFIKPILEKMDGTEELLVKLNREDLLRKQRTFDNGSIPHQIHLGELHAILRRQEDFYPFLKDNREKIEKILTFRIPYYVGPLARGNSRFAWMTRKSEETITPWNFEEVVDKGASAQSFIERMTNFDKNLPNEKVLPKHSLLYEYFTVYNELTKVKYVTEGMRKPAFLSGEQKKAIVDLLFKTNRKVTVKQLKEDYFKKIECFDSVEISGVEDRFNASLGTYHDLLKIIKDKDFLDNEENEDILEDIVLTLTLFEDREMIEERLKTYAHLFDDKVMKQLKRRRYTGWGRLSRKLINGIRDKQSGKTILDFLKSDGFANRNFMQLIHDDSLTFKEDIQKAQVSGQGDSLHEHIANLAGSPAIKKGILQTVKVVDELVKVMGRHKPENIVIEMARENQTTQKGQKNSRERMKRIEEGIKELGSQILKEHPVENTQLQNEKLYLYYLQNGRDMYVDQELDINRLSDYDVDHIVPQSFLKDDSIDNKVLTRSDKARGKSDNVPSEEVVKKMKNYWRQLLNAKLITQRKFDNLTKAERGGLSELDKAGFIKRQLVETRQITKHVAQILDSRMNTKYDENDKLIREVKVITLKSKLVSDFRKDFQFYKVREINNYHHAHDAYLNAVVGTALIKKYPKLESEFVYGDYKVYDVRKMIAKSEQEIGKATAKYFFYSNIMNFFKTEITLANGEIRKRPLIETNGETGEIVWDKGRDFATVRKVLSMPQVNIVKKTEVQTGGFSKESILPKRNSDKLIARKKDWDPKKYGGFDSPTVAYSVLVVAKVEKGKSKKLKSVKELLGITIMERSSFEKNPIDFLEAKGYKEVKKDLIIKLPKYSLFELENGRKRMLASAGELQKGNELALPSKYVNFLYLASHYEKLKGSPEDNEQKQLFVEQHKHYLDEIIEQISEFSKRVILADANLDKVLSAYNKHRDKPIREQAENIIHLFTLTNLGAPAAFKYFDTTIDRKRYTSTKEVLDATLIHQSITGLYETRIDLSQLGGDGGGSSGSSGGTLNIEDEYRLHETSKEPDVSLGSTWLSDFPQAWAETGGMGLAVRQAPLIIPLKATSTPVSIKQYPMSQEARLGIKPHIQRLLDQGILVPCQSPWNTPLLPVKKPGTNDYRPVQDLREVNKRVEDIHPTVPNPYNLLSGLPPSHQWYTVLDLKDAFFCLRLHPTSQPLFAFEWRDPEMGISGQLTWTRLPQGFKNSPTLFNEALHRDLADFRIQHPDLILLQYVDDLLLAATSELDCQQGTRALLQTLGNLGYRASAKKAQICQKQVKYLGYLLKEGQRWLTEARKETVMGQPTPKTPRQLREFLGKAGFCRLFIPGFAEMAAPLYPLTKPGTLFNWGPDQQKAYQEIKQALLTAPALGLPDLTKPFELFVDEKQGYAKGVLTQKLGPWRRPVAYLSKKLDPVAAGWPPCLRMVAAIAVLTKDAGKLTMGQPLVILAPHAVEALVKQPPDRWLSNARMTHYQALLLDTDRVQFGPVVALNPATLLPLPEEGLQHNCLDILAEAHGTRPDLTDQPLPDADHTWYTDGSSLLQEGQRKAGAAVTTETEVIWAKALPAGTSAQRAELIALTQALKMAEGKKLNVYTDSRYAFATAHIHGEIYRRRGWLTSEGKEIKNKDEILALLKALFLPKRLSIIHCPGHQKGHSAEARGNRMADQAARKAAITETPDTSTLLIENSSPSGGSKRTADGSEFEAGKRTADGSEFEKRTADGSEFESPKKKAKVE

SEQ ID NO: 2906 - protein, 2111 aa, synthetic construct; identical to SEQ ID NO: 2643

SEQ ID NO: 2907 - protein, 2121 aa, synthetic construct; identical to SEQ ID NO: 2663

SEQ ID NO: 2908 - protein, 2113 aa, synthetic construct; identical to SEQ ID NO: 2626

SEQ ID NO: 2909 - protein, 2115 aa, synthetic construct; identical to SEQ ID NO: 2639

SEQ ID NO: 2910 - protein, 2111 aa, synthetic construct; identical to SEQ ID NO: 2671

SEQ ID NO: 2911 - protein, 2111 aa, synthetic construct; identical to SEQ ID NO: 2672

SEQ ID NO: 2912 - protein, 2116 aa, synthetic construct; identical to SEQ ID NO: 2703

SEQ ID NO: 2913 - protein, 2116 aa, synthetic construct; identical to SEQ ID NO: 2660

SEQ ID NO: 2914 - protein, 2111 aa, synthetic construct
MPAAKRVKLDGGDKKYSIGLDIGTNSVGWAVITDEYKVPSKKFKVLGNTDRHSIKKNLIGALLFDSGETAEATRLKRTARRRYTRRKNRICYLQEIFSNEMAKVDDSFFHRLEESFLVEEDKKHERHPIFGNIVDEVAYHEKYPTIYHLRKKLVDSTDKADLRLIYLALAHMIKFRGHFLIEGDLNPDNSDVDKLFIQLVQTYNQLFEENPINASGVDAKAILSARLSKSRRLENLIAQLPGEKKNGLFGNLIALSLGLTPNFKSNFDLAEDAKLQLSKDTYDDDLDNLLAQIGDQYADLFLAAKNLSDAILLSDILRVNTEITKAPLSASMIKRYDEHHQDLTLLKALVRQQLPEKYKEIFFDQSKNGYAGYIDGGASQEEFYKFIKPILEKMDGTEELLVKLNREDLLRKQRTFDNGSIPHQIHLGELHAILRRQEDFYPFLKDNREKIEKILTFRIPYYVGPLARGNSRFAWMTRKSEETITPWNFEEVVDKGASAQSFIERMTNFDKNLPNEKVLPKHSLLYEYFTVYNELTKVKYVTEGMRKPAFLSGEQKKAIVDLLFKTNRKVTVKQLKEDYFKKIECFDSVEISGVEDRFNASLGTYHDLLKIIKDKDFLDNEENEDILEDIVLTLTLFEDREMIEERLKTYAHLFDDKVMKQLKRRRYTGWGRLSRKLINGIRDKQSGKTILDFLKSDGFANRNFMQLIHDDSLTFKEDIQKAQVSGQGDSLHEHIANLAGSPAIKKGILQTVKVVDELVKVMGRHKPENIVIEMARENQTTQKGQKNSRERMKRIEEGIKELGSQILKEHPVENTQLQNEKLYLYYLQNGRDMYVDQELDINRLSDYDVDHIVPQSFLKDDSIDNKVLTRSDKARGKSDNVPSEEVVKKMKNYWRQLLNAKLITQRKFDNLTKAERGGLSELDKAGFIKRQLVETRQITKHVAQILDSRMNTKYDENDKLIREVKVITLKSKLVSDFRKDFQFYKVREINNYHHAHDAYLNAVVGTALIKKYPKLESEFVYGDYKVYDVRKMIAKSEQEIGKATAKYFFYSNIMNFFKTEITLANGEIRKRPLIETNGETGEIVWDKGRDFATVRKVLSMPQVNIVKKTEVQTGGFSKESILPKRNSDKLIARKKDWDPKKYGGFDSPTVAYSVLVVAKVEKGKSKKLKSVKELLGITIMERSSFEKNPIDFLEAKGYKEVKKDLIIKLPKYSLFELENGRKRMLASAGELQKGNELALPSKYVNFLYLASHYEKLKGSPEDNEQKQLFVEQHKHYLDEIIEQISEFSKRVILADANLDKVLSAYNKHRDKPIREQAENIIHLFTLTNLGAPAAFKYFDTTIDRKRYTSTKEVLDATLIHQSITGLYETRIDLSQLGGDGGGGSGSSGGTLNIEDEYRLHETSKEPDVSLGSTWLSDFPQAWAETGGMGLAVRQAPLIIPLKATSTPVSIKQYPMSQEARLGIKPHIQRLLDQGILVPCQSPWNTPLLPVKKPGTNDYRPVQDLREVNKRVEDIHPTVPNPYNLLSGLPPSHQWYTVLDLKDAFFCLRLHPTSQPLFAFEWRDPEMGISGQLTWTRLPQGFKNSPTLFNEALHRDLADFRIQHPDLILLQYVDDLLLAATSELDCQQGTRALLQTLGNLGYRASAKKAQICQKQVKYLGYLLKEGQRWLTEARKETVMGQPTPKTPRQLREFLGKAGFCRLFIPGFAEMAAPLYPLTKPGTLFNWGPDQQKAYQEIKQALLTAPALGLPDLTKPFELFVDEKQGYAKGVLTQKLGPWRRPVAYLSKKLDPVAAGWPPCLRMVAAIAVLTKDAGKLTMGQPLVILAPHAVEALVKQPPDRWLSNARMTHYQALLLDTDRVQFGPVVALNPATLLPLPEEGLQHNCLDILAEAHGTRPDLTDQPLPDADHTWYTDGSSLLQEGQRKAGAAVTTETEVIWAKALPAGTSAQRAELIALTQALKMAEGKKLNVYTDSRYAFATAHIHGEIYRRRGWLTSEGKEIKNKDEILALLKALFLPKRLSIIHCPGHQKGHSAEARGNRMADQAARKAAITETPDTSTLLIENSSPSGGSKRTADGSEFEAGKRTADGSEFEKRTADGSEFESPKKKAKVE

SEQ ID NO: 2915 - protein, 2116 aa, synthetic construct; identical to SEQ ID NO: 2668

SEQ ID NO: 2916 - protein, 2113 aa, synthetic construct
MPAAKRVKLDGGDKKYSIGLDIGTNSVGWAVITDEYKVPSKKFKVLGNTDRHSIKKNLIGALLFDSGETAEATRLKRTARRRYTRRKNRICYLQEIFSNEMAKVDDSFFHRLEESFLVEEDKKHERHPIFGNIVDEVAYHEKYPTIYHLRKKLVDSTDKADLRLIYLALAHMIKFRGHFLIEGDLNPDNSDVDKLFIQLVQTYNQLFEENPINASGVDAKAILSARLSKSRRLENLIAQLPGEKKNGLFGNLIALSLGLTPNFKSNFDLAEDAKLQLSKDTYDDDLDNLLAQIGDQYADLFLAAKNLSDAILLSDILRVNTEITKAPLSASMIKRYDEHHQDLTLLKALVRQQLPEKYKEIFFDQSKNGYAGYIDGGASQEEFYKFIKPILEKMDGTEELLVKLNREDLLRKQRTFDNGSIPHQIHLGELHAILRRQEDFYPFLKDNREKIEKILTFRIPYYVGPLARGNSRFAWMTRKSEETITPWNFEEVVDKGASAQSFIERMTNFDKNLPNEKVLPKHSLLYEYFTVYNELTKVKYVTEGMRKPAFLSGEQKKAIVDLLFKTNRKVTVKQLKEDYFKKIECFDSVEISGVEDRFNASLGTYHDLLKIIKDKDFLDNEENEDILEDIVLTLTLFEDREMIEERLKTYAHLFDDKVMKQLKRRRYTGWGRLSRKLINGIRDKQSGKTILDFLKSDGFANRNFMQLIHDDSLTFKEDIQKAQVSGQGDSLHEHIANLAGSPAIKKGILQTVKVVDELVKVMGRHKPENIVIEMARENQTTQKGQKNSRERMKRIEEGIKELGSQILKEHPVENTQLQNEKLYLYYLQNGRDMYVDQELDINRLSDYDVDHIVPQSFLKDDSIDNKVLTRSDKARGKSDNVPSEEVVKKMKNYWRQLLNAKLITQRKFDNLTKAERGGLSELDKAGFIKRQLVETRQITKHVAQILDSRMNTKYDENDKLIREVKVITLKSKLVSDFRKDFQFYKVREINNYHHAHDAYLNAVVGTALIKKYPKLESEFVYGDYKVYDVRKMIAKSEQEIGKATAKYFFYSNIMNFFKTEITLANGEIRKRPLIETNGETGEIVWDKGRDFATVRKVLSMPQVNIVKKTEVQTGGFSKESILPKRNSDKLIARKKDWDPKKYGGFDSPTVAYSVLVVAKVEKGKSKKLKSVKELLGITIMERSSFEKNPIDFLEAKGYKEVKKDLIIKLPKYSLFELENGRKRMLASAGELQKGNELALPSKYVNFLYLASHYEKLKGSPEDNEQKQLFVEQHKHYLDEIIEQISEFSKRVILADANLDKVLSAYNKHRDKPIREQAENIIHLFTLTNLGAPAAFKYFDTTIDRKRYTSTKEVLDATLIHQSITGLYETRIDLSQLGGDGGGSSEAAAKGGTLNIEDEYRLHETSKEPDVSLGSTWLSDFPQAWAETGGMGLAVRQAPLIIPLKATSTPVSIKQYPMSQEARLGIKPHIQRLLDQGILVPCQSPWNTPLLPVKKPGTNDYRPVQDLREVNKRVEDIHPTVPNPYNLLSGLPPSHQWYTVLDLKDAFFCLRLHPTSQPLFAFEWRDPEMGISGQLTWTRLPQGFKNSPTLFNEALHRDLADFRIQHPDLILLQYVDDLLLAATSELDCQQGTRALLQTLGNLGYRASAKKAQICQKQVKYLGYLLKEGQRWLTEARKETVMGQPTPKTPRQLREFLGKAGFCRLFIPGFAEMAAPLYPLTKPGTLFNWGPDQQKAYQEIKQALLTAPALGLPDLTKPFELFVDEKQGYAKGVLTQKLGPWRRPVAYLSKKLDPVAAGWPPCLRMVAAIAVLTKDAGKLTMGQPLVILAPHAVEALVKQPPDRWLSNARMTHYQALLLDTDRVQFGPVVALNPATLLPLPEEGLQHNCLDILAEAHGTRPDLTDQPLPDADHTWYTDGSSLLQEGQRKAGAAVTTETEVIWAKALPAGTSAQRAELIALTQALKMAEGKKLNVYTDSRYAFATAHIHGEIYRRRGWLTSEGKEIKNKDEILALLKALFLPKRLSIIHCPGHQKGHSAEARGNRMADQAARKAAITETPDTSTLLIENSSPSGGSKRTADGSEFEAGKRTADGSEFEKRTADGSEFESPKKKAKVE

SEQ ID NO: 2917 - protein, 2123 aa, synthetic construct
MPAAKRVKLDGGDKKYSIGLDIGTNSVGWAVITDEYKVPSKKFKVLGNTDRHSIKKNLIGALLFDSGETAEATRLKRTARRRYTRRKNRICYLQEIFSNEMAKVDDSFFHRLEESFLVEEDKKHERHPIFGNIVDEVAYHEKYPTIYHLRKKLVDSTDKADLRLIYLALAHMIKFRGHFLIEGDLNPDNSDVDKLFIQLVQTYNQLFEENPINASGVDAKAILSARLSKSRRLENLIAQLPGEKKNGLFGNLIALSLGLTPNFKSNFDLAEDAKLQLSKDTYDDDLDNLLAQIGDQYADLFLAAKNLSDAILLSDILRVNTEITKAPLSASMIKRYDEHHQDLTLLKALVRQQLPEKYKEIFFDQSKNGYAGYIDGGASQEEFYKFIKPILEKMDGTEELLVKLNREDLLRKQRTFDNGSIPHQIHLGELHAILRRQEDFYPFLKDNREKIEKILTFRIPYYVGPLARGNSRFAWMTRKSEETITPWNFEEVVDKGASAQSFIERMTNFDKNLPNEKVLPKHSLLYEYFTVYNELTKVKYVTEGMRKPAFLSGEQKKAIVDLLFKTNRKVTVKQLKEDYFKKIECFDSVEISGVEDRFNASLGTYHDLLKIIKDKDFLDNEENEDILEDIVLTLTLFEDREMIEERLKTYAHLFDDKVMKQLKRRRYTGWGRLSRKLINGIRDKQSGKTILDFLKSDGFANRNFMQLIHDDSLTFKEDIQKAQVSGQGDSLHEHIANLAGSPAIKKGILQTVKVVDELVKVMGRHKPENIVIEMARENQTTQKGQKNSRERMKRIEEGIKELGSQILKEHPVENTQLQNEKLYLYYLQNGRDMYVDQELDINRLSDYDVDHIVPQSFLKDDSIDNKVLTRSDKARGKSDNVPSEEVVKKMKNYWRQLLNAKLITQRKFDNLTKAERGGLSELDKAGFIKRQLVETRQITKHVAQILDSRMNTKYDENDKLIREVKVITLKSKLVSDFRKDFQFYKVREINNYHHAHDAYLNAVVGTALIKKYPKLESEFVYGDYKVYDVRKMIAKSEQEIGKATAKYFFYSNIMNFFKTEITLANGEIRKRPLIETNGETGEIVWDKGRDFATVRKVLSMPQVNIVKKTEVQTGGFSKESILPKRNSDKLIARKKDWDPKKYGGFDSPTVAYSVLVVAKVEKGKSKKLKSVKELLGITIMERSSFEKNPIDFLEAKGYKEVKKDLIIKLPKYSLFELENGRKRMLASAGELQKGNELALPSKYVNFLYLASHYEKLKGSPEDNEQKQLFVEQHKHYLDEIIEQISEFSKRVILADANLDKVLSAYNKHRDKPIREQAENIIHLFTLTNLGAPAAFKYFDTTIDRKRYTSTKEVLDATLIHQSITGLYETRIDLSQLGGDGGGGSGGSGGSGGSGGSGGSGGTLNIEDEYRLHETSKEPDVSLGSTWLSDFPQAWAETGGMGLAVRQAPLIIPLKATSTPVSIKQYPMSQEARLGIKPHIQRLLDQGILVPCQSPWNTPLLPVKKPGTNDYRPVQDLREVNKRVEDIHPTVPNPYNLLSGLPPSHQWYTVLDLKDAFFCLRLHPTSQPLFAFEWRDPEMGISGQLTWTRLPQGFKNSPTLFNEALHRDLADFRIQHPDLILLQYVDDLLLAATSELDCQQGTRALLQTLGNLGYRASAKKAQICQKQVKYLGYLLKEGQRWLTEARKETVMGQPTPKTPRQLREFLGKAGFCRLFIPGFAEMAAPLYPLTKPGTLFNWGPDQQKAYQEIKQALLTAPALGLPDLTKPFELFVDEKQGYAKGVLTQKLGPWRRPVAYLSKKLDPVAAGWPPCLRMVAAIAVLTKDAGKLTMGQPLVILAPHAVEALVKQPPDRWLSNARMTHYQALLLDTDRVQFGPVVALNPATLLPLPEEGLQHNCLDILAEAHGTRPDLTDQPLPDADHTWYTDGSSLLQEGQRKAGAAVTTETEVIWAKALPAGTSAQRAELIALTQALKMAEGKKLNVYTDSRYAFATAHIHGEIYRRRGWLTSEGKEIKNKDEILALLKALFLPKRLSIIHCPGHQKGHSAEARGNRMADQAARKAAITETPDTSTLLIENSSPSGGSKRTADGSEFEAGKRTADGSEFEKRTADGSEFESPKKKAKVE

SEQ ID NO: 2918 - protein, 2114 aa, synthetic construct
MPAAKRVKLDGGDKKYSIGLDIGTNSVGWAVITDEYKVPSKKFKVLGNTDRHSIKKNLIGALLFDSGETAEATRLKRTARRRYTRRKNRICYLQEIFSNEMAKVDDSFFHRLEESFLVEEDKKHERHPIFGNIVDEVAYHEKYPTIYHLRKKLVDSTDKADLRLIYLALAHMIKFRGHFLIEGDLNPDNSDVDKLFIQLVQTYNQLFEENPINASGVDAKAILSARLSKSRRLENLIAQLPGEKKNGLFGNLIALSLGLTPNFKSNFDLAEDAKLQLSKDTYDDDLDNLLAQIGDQYADLFLAAKNLSDAILLSDILRVNTEITKAPLSASMIKRYDEHHQDLTLLKALVRQQLPEKYKEIFFDQSKNGYAGYIDGGASQEEFYKFIKPILEKMDGTEELLVKLNREDLLRKQRTFDNGSIPHQIHLGELHAILRRQEDFYPFLKDNREKIEKILTFRIPYYVGPLARGNSRFAWMTRKSEETITPWNFEEVVDKGASAQSFIERMTNFDKNLPNEKVLPKHSLLYEYFTVYNELTKVKYVTEGMRKPAFLSGEQKKAIVDLLFKTNRKVTVKQLKEDYFKKIECFDSVEISGVEDRFNASLGTYHDLLKIIKDKDFLDNEENEDILEDIVLTLTLFEDREMIEERLKTYAHLFDDKVMKQLKRRRYTGWGRLSRKLINGIRDKQSGKTILDFLKSDGFANRNFMQLIHDDSLTFKEDIQKAQVSGQGDSLHEHIANLAGSPAIKKGILQTVKVVDELVKVMGRHKPENIVIEMARENQTTQKGQKNSRERMKRIEEGIKELGSQILKEHPVENTQLQNEKLYLYYLQNGRDMYVDQELDINRLSDYDVDHIVPQSFLKDDSIDNKVLTRSDKARGKSDNVPSEEVVKKMKNYWRQLLNAKLITQRKFDNLTKAERGGLSELDKAGFIKRQLVETRQITKHVAQILDSRMNTKYDENDKLIREVKVITLKSKLVSDFRKDFQFYKVREINNYHHAHDAYLNAVVGTALIKKYPKLESEFVYGDYKVYDVRKMIAKSEQEIGKATAKYFFYSNIMNFFKTEITLANGEIRKRPLIETNGETGEIVWDKGRDFATVRKVLSMPQVNIVKKTEVQTGGFSKESILPKRNSDKLIARKKDWDPKKYGGFDSPTVAYSVLVVAKVEKGKSKKLKSVKELLGITIMERSSFEKNPIDFLEAKGYKEVKKDLIIKLPKYSLFELENGRKRMLASAGELQKGNELALPSKYVNFLYLASHYEKLKGSPEDNEQKQLFVEQHKHYLDEIIEQISEFSKRVILADANLDKVLSAYNKHRDKPIREQAENIIHLFTLTNLGAPAAFKYFDTTIDRKRYTSTKEVLDATLIHQSITGLYETRIDLSQLGGDGGGGGGGSPAPGGTLNIEDEYRLHETSKEPDVSLGSTWLSDFPQAWAETGGMGLAVRQAPLIIPLKATSTPVSIKQYPMSQEARLGIKPHIQRLLDQGILVPCQSPWNTPLLPVKKPGTNDYRPVQDLREVNKRVEDIHPTVPNPYNLLSGLPPSHQWYTVLDLKDAFFCLRLHPTSQPLFAFEWRDPEMGISGQLTWTRLPQGFKNSPTLFNEALHRDLADFRIQHPDLILLQYVDDLLLAATSELDCQQGTRALLQTLGNLGYRASAKKAQICQKQVKYLGYLLKEGQRWLTEARKETVMGQPTPKTPRQLREFLGKAGFCRLFIPGFAEMAAPLYPLTKPGTLFNWGPDQQKAYQEIKQALLTAPALGLPDLTKPFELFVDEKQGYAKGVLTQKLGPWRRPVAYLSKKLDPVAAGWPPCLRMVAAIAVLTKDAGKLTMGQPLVILAPHAVEALVKQPPDRWLSNARMTHYQALLLDTDRVQFGPVVALNPATLLPLPEEGLQHNCLDILAEAHGTRPDLTDQPLPDADHTWYTDGSSLLQEGQRKAGAAVTTETEVIWAKALPAGTSAQRAELIALTQALKMAEGKKLNVYTDSRYAFATAHIHGEIYRRRGWLTSEGKEIKNKDEILALLKALFLPKRLSIIHCPGHQKGHSAEARGNRMADQAARKAAITETPDTSTLLIENSSPSGGSKRTADGSEFEAGKRTADGSEFEKRTADGSEFESPKKKAKVE

SEQ ID NO: 2919 - protein, 2116 aa, synthetic construct; identical to SEQ ID NO: 2690

SEQ ID NO: 2920 - protein, 2116 aa, synthetic construct; identical to SEQ ID NO: 2648

SEQ ID NO: 2921 - protein, 2114 aa, synthetic construct; identical to SEQ ID NO: 2616

SEQ ID NO: 2922 - protein, 2116 aa, synthetic construct; identical to SEQ ID NO: 2666

SEQ ID NO: 2923 - protein, 2111 aa, synthetic construct
MPAAKRVKLDGGDKKYSIGLDIGTNSVGWAVITDEYKVPSKKFKVLGNTDRHSIKKNLIGALLFDSGETAEATRLKRTARRRYTRRKNRICYLQEIFSNEMAKVDDSFFHRLEESFLVEEDKKHERHPIFGNIVDEVAYHEKYPTIYHLRKKLVDSTDKADLRLIYLALAHMIKFRGHFLIEGDLNPDNSDVDKLFIQLVQTYNQLFEENPINASGVDAKAILSARLSKSRRLENLIAQLPGEKKNGLFGNLIALSLGLTPNFKSNFDLAEDAKLQLSKDTYDDDLDNLLAQIGDQYADLFLAAKNLSDAILLSDILRVNTEITKAPLSASMIKRYDEHHQDLTLLKALVRQQLPEKYKEIFFDQSKNGYAGYIDGGASQEEFYKFIKPILEKMDGTEELLVKLNREDLLRKQRTFDNGSIPHQIHLGELHAILRRQEDFYPFLKDNREKIEKILTFRIPYYVGPLARGNSRFAWMTRKSEETITPWNFEEVVDKGASAQSFIERMTNFDKNLPNEKVLPKHSLLYEYFTVYNELTKVKYVTEGMRKPAFLSGEQKKAIVDLLFKTNRKVTVKQLKEDYFKKIECFDSVEISGVEDRFNASLGTYHDLLKIIKDKDFLDNEENEDILEDIVLTLTLFEDREMIEERLKTYAHLFDDKVMKQLKRRRYTGWGRLSRKLINGIRDKQSGKTILDFLKSDGFANRNFMQLIHDDSLTFKEDIQKAQVSGQGDSLHEHIANLAGSPAIKKGILQTVKVVDELVKVMGRHKPENIVIEMARENQTTQKGQKNSRERMKRIEEGIKELGSQILKEHPVENTQLQNEKLYLYYLQNGRDMYVDQELDINRLSDYDVDHIVPQSFLKDDSIDNKVLTRSDKARGKSDNVPSEEVVKKMKNYWRQLLNAKLITQRKFDNLTKAERGGLSELDKAGFIKRQLVETRQITKHVAQILDSRMNTKYDENDKLIREVKVITLKSKLVSDFRKDFQFYKVREINNYHHAHDAYLNAVVGTALIKKYPKLESEFVYGDYKVYDVRKMIAKSEQEIGKATAKYFFYSNIMNFFKTEITLANGEIRKRPLIETNGETGEIVWDKGRDFATVRKVLSMPQVNIVKKTEVQTGGFSKESILPKRNSDKLIARKKDWDPKKYGGFDSPTVAYSVLVVAKVEKGKSKKLKSVKELLGITIMERSSFEKNPIDFLEAKGYKEVKKDLIIKLPKYSLFELENGRKRMLASAGELQKGNELALPSKYVNFLYLASHYEKLKGSPEDNEQKQLFVEQHKHYLDEIIEQISEFSKRVILADANLDKVLSAYNKHRDKPIREQAENIIHLFTLTNLGAPAAFKYFDTTIDRKRYTSTKEVLDATLIHQSITGLYETRIDLSQLGGDGGPAPGGGGGTLNIEDEYRLHETSKEPDVSLGSTWLSDFPQAWAETGGMGLAVRQAPLIIPLKATSTPVSIKQYPMSQEARLGIKPHIQRLLDQGILVPCQSPWNTPLLPVKKPGTNDYRPVQDLREVNKRVEDIHPTVPNPYNLLSGLPPSHQWYTVLDLKDAFFCLRLHPTSQPLFAFEWRDPEMGISGQLTWTRLPQGFKNSPTLFNEALHRDLADFRIQHPDLILLQYVDDLLLAATSELDCQQGTRALLQTLGNLGYRASAKKAQICQKQVKYLGYLLKEGQRWLTEARKETVMGQPTPKTPRQLREFLGKAGFCRLFIPGFAEMAAPLYPLTKPGTLFNWGPDQQKAYQEIKQALLTAPALGLPDLTKPFELFVDEKQGYAKGVLTQKLGPWRRPVAYLSKKLDPVAAGWPPCLRMVAAIAVLTKDAGKLTMGQPLVILAPHAVEALVKQPPDRWLSNARMTHYQALLLDTDRVQFGPVVALNPATLLPLPEEGLQHNCLDILAEAHGTRPDLTDQPLPDADHTWYTDGSSLLQEGQRKAGAAVTTETEVIWAKALPAGTSAQRAELIALTQALKMAEGKKLNVYTDSRYAFATAHIHGEIYRRRGWLTSEGKEIKNKDEILALLKALFLPKRLSIIHCPGHQKGHSAEARGNRMADQAARKAAITETPDTSTLLIENSSPSGGSKRTADGSEFEAGKRTADGSEFEKRTADGSEFESPKKKAKVE

SEQ ID NO: 2924 - protein, 2116 aa, synthetic construct
MPAAKRVKLDGGDKKYSIGLDIGTNSVGWAVITDEYKVPSKKFKVLGNTDRHSIKKNLIGALLFDSGETAEATRLKRTARRRYTRRKNRICYLQEIFSNEMAKVDDSFFHRLEESFLVEEDKKHERHPIFGNIVDEVAYHEKYPTIYHLRKKLVDSTDKADLRLIYLALAHMIKFRGHFLIEGDLNPDNSDVDKLFIQLVQTYNQLFEENPINASGVDAKAILSARLSKSRRLENLIAQLPGEKKNGLFGNLIALSLGLTPNFKSNFDLAEDAKLQLSKDTYDDDLDNLLAQIGDQYADLFLAAKNLSDAILLSDILRVNTEITKAPLSASMIKRYDEHHQDLTLLKALVRQQLPEKYKEIFFDQSKNGYAGYIDGGASQEEFYKFIKPILEKMDGTEELLVKLNREDLLRKQRTFDNGSIPHQIHLGELHAILRRQEDFYPFLKDNREKIEKILTFRIPYYVGPLARGNSRFAWMTRKSEETITPWNFEEVVDKGASAQSFIERMTNFDKNLPNEKVLPKHSLLYEYFTVYNELTKVKYVTEGMRKPAFLSGEQKKAIVDLLFKTNRKVTVKQLKEDYFKKIECFDSVEISGVEDRFNASLGTYHDLLKIIKDKDFLDNEENEDILEDIVLTLTLFEDREMIEERLKTYAHLFDDKVMKQLKRRRYTGWGRLSRKLINGIRDKQSGKTILDFLKSDGFANRNFMQLIHDDSLTFKEDIQKAQVSGQGDSLHEHIANLAGSPAIKKGILQTVKVVDELVKVMGRHKPENIVIEMARENQTTQKGQKNSRERMKRIEEGIKELGSQILKEHPVENTQLQNEKLYLYYLQNGRDMYVDQELDINRLSDYDVDHIVPQSFLKDDSIDNKVLTRSDKARGKSDNVPSEEVVKKMKNYWRQLLNAKLITQRKFDNLTKAERGGLSELDKAGFIKRQLVETRQITKHVAQILDSRMNTKYDENDKLIREVKVITLKSKLVSDFRKDFQFYKVREINNYHHAHDAYLNAVVGTALIKKYPKLESEFVYGDYKVYDVRKMIAKSEQEIGKATAKYFFYSNIMNFFKTEITLANGEIRKRPLIETNGETGEIVWDKGRDFATVRKVLSMPQVNIVKKTEVQTGGFSKESILPKRNSDKLIARKKDWDPKKYGGFDSPTVAYSVLVVAKVEKGKSKKLKSVKELLGITIMERSSFEKNPIDFLEAKGYKEVKKDLIIKLPKYSLFELENGRKRMLASAGELQKGNELALPSKYVNFLYLASHYEKLKGSPEDNEQKQLFVEQHKHYLDEIIEQISEFSKRVILADANLDKVLSAYNKHRDKPIREQAENIIHLFTLTNLGAPAAFKYFDTTIDRKRYTSTKEVLDATLIHQSITGLYETRIDLSQLGGDGGPAPEAAAKGGSGGTLNIEDEYRLHETSKEPDVSLGSTWLSDFPQAWAETGGMGLAVRQAPLIIPLKATSTPVSIKQYPMSQEARLGIKPHIQRLLDQGILVPCQSPWNTPLLPVKKPGTNDYRPVQDLREVNKRVEDIHPTVPNPYNLLSGLPPSHQWYTVLDLKDAFFCLRLHPTSQPLFAFEWRDPEMGISGQLTWTRLPQGFKNSPTLFNEALHRDLADFRIQHPDLILLQYVDDLLLAATSELDCQQGTRALLQTLGNLGYRASAKKAQICQKQVKYLGYLLKEGQRWLTEARKETVMGQPTPKTPRQLREFLGKAGFCRLFIPGFAEMAAPLYPLTKPGTLFNWGPDQQKAYQEIKQALLTAPALGLPDLTKPFELFVDEKQGYAKGVLTQKLGPWRRPVAYLSKKLDPVAAGWPPCLRMVAAIAVLTKDAGKLTMGQPLVILAPHAVEALVKQPPDRWLSNARMTHYQALLLDTDRVQFGPVVALNPATLLPLPEEGLQHNCLDILAEAHGTRPDLTDQPLPDADHTWYTDGSSLLQEGQRKAGAAVTTETEVIWAKALPAGTSAQRAELIALTQALKMAEGKKLNVYTDSRYAFATAHIHGEIYRRRGWLTSEGKEIKNKDEILALLKALFLPKRLSIIHCPGHQKGHSAEARGNRMADQAARKAAITETPDTSTLLIENSSPSGGSKRTADGSEFEAGKRTADGSEFEKRTADGSEFESPKKKAKVE

SEQ ID NO: 2925 - protein, 2116 aa, synthetic construct; identical to SEQ ID NO: 2628

SEQ ID NO: 2926 - protein, 2116 aa, synthetic construct; identical to SEQ ID NO: 2640

SEQ ID NO: 2927 - protein, 2109 aa, synthetic construct
MPAAKRVKLDGGDKKYSIGLDIGTNSVGWAVITDEYKVPSKKFKVLGNTDRHSIKKNLIGALLFDSGETAEATRLKRTARRRYTRRKNRICYLQEIFSNEMAKVDDSFFHRLEESFLVEEDKKHERHPIFGNIVDEVAYHEKYPTIYHLRKKLVDSTDKADLRLIYLALAHMIKFRGHFLIEGDLNPDNSDVDKLFIQLVQTYNQLFEENPINASGVDAKAILSARLSKSRRLENLIAQLPGEKKNGLFGNLIALSLGLTPNFKSNFDLAEDAKLQLSKDTYDDDLDNLLAQIGDQYADLFLAAKNLSDAILLSDILRVNTEITKAPLSASMIKRYDEHHQDLTLLKALVRQQLPEKYKEIFFDQSKNGYAGYIDGGASQEEFYKFIKPILEKMDGTEELLVKLNREDLLRKQRTFDNGSIPHQIHLGELHAILRRQEDFYPFLKDNREKIEKILTFRIPYYVGPLARGNSRFAWMTRKSEETITPWNFEEVVDKGASAQSFIERMTNFDKNLPNEKVLPKHSLLYEYFTVYNELTKVKYVTEGMRKPAFLSGEQKKAIVDLLFKTNRKVTVKQLKEDYFKKIECFDSVEISGVEDRFNASLGTYHDLLKIIKDKDFLDNEENEDILEDIVLTLTLFEDREMIEERLKTYAHLFDDKVMKQLKRRRYTGWGRLSRKLINGIRDKQSGKTILDFLKSDGFANRNFMQLIHDDSLTFKEDIQKAQVSGQGDSLHEHIANLAGSPAIKKGILQTVKVVDELVKVMGRHKPENIVIEMARENQTTQKGQKNSRERMKRIEEGIKELGSQILKEHPVENTQLQNEKLYLYYLQNGRDMYVDQELDINRLSDYDVDHIVPQSFLKDDSIDNKVLTRSDKARGKSDNVPSEEVVKKMKNYWRQLLNAKLITQRKFDNLTKAERGGLSELDKAGFIKRQLVETRQITKHVAQILDSRMNTKYDENDKLIREVKVITLKSKLVSDFRKDFQFYKVREINNYHHAHDAYLNAVVGTALIKKYPKLESEFVYGDYKVYDVRKMIAKSEQEIGKATAKYFFYSNIMNFFKTEITLANGEIRKRPLIETNGETGEIVWDKGRDFATVRKVLSMPQVNIVKKTEVQTGGFSKESILPKRNSDKLIARKKDWDPKKYGGFDSPTVAYSVLVVAKVEKGKSKKLKSVKELLGITIMERSSFEKNPIDFLEAKGYKEVKKDLIIKLPKYSLFELENGRKRMLASAGELQKGNELALPSKYVNFLYLASHYEKLKGSPEDNEQKQLFVEQHKHYLDEIIEQISEFSKRVILADANLDKVLSAYNKHRDKPIREQAENIIHLFTLTNLGAPAAFKYFDTTIDRKRYTSTKEVLDATLIHQSITGLYETRIDLSQLGGDGGGGGGGGTLNIEDEYRLHETSKEPDVSLGSTWLSDFPQAWAETGGMGLAVRQAPLIIPLKATSTPVSIKQYPMSQEARLGIKPHIQRLLDQGILVPCQSPWNTPLLPVKKPGTNDYRPVQDLREVNKRVEDIHPTVPNPYNLLSGLPPSHQWYTVLDLKDAFFCLRLHPTSQPLFAFEWRDPEMGISGQLTWTRLPQGFKNSPTLFNEALHRDLADFRIQHPDLILLQYVDDLLLAATSELDCQQGTRALLQTLGNLGYRASAKKAQICQKQVKYLGYLLKEGQRWLTEARKETVMGQPTPKTPRQLREFLGKAGFCRLFIPGFAEMAAPLYPLTKPGTLFNWGPDQQKAYQEIKQALLTAPALGLPDLTKPFELFVDEKQGYAKGVLTQKLGPWRRPVAYLSKKLDPVAAGWPPCLRMVAAIAVLTKDAGKLTMGQPLVILAPHAVEALVKQPPDRWLSNARMTHYQALLLDTDRVQFGPVVALNPATLLPLPEEGLQHNCLDILAEAHGTRPDLTDQPLPDADHTWYTDGSSLLQEGQRKAGAAVTTETEVIWAKALPAGTSAQRAELIALTQALKMAEGKKLNVYTDSRYAFATAHIHGEIYRRRGWLTSEGKEIKNKDEILALLKALFLPKRLSIIHCPGHQKGHSAEARGNRMADQAARKAAITETPDTSTLLIENSSPSGGSKRTADGSEFEAGKRTADGSEFEKRTADGSEFESPKKKAKVE

SEQ ID NO: 2928 - protein, 2116 aa, synthetic construct
MPAAKRVKLDGGDKKYSIGLDIGTNSVGWAVITDEYKVPSKKFKVLGNTDRHSIKKNLIGALLFDSGETAEATRLKRTARRRYTRRKNRICYLQEIFSNEMAKVDDSFFHRLEESFLVEEDKKHERHPIFGNIVDEVAYHEKYPTIYHLRKKLVDSTDKADLRLIYLALAHMIKFRGHFLIEGDLNPDNSDVDKLFIQLVQTYNQLFEENPINASGVDAKAILSARLSKSRRLENLIAQLPGEKKNGLFGNLIALSLGLTPNFKSNFDLAEDAKLQLSKDTYDDDLDNLLAQIGDQYADLFLAAKNLSDAILLSDILRVNTEITKAPLSASMIKRYDEHHQDLTLLKALVRQQLPEKYKEIFFDQSKNGYAGYIDGGASQEEFYKFIKPILEKMDGTEELLVKLNREDLLRKQRTFDNGSIPHQIHLGELHAILRRQEDFYPFLKDNREKIEKILTFRIPYYVGPLARGNSRFAWMTRKSEETITPWNFEEVVDKGASAQSFIERMTNFDKNLPNEKVLPKHSLLYEYFTVYNELTKVKYVTEGMRKPAFLSGEQKKAIVDLLFKTNRKVTVKQLKEDYFKKIECFDSVEISGVEDRFNASLGTYHDLLKIIKDKDFLDNEENEDILEDIVLTLTLFEDREMIEERLKTYAHLFDDKVMKQLKRRRYTGWGRLSRKLINGIRDKQSGKTILDFLKSDGFANRNFMQLIHDDSLTFKEDIQKAQVSGQGDSLHEHIANLAGSPAIKKGILQTVKVVDELVKVMGRHKPENIVIEMARENQTTQKGQKNSRERMKRIEEGIKELGSQILKEHPVENTQLQNEKLYLYYLQNGRDMYVDQELDINRLSDYDVDHIVPQSFLKDDSIDNKVLTRSDKARGKSDNVPSEEVVKKMKNYWRQLLNAKLITQRKFDNLTKAERGGLSELDKAGFIKRQLVETRQITKHVAQILDSRMNTKYDENDKLIREVKVITLKSKLVSDFRKDFQFYKVREINNYHHAHDAYLNAVVGTALIKKYPKLESEFVYGDYKVYDVRKMIAKSEQEIGKATAKYFFYSNIMNFFKTEITLANGEIRKRPLIETNGETGEIVWDKGRDFATVRKVLSMPQVNIVKKTEVQTGGFSKESILPKRNSDKLIARKKDWDPKKYGGFDSPTVAYSVLVVAKVEKGKSKKLKSVKELLGITIMERSSFEKNPIDFLEAKGYKEVKKDLIIKLPKYSLFELENGRKRMLASAGELQKGNELALPSKYVNFLYLASHYEKLKGSPEDNEQKQLFVEQHKHYLDEIIEQISEFSKRVILADANLDKVLSAYNKHRDKPIREQAENIIHLFTLTNLGAPAAFKYFDTTIDRKRYTSTKEVLDATLIHQSITGLYETRIDLSQLGGDGGGGGGGSEAAAKGGTLNIEDEYRLHETSKEPDVSLGSTWLSDFPQAWAETGGMGLAVRQAPLIIPLKATSTPVSIKQYPMSQEARLGIKPHIQRLLDQGILVPCQSPWNTPLLPVKKPGTNDYRPVQDLREVNKRVEDIHPTVPNPYNLLSGLPPSHQWYTVLDLKDAFFCLRLHPTSQPLFAFEWRDPEMGISGQLTWTRLPQGFKNSPTLFNEALHRDLADFRIQHPDLILLQYVDDLLLAATSELDCQQGTRALLQTLGNLGYRASAKKAQICQKQVKYLGYLLKEGQRWLTEARKETVMGQPTPKTPRQLREFLGKAGFCRLFIPGFAEMAAPLYPLTKPGTLFNWGPDQQKAYQEIKQALLTAPALGLPDLTKPFELFVDEKQGYAKGVLTQKLGPWRRPVAYLSKKLDPVAAGWPPCLRMVAAIAVLTKDAGKLTMGQPLVILAPHAVEALVKQPPDRWLSNARMTHYQALLLDTDRVQFGPVVALNPATLLPLPEEGLQHNCLDILAEAHGTRPDLTDQPLPDADHTWYTDGSSLLQEGQRKAGAAVTTETEVIWAKALPAGTSAQRAELIALTQALKMAEGKKLNVYTDSRYAFATAHIHGEIYRRRGWLTSEGKEIKNKDEILALLKALFLPKRLSIIHCPGHQKGHSAEARGNRMADQAARKAAITETPDTSTLLIENSSPSGGSKRTADGSEFEAGKRTADGSEFEKRTADGSEFESPKKKAKVE

SEQ ID NO: 2929 - protein, 2113 aa, synthetic construct; identical to SEQ ID NO: 2700

SEQ ID NO: 2930 - protein, 2114 aa, synthetic construct; identical to SEQ ID NO: 2656

SEQ ID NO: 2931 - protein, 2116 aa, synthetic construct; identical to SEQ ID NO: 2652

SEQ ID NO: 2932 - protein, 2120 aa, synthetic construct; identical to SEQ ID NO: 2623

SEQ ID NO: 2933 - protein, 2113 aa, synthetic construct; identical to SEQ ID NO: 2657

SEQ ID NO: 2934 - protein, 2111 aa, synthetic construct; identical to SEQ ID NO: 2693

SEQ ID NO: 2935 - protein, 2108 aa, synthetic construct; identical to SEQ ID NO: 2646

SEQ ID NO: 2936 - protein, 2111 aa, synthetic construct
MPAAKRVKLDGGDKKYSIGLDIGTNSVGWAVITDEYKVPSKKFKVLGNTDRHSIKKNLIGALLFDSGETAEATRLKRTARRRYTRRKNRICYLQEIFSNEMAKVDDSFFHRLEESFLVEEDKKHERHPIFGNIVDEVAYHEKYPTIYHLRKKLVDSTDKADLRLIYLALAHMIKFRGHFLIEGDLNPDNSDVDKLFIQLVQTYNQLFEENPINASGVDAKAILSARLSKSRRLENLIAQLPGEKKNGLFGNLIALSLGLTPNFKSNFDLAEDAKLQLSKDTYDDDLDNLLAQIGDQYADLFLAAKNLSDAILLSDILRVNTEITKAPLSASMIKRYDEHHQDLTLLKALVRQQLPEKYKEIFFDQSKNGYAGYIDGGASQEEFYKFIKPILEKMDGTEELLVKLNREDLLRKQRTFDNGSIPHQIHLGELHAILRRQEDFYPFLKDNREKIEKILTFRIPYYVGPLARGNSRFAWMTRKSEETITPWNFEEVVDKGASAQSFIERMTNFDKNLPNEKVLPKHSLLYEYFTVYNELTKVKYVTEGMRKPAFLSGEQKKAIVDLLFKTNRKVTVKQLKEDYFKKIECFDSVEISGVEDRFNASLGTYHDLLKIIKDKDFLDNEENEDILEDIVLTLTLFEDREMIEERLKTYAHLFDDKVMKQLKRRRYTGWGRLSRKLINGIRDKQSGKTILDFLKSDGFANRNFMQLIHDDSLTFKEDIQKAQVSGQGDSLHEHIANLAGSPAIKKGILQTVKVVDELVKVMGRHKPENIVIEMARENQTTQKGQKNSRERMKRIEEGIKELGSQILKEHPVENTQLQNEKLYLYYLQNGRDMYVDQELDINRLSDYDVDHIVPQSFLKDDSIDNKVLTRSDKARGKSDNVPSEEVVKKMKNYWRQLLNAKLITQRKFDNLTKAERGGLSELDKAGFIKRQLVETRQITKHVAQILDSRMNTKYDENDKLIREVKVITLKSKLVSDFRKDFQFYKVREINNYHHAHDAYLNAVVGTALIKKYPKLESEFVYGDYKVYDVRKMIAKSEQEIGKATAKYFFYSNIMNFFKTEITLANGEIRKRPLIETNGETGEIVWDKGRDFATVRKVLSMPQVNIVKKTEVQTGGFSKESILPKRNSDKLIARKKDWDPKKYGGFDSPTVAYSVLVVAKVEKGKSKKLKSVKELLGITIMERSSFEKNPIDFLEAKGYKEVKKDLIIKLPKYSLFELENGRKRMLASAGELQKGNELALPSKYVNFLYLASHYEKLKGSPEDNEQKQLFVEQHKHYLDEIIEQISEFSKRVILADANLDKVLSAYNKHRDKPIREQAENIIHLFTLTNLGAPAAFKYFDTTIDRKRYTSTKEVLDATLIHQSITGLYETRIDLSQLGGDGGPAPGSSGGTLNIEDEYRLHETSKEPDVSLGSTWLSDFPQAWAETGGMGLAVRQAPLIIPLKATSTPVSIKQYPMSQEARLGIKPHIQRLLDQGILVPCQSPWNTPLLPVKKPGTNDYRPVQDLREVNKRVEDIHPTVPNPYNLLSGLPPSHQWYTVLDLKDAFFCLRLHPTSQPLFAFEWRDPEMGISGQLTWTRLPQGFKNSPTLFNEALHRDLADFRIQHPDLILLQYVDDLLLAATSELDCQQGTRALLQTLGNLGYRASAKKAQICQKQVKYLGYLLKEGQRWLTEARKETVMGQPTPKTPRQLREFLGKAGFCRLFIPGFAEMAAPLYPLTKPGTLFNWGPDQQKAYQEIKQALLTAPALGLPDLTKPFELFVDEKQGYAKGVLTQKLGPWRRPVAYLSKKLDPVAAGWPPCLRMVAAIAVLTKDAGKLTMGQPLVILAPHAVEALVKQPPDRWLSNARMTHYQALLLDTDRVQFGPVVALNPATLLPLPEEGLQHNCLDILAEAHGTRPDLTDQPLPDADHTWYTDGSSLLQEGQRKAGAAVTTETEVIWAKALPAGTSAQRAELIALTQALKMAEGKKLNVYTDSRYAFATAHIHGEIYRRRGWLTSEGKEIKNKDEILALLKALFLPKRLSIIHCPGHQKGHSAEARGNRMADQAARKAAITETPDTSTLLIENSSPSGGSKRTADGSEFEAGKRTADGSEFEKRTADGSEFESPKKKAKVE

SEQ ID NO: 2937 - protein, 2120 aa, synthetic construct; identical to SEQ ID NO: 2636

SEQ ID NO: 2938 - protein, 2116 aa, synthetic construct; identical to SEQ ID NO: 2661

SEQ ID NO: 2939 - protein, 2120 aa, synthetic construct; identical to SEQ ID NO: 2680

SEQ ID NO: 2940 - protein, 2116 aa, synthetic construct
MPAAKRVKLDGGDKKYSIGLDIGTNSVGWAVITDEYKVPSKKFKVLGNTDRHSIKKNLIGALLFDSGETAEATRLKRTARRRYTRRKNRICYLQEIFSNEMAKVDDSFFHRLEESFLVEEDKKHERHPIFGNIVDEVAYHEKYPTIYHLRKKLVDSTDKADLRLIYLALAHMIKFRGHFLIEGDLNPDNSDVDKLFIQLVQTYNQLFEENPINASGVDAKAILSARLSKSRRLENLIAQLPGEKKNGLFGNLIALSLGLTPNFKSNFDLAEDAKLQLSKDTYDDDLDNLLAQIGDQYADLFLAAKNLSDAILLSDILRVNTEITKAPLSASMIKRYDEHHQDLTLLKALVRQQLPEKYKEIFFDQSKNGYAGYIDGGASQEEFYKFIKPILEKMDGTEELLVKLNREDLLRKQRTFDNGSIPHQIHLGELHAILRRQEDFYPFLKDNREKIEKILTFRIPYYVGPLARGNSRFAWMTRKSEETITPWNFEEVVDKGASAQSFIERMTNFDKNLPNEKVLPKHSLLYEYFTVYNELTKVKYVTEGMRKPAFLSGEQKKAIVDLLFKTNRKVTVKQLKEDYFKKIECFDSVEISGVEDRFNASLGTYHDLLKIIKDKDFLDNEENEDILEDIVLTLTLFEDREMIEERLKTYAHLFDDKVMKQLKRRRYTGWGRLSRKLINGIRDKQSGKTILDFLKSDGFANRNFMQLIHDDSLTFKEDIQKAQVSGQGDSLHEHIANLAGSPAIKKGILQTVKVVDELVKVMGRHKPENIVIEMARENQTTQKGQKNSRERMKRIEEGIKELGSQILKEHPVENTQLQNEKLYLYYLQNGRDMYVDQELDINRLSDYDVDHIVPQSFLKDDSIDNKVLTRSDKARGKSDNVPSEEVVKKMKNYWRQLLNAKLITQRKFDNLTKAERGGLSELDKAGFIKRQLVETRQITKHVAQILDSRMNTKYDENDKLIREVKVITLKSKLVSDFRKDFQFYKVREINNYHHAHDAYLNAVVGTALIKKYPKLESEFVYGDYKVYDVRKMIAKSEQEIGKATAKYFFYSNIMNFFKTEITLANGEIRKRPLIETNGETGEIVWDKGRDFATVRKVLSMPQVNIVKKTEVQTGGFSKESILPKRNSDKLIARKKDWDPKKYGGFDSPTVAYSVLVVAKVEKGKSKKLKSVKELLGITIMERSSFEKNPIDFLEAKGYKEVKKDLIIKLPKYSLFELENGRKRMLASAGELQKGNELALPSKYVNFLYLASHYEKLKGSPEDNEQKQLFVEQHKHYLDEIIEQISEFSKRVILADANLDKVLSAYNKHRDKPIREQAENIIHLFTLTNLGAPAAFKYFDTTIDRKRYTSTKEVLDATLIHQSITGLYETRIDLSQLGGDGGGGGPAPEAAAKGGTLNIEDEYRLHETSKEPDVSLGSTWLSDFPQAWAETGGMGLAVRQAPLIIPLKATSTPVSIKQYPMSQEARLGIKPHIQRLLDQGILVPCQSPWNTPLLPVKKPGTNDYRPVQDLREVNKRVEDIHPTVPNPYNLLSGLPPSHQWYTVLDLKDAFFCLRLHPTSQPLFAFEWRDPEMGISGQLTWTRLPQGFKNSPTLFNEALHRDLADFRIQHPDLILLQYVDDLLLAATSELDCQQGTRALLQTLGNLGYRASAKKAQICQKQVKYLGYLLKEGQRWLTEARKETVMGQPTPKTPRQLREFLGKAGFCRLFIPGFAEMAAPLYPLTKPGTLFNWGPDQQKAYQEIKQALLTAPALGLPDLTKPFELFVDEKQGYAKGVLTQKLGPWRRPVAYLSKKLDPVAAGWPPCLRMVAAIAVLTKDAGKLTMGQPLVILAPHAVEALVKQPPDRWLSNARMTHYQALLLDTDRVQFGPVVALNPATLLPLPEEGLQHNCLDILAEAHGTRPDLTDQPLPDADHTWYTDGSSLLQEGQRKAGAAVTTETEVIWAKALPAGTSAQRAELIALTQALKMAEGKKLNVYTDSRYAFATAHIHGEIYRRRGWLTSEGKEIKNKDEILALLKALFLPKRLSIIHCPGHQKGHSAEARGNRMADQAARKAAITETPDTSTLLIENSSPSGGSKRTADGSEFEAGKRTADGSEFEKRTADGSEFESPKKKAKVE

SEQ ID NO: 2941 - protein, 2120 aa, synthetic construct; identical to SEQ ID NO: 2669

SEQ ID NO: 2942 - protein, 2116 aa, synthetic construct; identical to SEQ ID NO: 2695

SEQ ID NO: 2943 - protein, 2123 aa, synthetic construct; identical to SEQ ID NO: 2612

SEQ ID NO: 2944 - protein, 2110 aa, synthetic construct; identical to SEQ ID NO: 2691

SEQ ID NO: 2945 - protein, 2113 aa, synthetic construct; identical to SEQ ID NO: 2659

SEQ ID NO: 2946 - protein, 2114 aa, synthetic construct; identical to SEQ ID NO: 2694

SEQ ID NO: 2947 - protein, 2111 aa, synthetic construct; identical to SEQ ID NO: 2682

SEQ ID NO: 2948 - protein, 2114 aa, synthetic construct; identical to SEQ ID NO: 2675

SEQ ID NO: 2949 - protein, 2116 aa, synthetic construct; identical to SEQ ID NO: 2686

SEQ ID NO: 2950 - protein, 2114 aa, synthetic construct; identical to SEQ ID NO: 2632

SEQ ID NO: 2951 - protein, 2113 aa, synthetic construct; identical to SEQ ID NO: 2625

SEQ ID NO: 2952 - protein, 2114 aa, synthetic construct; identical to SEQ ID NO: 2699

SEQ ID NO: 2953 - protein, 2113 aa, synthetic construct
MPAAKRVKLDGGDKKYSIGLDIGTNSVGWAVITDEYKVPSKKFKVLGNTDRHSIKKNLIGALLFDSGETAEATRLKRTARRRYTRRKNRICYLQEIFSNEMAKVDDSFFHRLEESFLVEEDKKHERHPIFGNIVDEVAYHEKYPTIYHLRKKLVDSTDKADLRLIYLALAHMIKFRGHFLIEGDLNPDNSDVDKLFIQLVQTYNQLFEENPINASGVDAKAILSARLSKSRRLENLIAQLPGEKKNGLFGNLIALSLGLTPNFKSNFDLAEDAKLQLSKDTYDDDLDNLLAQIGDQYADLFLAAKNLSDAILLSDILRVNTEITKAPLSASMIKRYDEHHQDLTLLKALVRQQLPEKYKEIFFDQSKNGYAGYIDGGASQEEFYKFIKPILEKMDGTEELLVKLNREDLLRKQRTFDNGSIPHQIHLGELHAILRRQEDFYPFLKDNREKIEKILTFRIPYYVGPLARGNSRFAWMTRKSEETITPWNFEEVVDKGASAQSFIERMTNFDKNLPNEKVLPKHSLLYEYFTVYNELTKVKYVTEGMRKPAFLSGEQKKAIVDLLFKTNRKVTVKQLKEDYFKKIECFDSVEISGVEDRFNASLGTYHDLLKIIKDKDFLDNEENEDILEDIVLTLTLFEDREMIEERLKTYAHLFDDKVMKQLKRRRYTGWGRLSRKLINGIRDKQSGKTILDFLKSDGFANRNFMQLIHDDSLTFKEDIQKAQVSGQGDSLHEHIANLAGSPAIKKGILQTVKVVDELVKVMGRHKPENIVIEMARENQTTQKGQKNSRERMKRIEEGIKELGSQILKEHPVENTQLQNEKLYLYYLQNGRDMYVDQELDINRLSDYDVDHIVPQSFLKDDSIDNKVLTRSDKARGKSDNVPSEEVVKKMKNYWRQLLNAKLITQRKFDNLTKAERGGLSELDKAGFIKRQLVETRQITKHVAQILDSRMNTKYDENDKLIREVKVITLKSKLVSDFRKDFQFYKVREINNYHHAHDAYLNAVVGTALIKKYPKLESEFVYGDYKVYDVRKMIAKSEQEIGKATAKYFFYSNIMNFFKTEITLANGEIRKRPLIETNGETGEIVWDKGRDFATVRKVLSMPQVNIVKKTEVQTGGFSKESILPKRNSDKLIARKKDWDPKKYGGFDSPTVAYSVLVVAKVEKGKSKKLKSVKELLGITIMERSSFEKNPIDFLEAKGYKEVKKDLIIKLPKYSLFELENGRKRMLASAGELQKGNELALPSKYVNFLYLASHYEKLKGSPEDNEQKQLFVEQHKHYLDEIIEQISEFSKRVILADANLDKVLSAYNKHRDKPIREQAENIIHLFTLTNLGAPAAFKYFDTTIDRKRYTSTKEVLDATLIHQSITGLYETRIDLSQLGGDGGGGGEAAAKGGTLNIEDEYRLHETSKEPDVSLGSTWLSDFPQAWAETGGMGLAVRQAPLIIPLKATSTPVSIKQYPMSQEARLGIKPHIQRLLDQGILVPCQSPWNTPLLPVKKPGTNDYRPVQDLREVNKRVEDIHPTVPNPYNLLSGLPPSHQWYTVLDLKDAFFCLRLHPTSQPLFAFEWRDPEMGISGQLTWTRLPQGFKNSPTLFNEALHRDLADFRIQHPDLILLQYVDDLLLAATSELDCQQGTRALLQTLGNLGYRASAKKAQICQKQVKYLGYLLKEGQRWLTEARKETVMGQPTPKTPRQLREFLGKAGFCRLFIPGFAEMAAPLYPLTKPGTLFNWGPDQQKAYQEIKQALLTAPALGLPDLTKPFELFVDEKQGYAKGVLTQKLGPWRRPVAYLSKKLDPVAAGWPPCLRMVAAIAVLTKDAGKLTMGQPLVILAPHAVEALVKQPPDRWLSNARMTHYQALLLDTDRVQFGPVVALNPATLLPLPEEGLQHNCLDILAEAHGTRPDLTDQPLPDADHTWYTDGSSLLQEGQRKAGAAVTTETEVIWAKALPAGTSAQRAELIALTQALKMAEGKKLNVYTDSRYAFATAHIHGEIYRRRGWLTSEGKEIKNKDEILALLKALFLPKRLSIIHCPGHQKGHSAEARGNRMADQAARKAAITETPDTSTLLIENSSPSGGSKRTADGSEFEAGKRTADGSEFEKRTADGSEFESPKKKAKVE

SEQ ID NO: 2954 - protein, 2114 aa, synthetic construct
MPAAKRVKLDGGDKKYSIGLDIGTNSVGWAVITDEYKVPSKKFKVLGNTDRHSIKKNLIGALLFDSGETAEATRLKRTARRRYTRRKNRICYLQEIFSNEMAKVDDSFFHRLEESFLVEEDKKHERHPIFGNIVDEVAYHEKYPTIYHLRKKLVDSTDKADLRLIYLALAHMIKFRGHFLIEGDLNPDNSDVDKLFIQLVQTYNQLFEENPINASGVDAKAILSARLSKSRRLENLIAQLPGEKKNGLFGNLIALSLGLTPNFKSNFDLAEDAKLQLSKDTYDDDLDNLLAQIGDQYADLFLAAKNLSDAILLSDILRVNTEITKAPLSASMIKRYDEHHQDLTLLKALVRQQLPEKYKEIFFDQSKNGYAGYIDGGASQEEFYKFIKPILEKMDGTEELLVKLNREDLLRKQRTFDNGSIPHQIHLGELHAILRRQEDFYPFLKDNREKIEKILTFRIPYYVGPLARGNSRFAWMTRKSEETITPWNFEEVVDKGASAQSFIERMTNFDKNLPNEKVLPKHSLLYEYFTVYNELTKVKYVTEGMRKPAFLSGEQKKAIVDLLFKTNRKVTVKQLKEDYFKKIECFDSVEISGVEDRFNASLGTYHDLLKIIKDKDFLDNEENEDILEDIVLTLTLFEDREMIEERLKTYAHLFDDKVMKQLKRRRYTGWGRLSRKLINGIRDKQSGKTILDFLKSDGFANRNFMQLIHDDSLTFKEDIQKAQVSGQGDSLHEHIANLAGSPAIKKGILQTVKVVDELVKVMGRHKPENIVIEMARENQTTQKGQKNSRERMKRIEEGIKELGSQILKEHPVENTQLQNEKLYLYYLQNGRDMYVDQELDINRLSDYDVDHIVPQSFLKDDSIDNKVLTRSDKARGKSDNVPSEEVVKKMKNYWRQLLNAKLITQRKFDNLTKAERGGLSELDKAGFIKRQLVETRQITKHVAQILDSRMNTKYDENDKLIREVKVITLKSKLVSDFRKDFQFYKVREINNYHHAHDAYLNAVVGTALIKKYPKLESEFVYGDYKVYDVRKMIAKSEQEIGKATAKYFFYSNIMNFFKTEITLANGEIRKRPLIETNGETGEIVWDKGRDFATVRKVLSMPQVNIVKKTEVQTGGFSKESILPKRNSDKLIARKKDWDPKKYGGFDSPTVAYSVLVVAKVEKGKSKKLKSVKELLGITIMERSSFEKNPIDFLEAKGYKEVKKDLIIKLPKYSLFELENGRKRMLASAGELQKGNELALPSKYVNFLYLASHYEKLKGSPEDNEQKQLFVEQHKHYLDEIIEQISEFSKRVILADANLDKVLSAYNKHRDKPIREQAENIIHLFTLTNLGAPAAFKYFDTTIDRKRYTSTKEVLDATLIHQSITGLYETRIDLSQLGGDGGGSSGGGPAPGGTLNIEDEYRLHETSKEPDVSLGSTWLSDFPQAWAETGGMGLAVRQAPLIIPLKATSTPVSIKQYPMSQEARLGIKPHIQRLLDQGILVPCQSPWNTPLLPVKKPGTNDYRPVQDLREVNKRVEDIHPTVPNPYNLLSGLPPSHQWYTVLDLKDAFFCLRLHPTSQPLFAFEWRDPEMGISGQLTWTRLPQGFKNSPTLFNEALHRDLADFRIQHPDLILLQYVDDLLLAATSELDCQQGTRALLQTLGNLGYRASAKKAQICQKQVKYLGYLLKEGQRWLTEARKETVMGQPTPKTPRQLREFLGKAGFCRLFIPGFAEMAAPLYPLTKPGTLFNWGPDQQKAYQEIKQALLTAPALGLPDLTKPFELFVDEKQGYAKGVLTQKLGPWRRPVAYLSKKLDPVAAGWPPCLRMVAAIAVLTKDAGKLTMGQPLVILAPHAVEALVKQPPDRWLSNARMTHYQALLLDTDRVQFGPVVALNPATLLPLPEEGLQHNCLDILAEAHGTRPDLTDQPLPDADHTWYTDGSSLLQEGQRKAGAAVTTETEVIWAKALPAGTSAQRAELIALTQALKMAEGKKLNVYTDSRYAFATAHIHGEIYRRRGWLTSEGKEIKNKDEILALLKALFLPKRLSIIHCPGHQKGHSAEARGNRMADQAARKAAITETPDTSTLLIENSSPSGGSKRTADGSEFEAGKRTADGSEFEKRTADGSEFESPKKKAKVE

SEQ ID NO: 2955 - protein, 2114 aa, synthetic construct; identical to SEQ ID NO: 2689

SEQ ID NO: 2956 - protein, 1999 aa, synthetic construct
MPAAKRVKLDGGDKKYSIGLDIGTNSVGWAVITDEYKVPSKKFKVLGNTDRHSIKKNLIGALLFDSGETAEATRLKRTARRRYTRRKNRICYLQEIFSNEMAKVDDSFFHRLEESFLVEEDKKHERHPIFGNIVDEVAYHEKYPTIYHLRKKLVDSTDKADLRLIYLALAHMIKFRGHFLIEGDLNPDNSDVDKLFIQLVQTYNQLFEENPINASGVDAKAILSARLSKSRRLENLIAQLPGEKKNGLFGNLIALSLGLTPNFKSNFDLAEDAKLQLSKDTYDDDLDNLLAQIGDQYADLFLAAKNLSDAILLSDILRVNTEITKAPLSASMIKRYDEHHQDLTLLKALVRQQLPEKYKEIFFDQSKNGYAGYIDGGASQEEFYKFIKPILEKMDGTEELLVKLNREDLLRKQRTFDNGSIPHQIHLGELHAILRRQEDFYPFLKDNREKIEKILTFRIPYYVGPLARGNSRFAWMTRKSEETITPWNFEEVVDKGASAQSFIERMTNFDKNLPNEKVLPKHSLLYEYFTVYNELTKVKYVTEGMRKPAFLSGEQKKAIVDLLFKTNRKVTVKQLKEDYFKKIECFDSVEISGVEDRFNASLGTYHDLLKIIKDKDFLDNEENEDILEDIVLTLTLFEDREMIEERLKTYAHLFDDKVMKQLKRRRYTGWGRLSRKLINGIRDKQSGKTILDFLKSDGFANRNFMQLIHDDSLTFKEDIQKAQVSGQGDSLHEHIANLAGSPAIKKGILQTVKVVDELVKVMGRHKPENIVIEMARENQTTQKGQKNSRERMKRIEEGIKELGSQILKEHPVENTQLQNEKLYLYYLQNGRDMYVDQELDINRLSDYDVDHIVPQSFLKDDSIDNKVLTRSDKARGKSDNVPSEEVVKKMKNYWRQLLNAKLITQRKFDNLTKAERGGLSELDKAGFIKRQLVETRQITKHVAQILDSRMNTKYDENDKLIREVKVITLKSKLVSDFRKDFQFYKVREINNYHHAHDAYLNAVVGTALIKKYPKLESEFVYGDYKVYDVRKMIAKSEQEIGKATAKYFFYSNIMNFFKTEITLANGEIRKRPLIETNGETGEIVWDKGRDFATVRKVLSMPQVNIVKKTEVQTGGFSKESILPKRNSDKLIARKKDWDPKKYGGFDSPTVAYSVLVVAKVEKGKSKKLKSVKELLGITIMERSSFEKNPIDFLEAKGYKEVKKDLIIKLPKYSLFELENGRKRMLASAGELQKGNELALPSKYVNFLYLASHYEKLKGSPEDNEQKQLFVEQHKHYLDEIIEQISEFSKRVILADANLDKVLSAYNKHRDKPIREQAENIIHLFTLTNLGAPAAFKYFDTTIDRKRYTSTKEVLDATLIHQSITGLYETRIDLSQLGGDGGGGGGSSGGSGGGVLDAPPSHIGLEHLPPPPEVPQFPLNLERLQALQDLVHRSLEAGYISPWDGPGNNPVFPVRKPNGAWRFVHDLRVTNALTKPIPALSPGPPDLTAIPTHLPHIICLDLKDAFFQIPVEDRFRSYFAFTLPTPGGLQPHRRFAWRVLPQGFINSPALFQRALQEPLRQVSAAFSQSLLVSYMDDILYVSPTEEQRLQCYQTMAAHLRDLGFQVASEKTRQTPSPVPFLGQMVHERMVTYQSLPTLQISSPISLHQLQTVLGDLQWVSRGTPTTRRPLQLLYSSLKPIDDPRAIIHLSPEQQQGIAELRQALSHNARSRYNEQEPLLAYVHLTRAGSTLVLFQKGAQFPLAYFQTPLTDNQASPWGLLLLLGCQYLQAQALSSYAKTILKYYHNLPKTSLDNWIQSSEDPRVQELLQLWPQISSQGIQPPGPWKTLVTRAEVFLTPQFSPEPIPAALCLFSDGAARRGAYCLWKDHLLDFQAVPAPESAQKGELAGLLAGLAAAPPEPLNIWVDSKYLYSLLRTLVLGAWLQPDPVPSYALLYKSLLRHPAIFVGHVRSHSSASHPIASLNNYVDQLAGKRTADGSEFEKRTADGSEFESPKKKAKVE

SEQ ID NO: 2957 - protein, 2131 aa, synthetic construct
MPAAKRVKLDGGDKKYSIGLDIGTNSVGWAVITDEYKVPSKKFKVLGNTDRHSIKKNLIGALLFDSGETAEATRLKRTARRRYTRRKNRICYLQEIFSNEMAKVDDSFFHRLEESFLVEEDKKHERHPIFGNIVDEVAYHEKYPTIYHLRKKLVDSTDKADLRLIYLALAHMIKFRGHFLIEGDLNPDNSDVDKLFIQLVQTYNQLFEENPINASGVDAKAILSARLSKSRRLENLIAQLPGEKKNGLFGNLIALSLGLTPNFKSNFDLAEDAKLQLSKDTYDDDLDNLLAQIGDQYADLFLAAKNLSDAILLSDILRVNTEITKAPLSASMIKRYDEHHQDLTLLKALVRQQLPEKYKEIFFDQSKNGYAGYIDGGASQEEFYKFIKPILEKMDGTEELLVKLNREDLLRKQRTFDNGSIPHQIHLGELHAILRRQEDFYPFLKDNREKIEKILTFRIPYYVGPLARGNSRFAWMTRKSEETITPWNFEEVVDKGASAQSFIERMTNFDKNLPNEKVLPKHSLLYEYFTVYNELTKVKYVTEGMRKPAFLSGEQKKAIVDLLFKTNRKVTVKQLKEDYFKKIECFDSVEISGVEDRFNASLGTYHDLLKIIKDKDFLDNEENEDILEDIVLTLTLFEDREMIEERLKTYAHLFDDKVMKQLKRRRYTGWGRLSRKLINGIRDKQSGKTILDFLKSDGFANRNFMQLIHDDSLTFKEDIQKAQVSGQGDSLHEHIANLAGSPAIKKGILQTVKVVDELVKVMGRHKPENIVIEMARENQTTQKGQKNSRERMKRIEEGIKELGSQILKEHPVENTQLQNEKLYLYYLQNGRDMYVDQELDINRLSDYDVDHIVPQSFLKDDSIDNKVLTRSDKARGKSDNVPSEEVVKKMKNYWRQLLNAKLITQRKFDNLTKAERGGLSELDKAGFIKRQLVETRQITKHVAQILDSRMNTKYDENDKLIREVKVITLKSKLVSDFRKDFQFYKVREINNYHHAHDAYLNAVVGTALIKKYPKLESEFVYGDYKVYDVRKMIAKSEQEIGKATAKYFFYSNIMNFFKTEITLANGEIRKRPLIETNGETGEIVWDKGRDFATVRKVLSMPQVNIVKKTEVQTGGFSKESILPKRNSDKLIARKKDWDPKKYGGFDSPTVAYSVLVVAKVEKGKSKKLKSVKELLGITIMERSSFEKNPIDFLEAKGYKEVKKDLIIKLPKYSLFELENGRKRMLASAGELQKGNELALPSKYVNFLYLASHYEKLKGSPEDNEQKQLFVEQHKHYLDEIIEQISEFSKRVILADANLDKVLSAYNKHRDKPIREQAENIIHLFTLTNLGAPAAFKYFDTTIDRKRYTSTKEVLDATLIHQSITGLYETRIDLSQLGGDGGAEAAAKEAAAKEAAAKEAAAKALEAEAAAKEAAAKEAAAKEAAAKAGGTLNIEDEHRLHETSKEPDVSLGSTWLSDFPQAWAETGGMGLAVRQAPLIIPLKATSTPVSIKQYPMSQEARLGIKPHIQRLLDQGILVPCQSPWNTPLLPVKKPGTNDYRPVQDLREVNKRVEDIHPTVPNPYNLLSGLPPSHQWYTVLDLKDAFFCLRLHPTSQPLFAFEWRDPEMGISGQLTWTRLPQGFKNSPTLFDEALHRDLADFRIQHPDLILLQYVDDLLLAATSELDCQQGTRALLQTLGNLGYRASAKKAQICQKQVKYLGYLLKEGQRWLTEARKETVMGQPTPKTPRQLREFLGTAGFCRLWIPGFAEMAAPLYPLTKTGTLFNWGPDQQKAYQEIKQALLTAPALGLPDLTKPFELFVDEKQGYAKGVLTQKLGPWRRPVAYLSKKLDPVAAGWPPCLRMVAAIAVLTKDAGKLTMGQPLVILAPHAVEALVKQPPDRWLSNARMTHYQALLLDTDRVQFGPVVALNPATLLPLPEEGLQHNCLDILAEAHGTRPDLTDQPLPDADHTWYTDGSSLLQEGQRKAGAAVTTETEVIWAKALPAGTSAQRAELIALTQALKMAEGKKLNVYTDSRYAFATAHIHGEIYRRRGLLTSEGKEIKNKDEILALLKALFLPKRLSIIHCPGHQKGHSAEARGNRMADQAARKAAITETPDTSTLLAGKRTADGSEFEKRTADGSEFESPKKKAKVE

SEQ ID NO: 2958 - protein, 2101 aa, synthetic construct
MPAAKRVKLDGGDKKYSIGLDIGTNSVGWAVITDEYKVPSKKFKVLGNTDRHSIKKNLIGALLFDSGETAEATRLKRTARRRYTRRKNRICYLQEIFSNEMAKVDDSFFHRLEESFLVEEDKKHERHPIFGNIVDEVAYHEKYPTIYHLRKKLVDSTDKADLRLIYLALAHMIKFRGHFLIEGDLNPDNSDVDKLFIQLVQTYNQLFEENPINASGVDAKAILSARLSKSRRLENLIAQLPGEKKNGLFGNLIALSLGLTPNFKSNFDLAEDAKLQLSKDTYDDDLDNLLAQIGDQYADLFLAAKNLSDAILLSDILRVNTEITKAPLSASMIKRYDEHHQDLTLLKALVRQQLPEKYKEIFFDQSKNGYAGYIDGGASQEEFYKFIKPILEKMDGTEELLVKLNREDLLRKQRTFDNGSIPHQIHLGELHAILRRQEDFYPFLKDNREKIEKILTFRIPYYVGPLARGNSRFAWMTRKSEETITPWNFEEVVDKGASAQSFIERMTNFDKNLPNEKVLPKHSLLYEYFTVYNELTKVKYVTEGMRKPAFLSGEQKKAIVDLLFKTNRKVTVKQLKEDYFKKIECFDSVEISGVEDRFNASLGTYHDLLKIIKDKDFLDNEENEDILEDIVLTLTLFEDREMIEERLKTYAHLFDDKVMKQLKRRRYTGWGRLSRKLINGIRDKQSGKTILDFLKSDGFANRNFMQLIHDDSLTFKEDIQKAQVSGQGDSLHEHIANLAGSPAIKKGILQTVKVVDELVKVMGRHKPENIVIEMARENQTTQKGQKNSRERMKRIEEGIKELGSQILKEHPVENTQLQNEKLYLYYLQNGRDMYVDQELDINRLSDYDVDHIVPQSFLKDDSIDNKVLTRSDKARGKSDNVPSEEVVKKMKNYWRQLLNAKLITQRKFDNLTKAERGGLSELDKAGFIKRQLVETRQITKHVAQILDSRMNTKYDENDKLIREVKVITLKSKLVSDFRKDFQFYKVREINNYHHAHDAYLNAVVGTALIKKYPKLESEFVYGDYKVYDVRKMIAKSEQEIGKATAKYFFYSNIMNFFKTEITLANGEIRKRPLIETNGETGEIVWDKGRDFATVRKVLSMPQVNIVKKTEVQTGGFSKESILPKRNSDKLIARKKDWDPKKYGGFDSPTVAYSVLVVAKVEKGKSKKLKSVKELLGITIMERSSFEKNPIDFLEAKGYKEVKKDLIIKLPKYSLFELENGRKRMLASAGELQKGNELALPSKYVNFLYLASHYEKLKGSPEDNEQKQLFVEQHKHYLDEIIEQISEFSKRVILADANLDKVLSAYNKHRDKPIREQAENIIHLFTLTNLGAPAAFKYFDTTIDRKRYTSTKEVLDATLIHQSITGLYETRIDLSQLGGDGGSGSETPGTSESATPESGGTLNIEDEHRLHETSKEPDVSLGSTWLSDFPQAWAETGGMGLAVRQAPLIIPLKATSTPVSIKQYPMSQEARLGIKPHIQRLLDQGILVPCQSPWNTPLLPVKKPGTNDYRPVQDLREVNKRVEDIHPTVPNPYNLLSGLPPSHQWYTVLDLKDAFFCLRLHPTSQPLFAFEWRDPEMGISGQLTWTRLPQGFKNSPTLFDEALHRDLADFRIQHPDLILLQYVDDLLLAATSELDCQQGTRALLQTLGNLGYRASAKKAQICQKQVKYLGYLLKEGQRWLTEARKETVMGQPTPKTPRQLREFLGTAGFCRLWIPGFAEMAAPLYPLTKTGTLFNWGPDQQKAYQEIKQALLTAPALGLPDLTKPFELFVDEKQGYAKGVLTQKLGPWRRPVAYLSKKLDPVAAGWPPCLRMVAAIAVLTKDAGKLTMGQPLVILAPHAVEALVKQPPDRWLSNARMTHYQALLLDTDRVQFGPVVALNPATLLPLPEEGLQHNCLDILAEAHGTRPDLTDQPLPDADHTWYTDGSSLLQEGQRKAGAAVTTETEVIWAKALPAGTSAQRAELIALTQALKMAEGKKLNVYTDSRYAFATAHIHGEIYRRRGLLTSEGKEIKNKDEILALLKALFLPKRLSIIHCPGHQKGHSAEARGNRMADQAARKAAITETPDTSTLLAGKRTADGSEFEKRTADGSEFESPKKKAKVE

SEQ ID NO: 2959 - protein, 2096 aa, synthetic construct
MPAAKRVKLDGGDKKYSIGLDIGTNSVGWAVITDEYKVPSKKFKVLGNTDRHSIKKNLIGALLFDSGETAEATRLKRTARRRYTRRKNRICYLQEIFSNEMAKVDDSFFHRLEESFLVEEDKKHERHPIFGNIVDEVAYHEKYPTIYHLRKKLVDSTDKADLRLIYLALAHMIKFRGHFLIEGDLNPDNSDVDKLFIQLVQTYNQLFEENPINASGVDAKAILSARLSKSRRLENLIAQLPGEKKNGLFGNLIALSLGLTPNFKSNFDLAEDAKLQLSKDTYDDDLDNLLAQIGDQYADLFLAAKNLSDAILLSDILRVNTEITKAPLSASMIKRYDEHHQDLTLLKALVRQQLPEKYKEIFFDQSKNGYAGYIDGGASQEEFYKFIKPILEKMDGTEELLVKLNREDLLRKQRTFDNGSIPHQIHLGELHAILRRQEDFYPFLKDNREKIEKILTFRIPYYVGPLARGNSRFAWMTRKSEETITPWNFEEVVDKGASAQSFIERMTNFDKNLPNEKVLPKHSLLYEYFTVYNELTKVKYVTEGMRKPAFLSGEQKKAIVDLLFKTNRKVTVKQLKEDYFKKIECFDSVEISGVEDRFNASLGTYHDLLKIIKDKDFLDNEENEDILEDIVLTLTLFEDREMIEERLKTYAHLFDDKVMKQLKRRRYTGWGRLSRKLINGIRDKQSGKTILDFLKSDGFANRNFMQLIHDDSLTFKEDIQKAQVSGQGDSLHEHIANLAGSPAIKKGILQTVKVVDELVKVMGRHKPENIVIEMARENQTTQKGQKNSRERMKRIEEGIKELGSQILKEHPVENTQLQNEKLYLYYLQNGRDMYVDQELDINRLSDYDVDHIVPQSFLKDDSIDNKVLTRSDKARGKSDNVPSEEVVKKMKNYWRQLLNAKLITQRKFDNLTKAERGGLSELDKAGFIKRQLVETRQITKHVAQILDSRMNTKYDENDKLIREVKVITLKSKLVSDFRKDFQFYKVREINNYHHAHDAYLNAVVGTALIKKYPKLESEFVYGDYKVYDVRKMIAKSEQEIGKATAKYFFYSNIMNFFKTEITLANGEIRKRPLIETNGETGEIVWDKGRDFATVRKVLSMPQVNIVKKTEVQTGGFSKESILPKRNSDKLIARKKDWDPKKYGGFDSPTVAYSVLVVAKVEKGKSKKLKSVKELLGITIMERSSFEKNPIDFLEAKGYKEVKKDLIIKLPKYSLFELENGRKRMLASAGELQKGNELALPSKYVNFLYLASHYEKLKGSPEDNEQKQLFVEQHKHYLDEIIEQISEFSKRVILADANLDKVLSAYNKHRDKPIREQAENIIHLFTLTNLGAPAAFKYFDTTIDRKRYTSTKEVLDATLIHQSITGLYETRIDLSQLGGDGGEAAAKGGSGGGGGTLNIEDEHRLHETSKEPDVSLGSTWLSDFPQAWAETGGMGLAVRQAPLIIPLKATSTPVSIKQYPMSQEARLGIKPHIQRLLDQGILVPCQSPWNTPLLPVKKPGTNDYRPVQDLREVNKRVEDIHPTVPNPYNLLSGLPPSHQWYTVLDLKDAFFCLRLHPTSQPLFAFEWRDPEMGISGQLTWTRLPQGFKNSPTLFDEALHRDLADFRIQHPDLILLQYVDDLLLAATSELDCQQGTRALLQTLGNLGYRASAKKAQICQKQVKYLGYLLKEGQRWLTEARKETVMGQPTPKTPRQLREFLGTAGFCRLWIPGFAEMAAPLYPLTKTGTLFNWGPDQQKAYQEIKQALLTAPALGLPDLTKPFELFVDEKQGYAKGVLTQKLGPWRRPVAYLSKKLDPVAAGWPPCLRMVAAIAVLTKDAGKLTMGQPLVILAPHAVEALVKQPPDRWLSNARMTHYQALLLDTDRVQFGPVVALNPATLLPLPEEGLQHNCLDILAEAHGTRPDLTDQPLPDADHTWYTDGSSLLQEGQRKAGAAVTTETEVIWAKALPAGTSAQRAELIALTQALKMAEGKKLNVYTDSRYAFATAHIHGEIYRRRGLLTSEGKEIKNKDEILALLKALFLPKRLSIIHCPGHQKGHSAEARGNRMADQAARKAAITETPDTSTLLAGKRTADGSEFEKRTADGSEFESPKKKAKVE

SEQ ID NO: 2960 - protein, 2096 aa, synthetic construct
MPAAKRVKLDGGDKKYSIGLDIGTNSVGWAVITDEYKVPSKKFKVLGNTDRHSIKKNLIGALLFDSGETAEATRLKRTARRRYTRRKNRICYLQEIFSNEMAKVDDSFFHRLEESFLVEEDKKHERHPIFGNIVDEVAYHEKYPTIYHLRKKLVDSTDKADLRLIYLALAHMIKFRGHFLIEGDLNPDNSDVDKLFIQLVQTYNQLFEENPINASGVDAKAILSARLSKSRRLENLIAQLPGEKKNGLFGNLIALSLGLTPNFKSNFDLAEDAKLQLSKDTYDDDLDNLLAQIGDQYADLFLAAKNLSDAILLSDILRVNTEITKAPLSASMIKRYDEHHQDLTLLKALVRQQLPEKYKEIFFDQSKNGYAGYIDGGASQEEFYKFIKPILEKMDGTEELLVKLNREDLLRKQRTFDNGSIPHQIHLGELHAILRRQEDFYPFLKDNREKIEKILTFRIPYYVGPLARGNSRFAWMTRKSEETITPWNFEEVVDKGASAQSFIERMTNFDKNLPNEKVLPKHSLLYEYFTVYNELTKVKYVTEGMRKPAFLSGEQKKAIVDLLFKTNRKVTVKQLKEDYFKKIECFDSVEISGVEDRFNASLGTYHDLLKIIKDKDFLDNEENEDILEDIVLTLTLFEDREMIEERLKTYAHLFDDKVMKQLKRRRYTGWGRLSRKLINGIRDKQSGKTILDFLKSDGFANRNFMQLIHDDSLTFKEDIQKAQVSGQGDSLHEHIANLAGSPAIKKGILQTVKVVDELVKVMGRHKPENIVIEMARENQTTQKGQKNSRERMKRIEEGIKELGSQILKEHPVENTQLQNEKLYLYYLQNGRDMYVDQELDINRLSDYDVDHIVPQSFLKDDSIDNKVLTRSDKARGKSDNVPSEEVVKKMKNYWRQLLNAKLITQRKFDNLTKAERGGLSELDKAGFIKRQLVETRQITKHVAQILDSRMNTKYDENDKLIREVKVITLKSKLVSDFRKDFQFYKVREINNYHHAHDAYLNAVVGTALIKKYPKLESEFVYGDYKVYDVRKMIAKSEQEIGKATAKYFFYSNIMNFFKTEITLANGEIRKRPLIETNGETGEIVWDKGRDFATVRKVLSMPQVNIVKKTEVQTGGFSKESILPKRNSDKLIARKKDWDPKKYGGFDSPTVAYSVLVVAKVEKGKSKKLKSVKELLGITIMERSSFEKNPIDFLEAKGYKEVKKDLIIKLPKYSLFELENGRKRMLASAGELQKGNELALPSKYVNFLYLASHYEKLKGSPEDNEQKQLFVEQHKHYLDEIIEQISEFSKRVILADANLDKVLSAYNKHRDKPIREQAENIIHLFTLTNLGAPAAFKYFDTTIDRKRYTSTKEVLDATLIHQSITGLYETRIDLSQLGGDGGGGSEAAAKGSSGGTLNIEDEHRLHETSKEPDVSLGSTWLSDFPQAWAETGGMGLAVRQAPLIIPLKATSTPVSIKQYPMSQEARLGIKPHIQRLLDQGILVPCQSPWNTPLLPVKKPGTNDYRPVQDLREVNKRVEDIHPTVPNPYNLLSGLPPSHQWYTVLDLKDAFFCLRLHPTSQPLFAFEWRDPEMGISGQLTWTRLPQGFKNSPTLFDEALHRDLADFRIQHPDLILLQYVDDLLLAATSELDCQQGTRALLQTLGNLGYRASAKKAQICQKQVKYLGYLLKEGQRWLTEARKETVMGQPTPKTPRQLREFLGTAGFCRLWIPGFAEMAAPLYPLTKTGTLFNWGPDQQKAYQEIKQALLTAPALGLPDLTKPFELFVDEKQGYAKGVLTQKLGPWRRPVAYLSKKLDPVAAGWPPCLRMVAAIAVLTKDAGKLTMGQPLVILAPHAVEALVKQPPDRWLSNARMTHYQALLLDTDRVQFGPVVALNPATLLPLPEEGLQHNCLDILAEAHGTRPDLTDQPLPDADHTWYTDGSSLLQEGQRKAGAAVTTETEVIWAKALPAGTSAQRAELIALTQALKMAEGKKLNVYTDSRYAFATAHIHGEIYRRRGLLTSEGKEIKNKDEILALLKALFLPKRLSIIHCPGHQKGHSAEARGNRMADQAARKAAITETPDTSTLLAGKRTADGSEFEKRTADGSEFESPKKKAKVE

SEQ ID NO: 2961 - protein, 2096 aa, synthetic construct
MPAAKRVKLDGGDKKYSIGLDIGTNSVGWAVITDEYKVPSKKFKVLGNTDRHSIKKNLIGALLFDSGETAEATRLKRTARRRYTRRKNRICYLQEIFSNEMAKVDDSFFHRLEESFLVEEDKKHERHPIFGNIVDEVAYHEKYPTIYHLRKKLVDSTDKADLRLIYLALAHMIKFRGHFLIEGDLNPDNSDVDKLFIQLVQTYNQLFEENPINASGVDAKAILSARLSKSRRLENLIAQLPGEKKNGLFGNLIALSLGLTPNFKSNFDLAEDAKLQLSKDTYDDDLDNLLAQIGDQYADLFLAAKNLSDAILLSDILRVNTEITKAPLSASMIKRYDEHHQDLTLLKALVRQQLPEKYKEIFFDQSKNGYAGYIDGGASQEEFYKFIKPILEKMDGTEELLVKLNREDLLRKQRTFDNGSIPHQIHLGELHAILRRQEDFYPFLKDNREKIEKILTFRIPYYVGPLARGNSRFAWMTRKSEETITPWNFEEVVDKGASAQSFIERMTNFDKNLPNEKVLPKHSLLYEYFTVYNELTKVKYVTEGMRKPAFLSGEQKKAIVDLLFKTNRKVTVKQLKEDYFKKIECFDSVEISGVEDRFNASLGTYHDLLKIIKDKDFLDNEENEDILEDIVLTLTLFEDREMIEERLKTYAHLFDDKVMKQLKRRRYTGWGRLSRKLINGIRDKQSGKTILDFLKSDGFANRNFMQLIHDDSLTFKEDIQKAQVSGQGDSLHEHIANLAGSPAIKKGILQTVKVVDELVKVMGRHKPENIVIEMARENQTTQKGQKNSRERMKRIEEGIKELGSQILKEHPVENTQLQNEKLYLYYLQNGRDMYVDQELDINRLSDYDVDHIVPQSFLKDDSIDNKVLTRSDKARGKSDNVPSEEVVKKMKNYWRQLLNAKLITQRKFDNLTKAERGGLSELDKAGFIKRQLVETRQITKHVAQILDSRMNTKYDENDKLIREVKVITLKSKLVSDFRKDFQFYKVREINNYHHAHDAYLNAVVGTALIKKYPKLESEFVYGDYKVYDVRKMIAKSEQEIGKATAKYFFYSNIMNFFKTEITLANGEIRKRPLIETNGETGEIVWDKGRDFATVRKVLSMPQVNIVKKTEVQTGGFSKESILPKRNSDKLIARKKDWDPKKYGGFDSPTVAYSVLVVAKVEKGKSKKLKSVKELLGITIMERSSFEKNPIDFLEAKGYKEVKKDLIIKLPKYSLFELENGRKRMLASAGELQKGNELALPSKYVNFLYLASHYEKLKGSPEDNEQKQLFVEQHKHYLDEIIEQISEFSKRVILADANLDKVLSAYNKHRDKPIREQAENIIHLFTLTNLGAPAAFKYFDTTIDRKRYTSTKEVLDATLIHQSITGLYETRIDLSQLGGDGGPAPGGSEAAAKGGTLNIEDEHRLHETSKEPDVSLGSTWLSDFPQAWAETGGMGLAVRQAPLIIPLKATSTPVSIKQYPMSQEARLGIKPHIQRLLDQGILVPCQSPWNTPLLPVKKPGTNDYRPVQDLREVNKRVEDIHPTVPNPYNLLSGLPPSHQWYTVLDLKDAFFCLRLHPTSQPLFAFEWRDPEMGISGQLTWTRLPQGFKNSPTLFDEALHRDLADFRIQHPDLILLQYVDDLLLAATSELDCQQGTRALLQTLGNLGYRASAKKAQICQKQVKYLGYLLKEGQRWLTEARKETVMGQPTPKTPRQLREFLGTAGFCRLWIPGFAEMAAPLYPLTKTGTLFNWGPDQQKAYQEIKQALLTAPALGLPDLTKPFELFVDEKQGYAKGVLTQKLGPWRRPVAYLSKKLDPVAAGWPPCLRMVAAIAVLTKDAGKLTMGQPLVILAPHAVEALVKQPPDRWLSNARMTHYQALLLDTDRVQFGPVVALNPATLLPLPEEGLQHNCLDILAEAHGTRPDLTDQPLPDADHTWYTDGSSLLQEGQRKAGAAVTTETEVIWAKALPAGTSAQRAELIALTQALKMAEGKKLNVYTDSRYAFATAHIHGEIYRRRGLLTSEGKEIKNKDEILALLKALFLPKRLSIIHCPGHQKGHSAEARGNRMADQAARKAAITETPDTSTLLAGKRTADGSEFEKRTADGSEFESPKKKAKVE

SEQ ID NO: 2962 - protein, 2093 aa, synthetic construct
MPAAKRVKLDGGDKKYSIGLDIGTNSVGWAVITDEYKVPSKKFKVLGNTDRHSIKKNLIGALLFDSGETAEATRLKRTARRRYTRRKNRICYLQEIFSNEMAKVDDSFFHRLEESFLVEEDKKHERHPIFGNIVDEVAYHEKYPTIYHLRKKLVDSTDKADLRLIYLALAHMIKFRGHFLIEGDLNPDNSDVDKLFIQLVQTYNQLFEENPINASGVDAKAILSARLSKSRRLENLIAQLPGEKKNGLFGNLIALSLGLTPNFKSNFDLAEDAKLQLSKDTYDDDLDNLLAQIGDQYADLFLAAKNLSDAILLSDILRVNTEITKAPLSASMIKRYDEHHQDLTLLKALVRQQLPEKYKEIFFDQSKNGYAGYIDGGASQEEFYKFIKPILEKMDGTEELLVKLNREDLLRKQRTFDNGSIPHQIHLGELHAILRRQEDFYPFLKDNREKIEKILTFRIPYYVGPLARGNSRFAWMTRKSEETITPWNFEEVVDKGASAQSFIERMTNFDKNLPNEKVLPKHSLLYEYFTVYNELTKVKYVTEGMRKPAFLSGEQKKAIVDLLFKTNRKVTVKQLKEDYFKKIECFDSVEISGVEDRFNASLGTYHDLLKIIKDKDFLDNEENEDILEDIVLTLTLFEDREMIEERLKTYAHLFDDKVMKQLKRRRYTGWGRLSRKLINGIRDKQSGKTILDFLKSDGFANRNFMQLIHDDSLTFKEDIQKAQVSGQGDSLHEHIANLAGSPAIKKGILQTVKVVDELVKVMGRHKPENIVIEMARENQTTQKGQKNSRERMKRIEEGIKELGSQILKEHPVENTQLQNEKLYLYYLQNGRDMYVDQELDINRLSDYDVDHIVPQSFLKDDSIDNKVLTRSDKARGKSDNVPSEEVVKKMKNYWRQLLNAKLITQRKFDNLTKAERGGLSELDKAGFIKRQLVETRQITKHVAQILDSRMNTKYDENDKLIREVKVITLKSKLVSDFRKDFQFYKVREINNYHHAHDAYLNAVVGTALIKKYPKLESEFVYGDYKVYDVRKMIAKSEQEIGKATAKYFFYSNIMNFFKTEITLANGEIRKRPLIETNGETGEIVWDKGRDFATVRKVLSMPQVNIVKKTEVQTGGFSKESILPKRNSDKLIARKKDWDPKKYGGFDSPTVAYSVLVVAKVEKGKSKKLKSVKELLGITIMERSSFEKNPIDFLEAKGYKEVKKDLIIKLPKYSLFELENGRKRMLASAGELQKGNELALPSKYVNFLYLASHYEKLKGSPEDNEQKQLFVEQHKHYLDEIIEQISEFSKRVILADANLDKVLSAYNKHRDKPIREQAENIIHLFTLTNLGAPAAFKYFDTTIDRKRYTSTKEVLDATLIHQSITGLYETRIDLSQLGGDGGGGSEAAAKGGTLNIEDEHRLHETSKEPDVSLGSTWLSDFPQAWAETGGMGLAVRQAPLIIPLKATSTPVSIKQYPMSQEARLGIKPHIQRLLDQGILVPCQSPWNTPLLPVKKPGTNDYRPVQDLREVNKRVEDIHPTVPNPYNLLSGLPPSHQWYTVLDLKDAFFCLRLHPTSQPLFAFEWRDPEMGISGQLTWTRLPQGFKNSPTLFDEALHRDLADFRIQHPDLILLQYVDDLLLAATSELDCQQGTRALLQTLGNLGYRASAKKAQICQKQVKYLGYLLKEGQRWLTEARKETVMGQPTPKTPRQLREFLGTAGFCRLWIPGFAEMAAPLYPLTKTGTLFNWGPDQQKAYQEIKQALLTAPALGLPDLTKPFELFVDEKQGYAKGVLTQKLGPWRRPVAYLSKKLDPVAAGWPPCLRMVAAIAVLTKDAGKLTMGQPLVILAPHAVEALVKQPPDRWLSNARMTHYQALLLDTDRVQFGPVVALNPATLLPLPEEGLQHNCLDILAEAHGTRPDLTDQPLPDADHTWYTDGSSLLQEGQRKAGAAVTTETEVIWAKALPAGTSAQRAELIALTQALKMAEGKKLNVYTDSRYAFATAHIHGEIYRRRGLLTSEGKEIKNKDEILALLKALFLPKRLSIIHCPGHQKGHSAEARGNRMADQAARKAAITETPDTSTLLAGKRTADGSEFEKRTADGSEFESPKKKAKVE

SEQ ID NO: 2963 - protein, 2088 aa, synthetic construct
MPAAKRVKLDGGDKKYSIGLDIGTNSVGWAVITDEYKVPSKKFKVLGNTDRHSIKKNLIGALLFDSGETAEATRLKRTARRRYTRRKNRICYLQEIFSNEMAKVDDSFFHRLEESFLVEEDKKHERHPIFGNIVDEVAYHEKYPTIYHLRKKLVDSTDKADLRLIYLALAHMIKFRGHFLIEGDLNPDNSDVDKLFIQLVQTYNQLFEENPINASGVDAKAILSARLSKSRRLENLIAQLPGEKKNGLFGNLIALSLGLTPNFKSNFDLAEDAKLQLSKDTYDDDLDNLLAQIGDQYADLFLAAKNLSDAILLSDILRVNTEITKAPLSASMIKRYDEHHQDLTLLKALVRQQLPEKYKEIFFDQSKNGYAGYIDGGASQEEFYKFIKPILEKMDGTEELLVKLNREDLLRKQRTFDNGSIPHQIHLGELHAILRRQEDFYPFLKDNREKIEKILTFRIPYYVGPLARGNSRFAWMTRKSEETITPWNFEEVVDKGASAQSFIERMTNFDKNLPNEKVLPKHSLLYEYFTVYNELTKVKYVTEGMRKPAFLSGEQKKAIVDLLFKTNRKVTVKQLKEDYFKKIECFDSVEISGVEDRFNASLGTYHDLLKIIKDKDFLDNEENEDILEDIVLTLTLFEDREMIEERLKTYAHLFDDKVMKQLKRRRYTGWGRLSRKLINGIRDKQSGKTILDFLKSDGFANRNFMQLIHDDSLTFKEDIQKAQVSGQGDSLHEHIANLAGSPAIKKGILQTVKVVDELVKVMGRHKPENIVIEMARENQTTQKGQKNSRERMKRIEEGIKELGSQILKEHPVENTQLQNEKLYLYYLQNGRDMYVDQELDINRLSDYDVDHIVPQSFLKDDSIDNKVLTRSDKARGKSDNVPSEEVVKKMKNYWRQLLNAKLITQRKFDNLTKAERGGLSELDKAGFIKRQLVETRQITKHVAQILDSRMNTKYDENDKLIREVKVITLKSKLVSDFRKDFQFYKVREINNYHHAHDAYLNAVVGTALIKKYPKLESEFVYGDYKVYDVRKMIAKSEQEIGKATAKYFFYSNIMNFFKTEITLANGEIRKRPLIETNGETGEIVWDKGRDFATVRKVLSMPQVNIVKKTEVQTGGFSKESILPKRNSDKLIARKKDWDPKKYGGFDSPTVAYSVLVVAKVEKGKSKKLKSVKELLGITIMERSSFEKNPIDFLEAKGYKEVKKDLIIKLPKYSLFELENGRKRMLASAGELQKGNELALPSKYVNFLYLASHYEKLKGSPEDNEQKQLFVEQHKHYLDEIIEQISEFSKRVILADANLDKVLSAYNKHRDKPIREQAENIIHLFTLTNLGAPAAFKYFDTTIDRKRYTSTKEVLDATLIHQSITGLYETRIDLSQLGGDGGGSSGGTLNIEDEHRLHETSKEPDVSLGSTWLSDFPQAWAETGGMGLAVRQAPLIIPLKATSTPVSIKQYPMSQEARLGIKPHIQRLLDQGILVPCQSPWNTPLLPVKKPGTNDYRPVQDLREVNKRVEDIHPTVPNPYNLLSGLPPSHQWYTVLDLKDAFFCLRLHPTSQPLFAFEWRDPEMGISGQLTWTRLPQGFKNSPTLFDEALHRDLADFRIQHPDLILLQYVDDLLLAATSELDCQQGTRALLQTLGNLGYRASAKKAQICQKQVKYLGYLLKEGQRWLTEARKETVMGQPTPKTPRQLREFLGTAGFCRLWIPGFAEMAAPLYPLTKTGTLFNWGPDQQKAYQEIKQALLTAPALGLPDLTKPFELFVDEKQGYAKGVLTQKLGPWRRPVAYLSKKLDPVAAGWPPCLRMVAAIAVLTKDAGKLTMGQPLVILAPHAVEALVKQPPDRWLSNARMTHYQALLLDTDRVQFGPVVALNPATLLPLPEEGLQHNCLDILAEAHGTRPDLTDQPLPDADHTWYTDGSSLLQEGQRKAGAAVTTETEVIWAKALPAGTSAQRAELIALTQALKMAEGKKLNVYTDSRYAFATAHIHGEIYRRRGLLTSEGKEIKNKDEILALLKALFLPKRLSIIHCPGHQKGHSAEARGNRMADQAARKAAITETPDTSTLLAGKRTADGSEFEKRTADGSEFESPKKKAKVE

SEQ ID NO: 2964 - protein, 2094 aa, synthetic construct
MPAAKRVKLDGGDKKYSIGLDIGTNSVGWAVITDEYKVPSKKFKVLGNTDRHSIKKNLIGALLFDSGETAEATRLKRTARRRYTRRKNRICYLQEIFSNEMAKVDDSFFHRLEESFLVEEDKKHERHPIFGNIVDEVAYHEKYPTIYHLRKKLVDSTDKADLRLIYLALAHMIKFRGHFLIEGDLNPDNSDVDKLFIQLVQTYNQLFEENPINASGVDAKAILSARLSKSRRLENLIAQLPGEKKNGLFGNLIALSLGLTPNFKSNFDLAEDAKLQLSKDTYDDDLDNLLAQIGDQYADLFLAAKNLSDAILLSDILRVNTEITKAPLSASMIKRYDEHHQDLTLLKALVRQQLPEKYKEIFFDQSKNGYAGYIDGGASQEEFYKFIKPILEKMDGTEELLVKLNREDLLRKQRTFDNGSIPHQIHLGELHAILRRQEDFYPFLKDNREKIEKILTFRIPYYVGPLARGNSRFAWMTRKSEETITPWNFEEVVDKGASAQSFIERMTNFDKNLPNEKVLPKHSLLYEYFTVYNELTKVKYVTEGMRKPAFLSGEQKKAIVDLLFKTNRKVTVKQLKEDYFKKIECFDSVEISGVEDRFNASLGTYHDLLKIIKDKDFLDNEENEDILEDIVLTLTLFEDREMIEERLKTYAHLFDDKVMKQLKRRRYTGWGRLSRKLINGIRDKQSGKTILDFLKSDGFANRNFMQLIHDDSLTFKEDIQKAQVSGQGDSLHEHIANLAGSPAIKKGILQTVKVVDELVKVMGRHKPENIVIEMARENQTTQKGQKNSRERMKRIEEGIKELGSQILKEHPVENTQLQNEKLYLYYLQNGRDMYVDQELDINRLSDYDVDHIVPQSFLKDDSIDNKVLTRSDKARGKSDNVPSEEVVKKMKNYWRQLLNAKLITQRKFDNLTKAERGGLSELDKAGFIKRQLVETRQITKHVAQILDSRMNTKYDENDKLIREVKVITLKSKLVSDFRKDFQFYKVREINNYHHAHDAYLNAVVGTALIKKYPKLESEFVYGDYKVYDVRKMIAKSEQEIGKATAKYFFYSNIMNFFKTEITLANGEIRKRPLIETNGETGEIVWDKGRDFATVRKVLSMPQVNIVKKTEVQTGGFSKESILPKRNSDKLIARKKDWDPKKYGGFDSPTVAYSVLVVAKVEKGKSKKLKSVKELLGITIMERSSFEKNPIDFLEAKGYKEVKKDLIIKLPKYSLFELENGRKRMLASAGELQKGNELALPSKYVNFLYLASHYEKLKGSPEDNEQKQLFVEQHKHYLDEIIEQISEFSKRVILADANLDKVLSAYNKHRDKPIREQAENIIHLFTLTNLGAPAAFKYFDTTIDRKRYTSTKEVLDATLIHQSITGLYETRIDLSQLGGDGGGGSGSSPAPGGTLNIEDEHRLHETSKEPDVSLGSTWLSDFPQAWAETGGMGLAVRQAPLIIPLKATSTPVSIKQYPMSQEARLGIKPHIQRLLDQGILVPCQSPWNTPLLPVKKPGTNDYRPVQDLREVNKRVEDIHPTVPNPYNLLSGLPPSHQWYTVLDLKDAFFCLRLHPTSQPLFAFEWRDPEMGISGQLTWTRLPQGFKNSPTLFDEALHRDLADFRIQHPDLILLQYVDDLLLAATSELDCQQGTRALLQTLGNLGYRASAKKAQICQKQVKYLGYLLKEGQRWLTEARKETVMGQPTPKTPRQLREFLGTAGFCRLWIPGFAEMAAPLYPLTKTGTLFNWGPDQQKAYQEIKQALLTAPALGLPDLTKPFELFVDEKQGYAKGVLTQKLGPWRRPVAYLSKKLDPVAAGWPPCLRMVAAIAVLTKDAGKLTMGQPLVILAPHAVEALVKQPPDRWLSNARMTHYQALLLDTDRVQFGPVVALNPATLLPLPEEGLQHNCLDILAEAHGTRPDLTDQPLPDADHTWYTDGSSLLQEGQRKAGAAVTTETEVIWAKALPAGTSAQRAELIALTQALKMAEGKKLNVYTDSRYAFATAHIHGEIYRRRGLLTSEGKEIKNKDEILALLKALFLPKRLSIIHCPGHQKGHSAEARGNRMADQAARKAAITETPDTSTLLAGKRTADGSEFEKRTADGSEFESPKKKAKVE

SEQ ID NO: 2965 - protein, 2103 aa, synthetic construct
MPAAKRVKLDGGDKKYSIGLDIGTNSVGWAVITDEYKVPSKKFKVLGNTDRHSIKKNLIGALLFDSGETAEATRLKRTARRRYTRRKNRICYLQEIFSNEMAKVDDSFFHRLEESFLVEEDKKHERHPIFGNIVDEVAYHEKYPTIYHLRKKLVDSTDKADLRLIYLALAHMIKFRGHFLIEGDLNPDNSDVDKLFIQLVQTYNQLFEENPINASGVDAKAILSARLSKSRRLENLIAQLPGEKKNGLFGNLIALSLGLTPNFKSNFDLAEDAKLQLSKDTYDDDLDNLLAQIGDQYADLFLAAKNLSDAILLSDILRVNTEITKAPLSASMIKRYDEHHQDLTLLKALVRQQLPEKYKEIFFDQSKNGYAGYIDGGASQEEFYKFIKPILEKMDGTEELLVKLNREDLLRKQRTFDNGSIPHQIHLGELHAILRRQEDFYPFLKDNREKIEKILTFRIPYYVGPLARGNSRFAWMTRKSEETITPWNFEEVVDKGASAQSFIERMTNFDKNLPNEKVLPKHSLLYEYFTVYNELTKVKYVTEGMRKPAFLSGEQKKAIVDLLFKTNRKVTVKQLKEDYFKKIECFDSVEISGVEDRFNASLGTYHDLLKIIKDKDFLDNEENEDILEDIVLTLTLFEDREMIEERLKTYAHLFDDKVMKQLKRRRYTGWGRLSRKLINGIRDKQSGKTILDFLKSDGFANRNFMQLIHDDSLTFKEDIQKAQVSGQGDSLHEHIANLAGSPAIKKGILQTVKVVDELVKVMGRHKPENIVIEMARENQTTQKGQKNSRERMKRIEEGIKELGSQILKEHPVENTQLQNEKLYLYYLQNGRDMYVDQELDINRLSDYDVDHIVPQSFLKDDSIDNKVLTRSDKARGKSDNVPSEEVVKKMKNYWRQLLNAKLITQRKFDNLTKAERGGLSELDKAGFIKRQLVETRQITKHVAQILDSRMNTKYDENDKLIREVKVITLKSKLVSDFRKDFQFYKVREINNYHHAHDAYLNAVVGTALIKKYPKLESEFVYGDYKVYDVRKMIAKSEQEIGKATAKYFFYSNIMNFFKTEITLANGEIRKRPLIETNGETGEIVWDKGRDFATVRKVLSMPQVNIVKKTEVQTGGFSKESILPKRNSDKLIARKKDWDPKKYGGFDSPTVAYSVLVVAKVEKGKSKKLKSVKELLGITIMERSSFEKNPIDFLEAKGYKEVKKDLIIKLPKYSLFELENGRKRMLASAGELQKGNELALPSKYVNFLYLASHYEKLKGSPEDNEQKQLFVEQHKHYLDEIIEQISEFSKRVILADANLDKVLSAYNKHRDKPIREQAENIIHLFTLTNLGAPAAFKYFDTTIDRKRYTSTKEVLDATLIHQSITGLYETRIDLSQLGGDGGGSSGSSGSSGSSGSSGSSGGTLNIEDEHRLHETSKEPDVSLGSTWLSDFPQAWAETGGMGLAVRQAPLIIPLKATSTPVSIKQYPMSQEARLGIKPHIQRLLDQGILVPCQSPWNTPLLPVKKPGTNDYRPVQDLREVNKRVEDIHPTVPNPYNLLSGLPPSHQWYTVLDLKDAFFCLRLHPTSQPLFAFEWRDPEMGISGQLTWTRLPQGFKNSPTLFNEALHRDLADFRIQHPDLILLQYVDDLLLAATSELDCQQGTRALLQTLGNLGYRASAKKAQICQKQVKYLGYLLKEGQRWLTEARKETVMGQPTPKTPRQLREFLGTAGFCRLWIPGFAEMAAPLYPLTKPGTLFNWGPDQQKAYQEIKQALLTAPALGLPDLTKPFELFVDEKQGYAKGVLTQKLGPWRRPVAYLSKKLDPVAAGWPPCLRMVAAIAVLTKDAGKLTMGQPLVILAPHAVEALVKQPPDRWLSNARMTHYQALLLDTDRVQFGPVVALNPATLLPLPEEGLQHNCLDILAEAHGTRPDLTDQPLPDADHTWYTDGSSLLQEGQRKAGAAVTTETEVIWAKALPAGTSAQRAELIALTQALKMAEGKKLNVYTDSRYAFATAHIHGEIYRRRGWLTSEGKEIKNKDEILALLKALFLPKRLSIIHCPGHQKGHSAEARGNRMADQAARKAAITETPDTSTLLAGKRTADGSEFEKRTADGSEFESPKKKAKVE

SEQ ID NO: 2966 - protein, 2096 aa, synthetic construct; identical to SEQ ID NO: 2713

SEQ ID NO: 2967 - protein, 2091 aa, synthetic construct
MPAAKRVKLDGGDKKYSIGLDIGTNSVGWAVITDEYKVPSKKFKVLGNTDRHSIKKNLIGALLFDSGETAEATRLKRTARRRYTRRKNRICYLQEIFSNEMAKVDDSFFHRLEESFLVEEDKKHERHPIFGNIVDEVAYHEKYPTIYHLRKKLVDSTDKADLRLIYLALAHMIKFRGHFLIEGDLNPDNSDVDKLFIQLVQTYNQLFEENPINASGVDAKAILSARLSKSRRLENLIAQLPGEKKNGLFGNLIALSLGLTPNFKSNFDLAEDAKLQLSKDTYDDDLDNLLAQIGDQYADLFLAAKNLSDAILLSDILRVNTEITKAPLSASMIKRYDEHHQDLTLLKALVRQQLPEKYKEIFFDQSKNGYAGYIDGGASQEEFYKFIKPILEKMDGTEELLVKLNREDLLRKQRTFDNGSIPHQIHLGELHAILRRQEDFYPFLKDNREKIEKILTFRIPYYVGPLARGNSRFAWMTRKSEETITPWNFEEVVDKGASAQSFIERMTNFDKNLPNEKVLPKHSLLYEYFTVYNELTKVKYVTEGMRKPAFLSGEQKKAIVDLLFKTNRKVTVKQLKEDYFKKIECFDSVEISGVEDRFNASLGTYHDLLKIIKDKDFLDNEENEDILEDIVLTLTLFEDREMIEERLKTYAHLFDDKVMKQLKRRRYTGWGRLSRKLINGIRDKQSGKTILDFLKSDGFANRNFMQLIHDDSLTFKEDIQKAQVSGQGDSLHEHIANLAGSPAIKKGILQTVKVVDELVKVMGRHKPENIVIEMARENQTTQKGQKNSRERMKRIEEGIKELGSQILKEHPVENTQLQNEKLYLYYLQNGRDMYVDQELDINRLSDYDVDHIVPQSFLKDDSIDNKVLTRSDKARGKSDNVPSEEVVKKMKNYWRQLLNAKLITQRKFDNLTKAERGGLSELDKAGFIKRQLVETRQITKHVAQILDSRMNTKYDENDKLIREVKVITLKSKLVSDFRKDFQFYKVREINNYHHAHDAYLNAVVGTALIKKYPKLESEFVYGDYKVYDVRKMIAKSEQEIGKATAKYFFYSNIMNFFKTEITLANGEIRKRPLIETNGETGEIVWDKGRDFATVRKVLSMPQVNIVKKTEVQTGGFSKESILPKRNSDKLIARKKDWDPKKYGGFDSPTVAYSVLVVAKVEKGKSKKLKSVKELLGITIMERSSFEKNPIDFLEAKGYKEVKKDLIIKLPKYSLFELENGRKRMLASAGELQKGNELALPSKYVNFLYLASHYEKLKGSPEDNEQKQLFVEQHKHYLDEIIEQISEFSKRVILADANLDKVLSAYNKHRDKPIREQAENIIHLFTLTNLGAPAAFKYFDTTIDRKRYTSTKEVLDATLIHQSITGLYETRIDLSQLGGDGGGSSGGGGGTLNIEDEHRLHETSKEPDVSLGSTWLSDFPQAWAETGGMGLAVRQAPLIIPLKATSTPVSIKQYPMSQEARLGIKPHIQRLLDQGILVPCQSPWNTPLLPVKKPGTNDYRPVQDLREVNKRVEDIHPTVPNPYNLLSGLPPSHQWYTVLDLKDAFFCLRLHPTSQPLFAFEWRDPEMGISGQLTWTRLPQGFKNSPTLFNEALHRDLADFRIQHPDLILLQYVDDLLLAATSELDCQQGTRALLQTLGNLGYRASAKKAQICQKQVKYLGYLLKEGQRWLTEARKETVMGQPTPKTPRQLREFLGTAGFCRLWIPGFAEMAAPLYPLTKPGTLFNWGPDQQKAYQEIKQALLTAPALGLPDLTKPFELFVDEKQGYAKGVLTQKLGPWRRPVAYLSKKLDPVAAGWPPCLRMVAAIAVLTKDAGKLTMGQPLVILAPHAVEALVKQPPDRWLSNARMTHYQALLLDTDRVQFGPVVALNPATLLPLPEEGLQHNCLDILAEAHGTRPDLTDQPLPDADHTWYTDGSSLLQEGQRKAGAAVTTETEVIWAKALPAGTSAQRAELIALTQALKMAEGKKLNVYTDSRYAFATAHIHGEIYRRRGWLTSEGKEIKNKDEILALLKALFLPKRLSIIHCPGHQKGHSAEARGNRMADQAARKAAITETPDTSTLLAGKRTADGSEFEKRTADGSEFESPKKKAKVE

SEQ ID NO: 2968 - protein, 2105 aa, synthetic construct; identical to SEQ ID NO: 2771

SEQ ID NO: 2969 - protein, 2096 aa, synthetic construct; identical to SEQ ID NO: 2753

SEQ ID NO: 2970 - protein, 2096 aa, synthetic construct
MPAAKRVKLDGGDKKYSIGLDIGTNSVGWAVITDEYKVPSKKFKVLGNTDRHSIKKNLIGALLFDSGETAEATRLKRTARRRYTRRKNRICYLQEIFSNEMAKVDDSFFHRLEESFLVEEDKKHERHPIFGNIVDEVAYHEKYPTIYHLRKKLVDSTDKADLRLIYLALAHMIKFRGHFLIEGDLNPDNSDVDKLFIQLVQTYNQLFEENPINASGVDAKAILSARLSKSRRLENLIAQLPGEKKNGLFGNLIALSLGLTPNFKSNFDLAEDAKLQLSKDTYDDDLDNLLAQIGDQYADLFLAAKNLSDAILLSDILRVNTEITKAPLSASMIKRYDEHHQDLTLLKALVRQQLPEKYKEIFFDQSKNGYAGYIDGGASQEEFYKFIKPILEKMDGTEELLVKLNREDLLRKQRTFDNGSIPHQIHLGELHAILRRQEDFYPFLKDNREKIEKILTFRIPYYVGPLARGNSRFAWMTRKSEETITPWNFEEVVDKGASAQSFIERMTNFDKNLPNEKVLPKHSLLYEYFTVYNELTKVKYVTEGMRKPAFLSGEQKKAIVDLLFKTNRKVTVKQLKEDYFKKIECFDSVEISGVEDRFNASLGTYHDLLKIIKDKDFLDNEENEDILEDIVLTLTLFEDREMIEERLKTYAHLFDDKVMKQLKRRRYTGWGRLSRKLINGIRDKQSGKTILDFLKSDGFANRNFMQLIHDDSLTFKEDIQKAQVSGQGDSLHEHIANLAGSPAIKKGILQTVKVVDELVKVMGRHKPENIVIEMARENQTTQKGQKNSRERMKRIEEGIKELGSQILKEHPVENTQLQNEKLYLYYLQNGRDMYVDQELDINRLSDYDVDHIVPQSFLKDDSIDNKVLTRSDKARGKSDNVPSEEVVKKMKNYWRQLLNAKLITQRKFDNLTKAERGGLSELDKAGFIKRQLVETRQITKHVAQILDSRMNTKYDENDKLIREVKVITLKSKLVSDFRKDFQFYKVREINNYHHAHDAYLNAVVGTALIKKYPKLESEFVYGDYKVYDVRKMIAKSEQEIGKATAKYFFYSNIMNFFKTEITLANGEIRKRPLIETNGETGEIVWDKGRDFATVRKVLSMPQVNIVKKTEVQTGGFSKESILPKRNSDKLIARKKDWDPKKYGGFDSPTVAYSVLVVAKVEKGKSKKLKSVKELLGITIMERSSFEKNPIDFLEAKGYKEVKKDLIIKLPKYSLFELENGRKRMLASAGELQKGNELALPSKYVNFLYLASHYEKLKGSPEDNEQKQLFVEQHKHYLDEIIEQISEFSKRVILADANLDKVLSAYNKHRDKPIREQAENIIHLFTLTNLGAPAAFKYFDTTIDRKRYTSTKEVLDATLIHQSITGLYETRIDLSQLGGDGGPAPAPAPAPAPGGTLNIEDEHRLHETSKEPDVSLGSTWLSDFPQAWAETGGMGLAVRQAPLIIPLKATSTPVSIKQYPMSQEARLGIKPHIQRLLDQGILVPCQSPWNTPLLPVKKPGTNDYRPVQDLREVNKRVEDIHPTVPNPYNLLSGLPPSHQWYTVLDLKDAFFCLRLHPTSQPLFAFEWRDPEMGISGQLTWTRLPQGFKNSPTLFNEALHRDLADFRIQHPDLILLQYVDDLLLAATSELDCQQGTRALLQTLGNLGYRASAKKAQICQKQVKYLGYLLKEGQRWLTEARKETVMGQPTPKTPRQLREFLGTAGFCRLWIPGFAEMAAPLYPLTKPGTLFNWGPDQQKAYQEIKQALLTAPALGLPDLTKPFELFVDEKQGYAKGVLTQKLGPWRRPVAYLSKKLDPVAAGWPPCLRMVAAIAVLTKDAGKLTMGQPLVILAPHAVEALVKQPPDRWLSNARMTHYQALLLDTDRVQFGPVVALNPATLLPLPEEGLQHNCLDILAEAHGTRPDLTDQPLPDADHTWYTDGSSLLQEGQRKAGAAVTTETEVIWAKALPAGTSAQRAELIALTQALKMAEGKKLNVYTDSRYAFATAHIHGEIYRRRGWLTSEGKEIKNKDEILALLKALFLPKRLSIIHCPGHQKGHSAEARGNRMADQAARKAAITETPDTSTLLAGKRTADGSEFEKRTADGSEFESPKKKAKVE

SEQ ID NO: 2971 - protein, 2093 aa, synthetic construct; identical to SEQ ID NO: 2724

SEQ ID NO: 2972 - protein, 2131 aa, synthetic construct; identical to SEQ ID NO: 2711

SEQ ID NO: 2973 - protein, 2088 aa, synthetic construct
MPAAKRVKLDGGDKKYSIGLDIGTNSVGWAVITDEYKVPSKKFKVLGNTDRHSIKKNLIGALLFDSGETAEATRLKRTARRRYTRRKNRICYLQEIFSNEMAKVDDSFFHRLEESFLVEEDKKHERHPIFGNIVDEVAYHEKYPTIYHLRKKLVDSTDKADLRLIYLALAHMIKFRGHFLIEGDLNPDNSDVDKLFIQLVQTYNQLFEENPINASGVDAKAILSARLSKSRRLENLIAQLPGEKKNGLFGNLIALSLGLTPNFKSNFDLAEDAKLQLSKDTYDDDLDNLLAQIGDQYADLFLAAKNLSDAILLSDILRVNTEITKAPLSASMIKRYDEHHQDLTLLKALVRQQLPEKYKEIFFDQSKNGYAGYIDGGASQEEFYKFIKPILEKMDGTEELLVKLNREDLLRKQRTFDNGSIPHQIHLGELHAILRRQEDFYPFLKDNREKIEKILTFRIPYYVGPLARGNSRFAWMTRKSEETITPWNFEEVVDKGASAQSFIERMTNFDKNLPNEKVLPKHSLLYEYFTVYNELTKVKYVTEGMRKPAFLSGEQKKAIVDLLFKTNRKVTVKQLKEDYFKKIECFDSVEISGVEDRFNASLGTYHDLLKIIKDKDFLDNEENEDILEDIVLTLTLFEDREMIEERLKTYAHLFDDKVMKQLKRRRYTGWGRLSRKLINGIRDKQSGKTILDFLKSDGFANRNFMQLIHDDSLTFKEDIQKAQVSGQGDSLHEHIANLAGSPAIKKGILQTVKVVDELVKVMGRHKPENIVIEMARENQTTQKGQKNSRERMKRIEEGIKELGSQILKEHPVENTQLQNEKLYLYYLQNGRDMYVDQELDINRLSDYDVDHIVPQSFLKDDSIDNKVLTRSDKARGKSDNVPSEEVVKKMKNYWRQLLNAKLITQRKFDNLTKAERGGLSELDKAGFIKRQLVETRQITKHVAQILDSRMNTKYDENDKLIREVKVITLKSKLVSDFRKDFQFYKVREINNYHHAHDAYLNAVVGTALIKKYPKLESEFVYGDYKVYDVRKMIAKSEQEIGKATAKYFFYSNIMNFFKTEITLANGEIRKRPLIETNGETGEIVWDKGRDFATVRKVLSMPQVNIVKKTEVQTGGFSKESILPKRNSDKLIARKKDWDPKKYGGFDSPTVAYSVLVVAKVEKGKSKKLKSVKELLGITIMERSSFEKNPIDFLEAKGYKEVKKDLIIKLPKYSLFELENGRKRMLASAGELQKGNELALPSKYVNFLYLASHYEKLKGSPEDNEQKQLFVEQHKHYLDEIIEQISEFSKRVILADANLDKVLSAYNKHRDKPIREQAENIIHLFTLTNLGAPAAFKYFDTTIDRKRYTSTKEVLDATLIHQSITGLYETRIDLSQLGGDGGPAPGGTLNIEDEHRLHETSKEPDVSLGSTWLSDFPQAWAETGGMGLAVRQAPLIIPLKATSTPVSIKQYPMSQEARLGIKPHIQRLLDQGILVPCQSPWNTPLLPVKKPGTNDYRPVQDLREVNKRVEDIHPTVPNPYNLLSGLPPSHQWYTVLDLKDAFFCLRLHPTSQPLFAFEWRDPEMGISGQLTWTRLPQGFKNSPTLFNEALHRDLADFRIQHPDLILLQYVDDLLLAATSELDCQQGTRALLQTLGNLGYRASAKKAQICQKQVKYLGYLLKEGQRWLTEARKETVMGQPTPKTPRQLREFLGTAGFCRLWIPGFAEMAAPLYPLTKPGTLFNWGPDQQKAYQEIKQALLTAPALGLPDLTKPFELFVDEKQGYAKGVLTQKLGPWRRPVAYLSKKLDPVAAGWPPCLRMVAAIAVLTKDAGKLTMGQPLVILAPHAVEALVKQPPDRWLSNARMTHYQALLLDTDRVQFGPVVALNPATLLPLPEEGLQHNCLDILAEAHGTRPDLTDQPLPDADHTWYTDGSSLLQEGQRKAGAAVTTETEVIWAKALPAGTSAQRAELIALTQALKMAEGKKLNVYTDSRYAFATAHIHGEIYRRRGWLTSEGKEIKNKDEILALLKALFLPKRLSIIHCPGHQKGHSAEARGNRMADQAARKAAITETPDTSTLLAGKRTADGSEFEKRTADGSEFESPKKKAKVE

SEQ ID NO: 2974 - protein, 2098 aa, synthetic construct
MPAAKRVKLDGGDKKYSIGLDIGTNSVGWAVITDEYKVPSKKFKVLGNTDRHSIKKNLIGALLFDSGETAEATRLKRTARRRYTRRKNRICYLQEIFSNEMAKVDDSFFHRLEESFLVEEDKKHERHPIFGNIVDEVAYHEKYPTIYHLRKKLVDSTDKADLRLIYLALAHMIKFRGHFLIEGDLNPDNSDVDKLFIQLVQTYNQLFEENPINASGVDAKAILSARLSKSRRLENLIAQLPGEKKNGLFGNLIALSLGLTPNFKSNFDLAEDAKLQLSKDTYDDDLDNLLAQIGDQYADLFLAAKNLSDAILLSDILRVNTEITKAPLSASMIKRYDEHHQDLTLLKALVRQQLPEKYKEIFFDQSKNGYAGYIDGGASQEEFYKFIKPILEKMDGTEELLVKLNREDLLRKQRTFDNGSIPHQIHLGELHAILRRQEDFYPFLKDNREKIEKILTFRIPYYVGPLARGNSRFAWMTRKSEETITPWNFEEVVDKGASAQSFIERMTNFDKNLPNEKVLPKHSLLYEYFTVYNELTKVKYVTEGMRKPAFLSGEQKKAIVDLLFKTNRKVTVKQLKEDYFKKIECFDSVEISGVEDRFNASLGTYHDLLKIIKDKDFLDNEENEDILEDIVLTLTLFEDREMIEERLKTYAHLFDDKVMKQLKRRRYTGWGRLSRKLINGIRDKQSGKTILDFLKSDGFANRNFMQLIHDDSLTFKEDIQKAQVSGQGDSLHEHIANLAGSPAIKKGILQTVKVVDELVKVMGRHKPENIVIEMARENQTTQKGQKNSRERMKRIEEGIKELGSQILKEHPVENTQLQNEKLYLYYLQNGRDMYVDQELDINRLSDYDVDHIVPQSFLKDDSIDNKVLTRSDKARGKSDNVPSEEVVKKMKNYWRQLLNAKLITQRKFDNLTKAERGGLSELDKAGFIKRQLVETRQITKHVAQILDSRMNTKYDENDKLIREVKVITLKSKLVSDFRKDFQFYKVREINNYHHAHDAYLNAVVGTALIKKYPKLESEFVYGDYKVYDVRKMIAKSEQEIGKATAKYFFYSNIMNFFKTEITLANGEIRKRPLIETNGETGEIVWDKGRDFATVRKVLSMPQVNIVKKTEVQTGGFSKESILPKRNSDKLIARKKDWDPKKYGGFDSPTVAYSVLVVAKVEKGKSKKLKSVKELLGITIMERSSFEKNPIDFLEAKGYKEVKKDLIIKLPKYSLFELENGRKRMLASAGELQKGNELALPSKYVNFLYLASHYEKLKGSPEDNEQKQLFVEQHKHYLDEIIEQISEFSKRVILADANLDKVLSAYNKHRDKPIREQAENIIHLFTLTNLGAPAAFKYFDTTIDRKRYTSTKEVLDATLIHQSITGLYETRIDLSQLGGDGGPAPAPAPAPAPAPGGTLNIEDEHRLHETSKEPDVSLGSTWLSDFPQAWAETGGMGLAVRQAPLIIPLKATSTPVSIKQYPMSQEARLGIKPHIQRLLDQGILVPCQSPWNTPLLPVKKPGTNDYRPVQDLREVNKRVEDIHPTVPNPYNLLSGLPPSHQWYTVLDLKDAFFCLRLHPTSQPLFAFEWRDPEMGISGQLTWTRLPQGFKNSPTLFNEALHRDLADFRIQHPDLILLQYVDDLLLAATSELDCQQGTRALLQTLGNLGYRASAKKAQICQKQVKYLGYLLKEGQRWLTEARKETVMGQPTPKTPRQLREFLGTAGFCRLWIPGFAEMAAPLYPLTKPGTLFNWGPDQQKAYQEIKQALLTAPALGLPDLTKPFELFVDEKQGYAKGVLTQKLGPWRRPVAYLSKKLDPVAAGWPPCLRMVAAIAVLTKDAGKLTMGQPLVILAPHAVEALVKQPPDRWLSNARMTHYQALLLDTDRVQFGPVVALNPATLLPLPEEGLQHNCLDILAEAHGTRPDLTDQPLPDADHTWYTDGSSLLQEGQRKAGAAVTTETEVIWAKALPAGTSAQRAELIALTQALKMAEGKKLNVYTDSRYAFATAHIHGEIYRRRGWLTSEGKEIKNKDEILALLKALFLPKRLSIIHCPGHQKGHSAEARGNRMADQAARKAAITETPDTSTLLAGKRTADGSEFEKRTADGSEFESPKKKAKVE

SEQ ID NO: 2975 - protein, 2091 aa, synthetic construct
MPAAKRVKLDGGDKKYSIGLDIGTNSVGWAVITDEYKVPSKKFKVLGNTDRHSIKKNLIGALLFDSGETAEATRLKRTARRRYTRRKNRICYLQEIFSNEMAKVDDSFFHRLEESFLVEEDKKHERHPIFGNIVDEVAYHEKYPTIYHLRKKLVDSTDKADLRLIYLALAHMIKFRGHFLIEGDLNPDNSDVDKLFIQLVQTYNQLFEENPINASGVDAKAILSARLSKSRRLENLIAQLPGEKKNGLFGNLIALSLGLTPNFKSNFDLAEDAKLQLSKDTYDDDLDNLLAQIGDQYADLFLAAKNLSDAILLSDILRVNTEITKAPLSASMIKRYDEHHQDLTLLKALVRQQLPEKYKEIFFDQSKNGYAGYIDGGASQEEFYKFIKPILEKMDGTEELLVKLNREDLLRKQRTFDNGSIPHQIHLGELHAILRRQEDFYPFLKDNREKIEKILTFRIPYYVGPLARGNSRFAWMTRKSEETITPWNFEEVVDKGASAQSFIERMTNFDKNLPNEKVLPKHSLLYEYFTVYNELTKVKYVTEGMRKPAFLSGEQKKAIVDLLFKTNRKVTVKQLKEDYFKKIECFDSVEISGVEDRFNASLGTYHDLLKIIKDKDFLDNEENEDILEDIVLTLTLFEDREMIEERLKTYAHLFDDKVMKQLKRRRYTGWGRLSRKLINGIRDKQSGKTILDFLKSDGFANRNFMQLIHDDSLTFKEDIQKAQVSGQGDSLHEHIANLAGSPAIKKGILQTVKVVDELVKVMGRHKPENIVIEMARENQTTQKGQKNSRERMKRIEEGIKELGSQILKEHPVENTQLQNEKLYLYYLQNGRDMYVDQELDINRLSDYDVDHIVPQSFLKDDSIDNKVLTRSDKARGKSDNVPSEEVVKKMKNYWRQLLNAKLITQRKFDNLTKAERGGLSELDKAGFIKRQLVETRQITKHVAQILDSRMNTKYDENDKLIREVKVITLKSKLVSDFRKDFQFYKVREINNYHHAHDAYLNAVVGTALIKKYPKLESEFVYGDYKVYDVRKMIAKSEQEIGKATAKYFFYSNIMNFFKTEITLANGEIRKRPLIETNGETGEIVWDKGRDFATVRKVLSMPQVNIVKKTEVQTGGFSKESILPKRNSDKLIARKKDWDPKKYGGFDSPTVAYSVLVVAKVEKGKSKKLKSVKELLGITIMERSSFEKNPIDFLEAKGYKEVKKDLIIKLPKYSLFELENGRKRMLASAGELQKGNELALPSKYVNFLYLASHYEKLKGSPEDNEQKQLFVEQHKHYLDEIIEQISEFSKRVILADANLDKVLSAYNKHRDKPIREQAENIIHLFTLTNLGAPAAFKYFDTTIDRKRYTSTKEVLDATLIHQSITGLYETRIDLSQLGGDGGGGGGGGGGTLNIEDEHRLHETSKEPDVSLGSTWLSDFPQAWAETGGMGLAVRQAPLIIPLKATSTPVSIKQYPMSQEARLGIKPHIQRLLDQGILVPCQSPWNTPLLPVKKPGTNDYRPVQDLREVNKRVEDIHPTVPNPYNLLSGLPPSHQWYTVLDLKDAFFCLRLHPTSQPLFAFEWRDPEMGISGQLTWTRLPQGFKNSPTLFNEALHRDLADFRIQHPDLILLQYVDDLLLAATSELDCQQGTRALLQTLGNLGYRASAKKAQICQKQVKYLGYLLKEGQRWLTEARKETVMGQPTPKTPRQLREFLGTAGFCRLWIPGFAEMAAPLYPLTKPGTLFNWGPDQQKAYQEIKQALLTAPALGLPDLTKPFELFVDEKQGYAKGVLTQKLGPWRRPVAYLSKKLDPVAAGWPPCLRMVAAIAVLTKDAGKLTMGQPLVILAPHAVEALVKQPPDRWLSNARMTHYQALLLDTDRVQFGPVVALNPATLLPLPEEGLQHNCLDILAEAHGTRPDLTDQPLPDADHTWYTDGSSLLQEGQRKAGAAVTTETEVIWAKALPAGTSAQRAELIALTQALKMAEGKKLNVYTDSRYAFATAHIHGEIYRRRGWLTSEGKEIKNKDEILALLKALFLPKRLSIIHCPGHQKGHSAEARGNRMADQAARKAAITETPDTSTLLAGKRTADGSEFEKRTADGSEFESPKKKAKVE

SEQ ID NO: 2976 - protein, 2096 aa, synthetic construct; identical to SEQ ID NO: 2723

SEQ ID NO: 2977 - protein, 2096 aa, synthetic construct; identical to SEQ ID NO: 2777

SEQ ID NO: 2978 - protein, 2093 aa, synthetic construct
MPAAKRVKLDGGDKKYSIGLDIGTNSVGWAVITDEYKVPSKKFKVLGNTDRHSIKKNLIGALLFDSGETAEATRLKRTARRRYTRRKNRICYLQEIFSNEMAKVDDSFFHRLEESFLVEEDKKHERHPIFGNIVDEVAYHEKYPTIYHLRKKLVDSTDKADLRLIYLALAHMIKFRGHFLIEGDLNPDNSDVDKLFIQLVQTYNQLFEENPINASGVDAKAILSARLSKSRRLENLIAQLPGEKKNGLFGNLIALSLGLTPNFKSNFDLAEDAKLQLSKDTYDDDLDNLLAQIGDQYADLFLAAKNLSDAILLSDILRVNTEITKAPLSASMIKRYDEHHQDLTLLKALVRQQLPEKYKEIFFDQSKNGYAGYIDGGASQEEFYKFIKPILEKMDGTEELLVKLNREDLLRKQRTFDNGSIPHQIHLGELHAILRRQEDFYPFLKDNREKIEKILTFRIPYYVGPLARGNSRFAWMTRKSEETITPWNFEEVVDKGASAQSFIERMTNFDKNLPNEKVLPKHSLLYEYFTVYNELTKVKYVTEGMRKPAFLSGEQKKAIVDLLFKTNRKVTVKQLKEDYFKKIECFDSVEISGVEDRFNASLGTYHDLLKIIKDKDFLDNEENEDILEDIVLTLTLFEDREMIEERLKTYAHLFDDKVMKQLKRRRYTGWGRLSRKLINGIRDKQSGKTILDFLKSDGFANRNFMQLIHDDSLTFKEDIQKAQVSGQGDSLHEHIANLAGSPAIKKGILQTVKVVDELVKVMGRHKPENIVIEMARENQTTQKGQKNSRERMKRIEEGIKELGSQILKEHPVENTQLQNEKLYLYYLQNGRDMYVDQELDINRLSDYDVDHIVPQSFLKDDSIDNKVLTRSDKARGKSDNVPSEEVVKKMKNYWRQLLNAKLITQRKFDNLTKAERGGLSELDKAGFIKRQLVETRQITKHVAQILDSRMNTKYDENDKLIREVKVITLKSKLVSDFRKDFQFYKVREINNYHHAHDAYLNAVVGTALIKKYPKLESEFVYGDYKVYDVRKMIAKSEQEIGKATAKYFFYSNIMNFFKTEITLANGEIRKRPLIETNGETGEIVWDKGRDFATVRKVLSMPQVNIVKKTEVQTGGFSKESILPKRNSDKLIARKKDWDPKKYGGFDSPTVAYSVLVVAKVEKGKSKKLKSVKELLGITIMERSSFEKNPIDFLEAKGYKEVKKDLIIKLPKYSLFELENGRKRMLASAGELQKGNELALPSKYVNFLYLASHYEKLKGSPEDNEQKQLFVEQHKHYLDEIIEQISEFSKRVILADANLDKVLSAYNKHRDKPIREQAENIIHLFTLTNLGAPAAFKYFDTTIDRKRYTSTKEVLDATLIHQSITGLYETRIDLSQLGGDGGEAAAKGGGGGTLNIEDEHRLHETSKEPDVSLGSTWLSDFPQAWAETGGMGLAVRQAPLIIPLKATSTPVSIKQYPMSQEARLGIKPHIQRLLDQGILVPCQSPWNTPLLPVKKPGTNDYRPVQDLREVNKRVEDIHPTVPNPYNLLSGLPPSHQWYTVLDLKDAFFCLRLHPTSQPLFAFEWRDPEMGISGQLTWTRLPQGFKNSPTLFNEALHRDLADFRIQHPDLILLQYVDDLLLAATSELDCQQGTRALLQTLGNLGYRASAKKAQICQKQVKYLGYLLKEGQRWLTEARKETVMGQPTPKTPRQLREFLGTAGFCRLWIPGFAEMAAPLYPLTKPGTLFNWGPDQQKAYQEIKQALLTAPALGLPDLTKPFELFVDEKQGYAKGVLTQKLGPWRRPVAYLSKKLDPVAAGWPPCLRMVAAIAVLTKDAGKLTMGQPLVILAPHAVEALVKQPPDRWLSNARMTHYQALLLDTDRVQFGPVVALNPATLLPLPEEGLQHNCLDILAEAHGTRPDLTDQPLPDADHTWYTDGSSLLQEGQRKAGAAVTTETEVIWAKALPAGTSAQRAELIALTQALKMAEGKKLNVYTDSRYAFATAHIHGEIYRRRGWLTSEGKEIKNKDEILALLKALFLPKRLSIIHCPGHQKGHSAEARGNRMADQAARKAAITETPDTSTLLAGKRTADGSEFEKRTADGSEFESPKKKAKVE

SEQ ID NO: 2979 - protein, 2094 aa, synthetic construct
MPAAKRVKLDGGDKKYSIGLDIGTNSVGWAVITDEYKVPSKKFKVLGNTDRHSIKKNLIGALLFDSGETAEATRLKRTARRRYTRRKNRICYLQEIFSNEMAKVDDSFFHRLEESFLVEEDKKHERHPIFGNIVDEVAYHEKYPTIYHLRKKLVDSTDKADLRLIYLALAHMIKFRGHFLIEGDLNPDNSDVDKLFIQLVQTYNQLFEENPINASGVDAKAILSARLSKSRRLENLIAQLPGEKKNGLFGNLIALSLGLTPNFKSNFDLAEDAKLQLSKDTYDDDLDNLLAQIGDQYADLFLAAKNLSDAILLSDILRVNTEITKAPLSASMIKRYDEHHQDLTLLKALVRQQLPEKYKEIFFDQSKNGYAGYIDGGASQEEFYKFIKPILEKMDGTEELLVKLNREDLLRKQRTFDNGSIPHQIHLGELHAILRRQEDFYPFLKDNREKIEKILTFRIPYYVGPLARGNSRFAWMTRKSEETITPWNFEEVVDKGASAQSFIERMTNFDKNLPNEKVLPKHSLLYEYFTVYNELTKVKYVTEGMRKPAFLSGEQKKAIVDLLFKTNRKVTVKQLKEDYFKKIECFDSVEISGVEDRFNASLGTYHDLLKIIKDKDFLDNEENEDILEDIVLTLTLFEDREMIEERLKTYAHLFDDKVMKQLKRRRYTGWGRLSRKLINGIRDKQSGKTILDFLKSDGFANRNFMQLIHDDSLTFKEDIQKAQVSGQGDSLHEHIANLAGSPAIKKGILQTVKVVDELVKVMGRHKPENIVIEMARENQTTQKGQKNSRERMKRIEEGIKELGSQILKEHPVENTQLQNEKLYLYYLQNGRDMYVDQELDINRLSDYDVDHIVPQSFLKDDSIDNKVLTRSDKARGKSDNVPSEEVVKKMKNYWRQLLNAKLITQRKFDNLTKAERGGLSELDKAGFIKRQLVETRQITKHVAQILDSRMNTKYDENDKLIREVKVITLKSKLVSDFRKDFQFYKVREINNYHHAHDAYLNAVVGTALIKKYPKLESEFVYGDYKVYDVRKMIAKSEQEIGKATAKYFFYSNIMNFFKTEITLANGEIRKRPLIETNGETGEIVWDKGRDFATVRKVLSMPQVNIVKKTEVQTGGFSKESILPKRNSDKLIARKKDWDPKKYGGFDSPTVAYSVLVVAKVEKGKSKKLKSVKELLGITIMERSSFEKNPIDFLEAKGYKEVKKDLIIKLPKYSLFELENGRKRMLASAGELQKGNELALPSKYVNFLYLASHYEKLKGSPEDNEQKQLFVEQHKHYLDEIIEQISEFSKRVILADANLDKVLSAYNKHRDKPIREQAENIIHLFTLTNLGAPAAFKYFDTTIDRKRYTSTKEVLDATLIHQSITGLYETRIDLSQLGGDGGGGSGSSGGGGGTLNIEDEHRLHETSKEPDVSLGSTWLSDFPQAWAETGGMGLAVRQAPLIIPLKATSTPVSIKQYPMSQEARLGIKPHIQRLLDQGILVPCQSPWNTPLLPVKKPGTNDYRPVQDLREVNKRVEDIHPTVPNPYNLLSGLPPSHQWYTVLDLKDAFFCLRLHPTSQPLFAFEWRDPEMGISGQLTWTRLPQGFKNSPTLFNEALHRDLADFRIQHPDLILLQYVDDLLLAATSELDCQQGTRALLQTLGNLGYRASAKKAQICQKQVKYLGYLLKEGQRWLTEARKETVMGQPTPKTPRQLREFLGTAGFCRLWIPGFAEMAAPLYPLTKPGTLFNWGPDQQKAYQEIKQALLTAPALGLPDLTKPFELFVDEKQGYAKGVLTQKLGPWRRPVAYLSKKLDPVAAGWPPCLRMVAAIAVLTKDAGKLTMGQPLVILAPHAVEALVKQPPDRWLSNARMTHYQALLLDTDRVQFGPVVALNPATLLPLPEEGLQHNCLDILAEAHGTRPDLTDQPLPDADHTWYTDGSSLLQEGQRKAGAAVTTETEVIWAKALPAGTSAQRAELIALTQALKMAEGKKLNVYTDSRYAFATAHIHGEIYRRRGWLTSEGKEIKNKDEILALLKALFLPKRLSIIHCPGHQKGHSAEARGNRMADQAARKAAITETPDTSTLLAGKRTADGSEFEKRTADGSEFESPKKKAKVE

SEQ ID NO: 2980 - protein, 2092 aa, synthetic construct
MPAAKRVKLDGGDKKYSIGLDIGTNSVGWAVITDEYKVPSKKFKVLGNTDRHSIKKNLIGALLFDSGETAEATRLKRTARRRYTRRKNRICYLQEIFSNEMAKVDDSFFHRLEESFLVEEDKKHERHPIFGNIVDEVAYHEKYPTIYHLRKKLVDSTDKADLRLIYLALAHMIKFRGHFLIEGDLNPDNSDVDKLFIQLVQTYNQLFEENPINASGVDAKAILSARLSKSRRLENLIAQLPGEKKNGLFGNLIALSLGLTPNFKSNFDLAEDAKLQLSKDTYDDDLDNLLAQIGDQYADLFLAAKNLSDAILLSDILRVNTEITKAPLSASMIKRYDEHHQDLTLLKALVRQQLPEKYKEIFFDQSKNGYAGYIDGGASQEEFYKFIKPILEKMDGTEELLVKLNREDLLRKQRTFDNGSIPHQIHLGELHAILRRQEDFYPFLKDNREKIEKILTFRIPYYVGPLARGNSRFAWMTRKSEETITPWNFEEVVDKGASAQSFIERMTNFDKNLPNEKVLPKHSLLYEYFTVYNELTKVKYVTEGMRKPAFLSGEQKKAIVDLLFKTNRKVTVKQLKEDYFKKIECFDSVEISGVEDRFNASLGTYHDLLKIIKDKDFLDNEENEDILEDIVLTLTLFEDREMIEERLKTYAHLFDDKVMKQLKRRRYTGWGRLSRKLINGIRDKQSGKTILDFLKSDGFANRNFMQLIHDDSLTFKEDIQKAQVSGQGDSLHEHIANLAGSPAIKKGILQTVKVVDELVKVMGRHKPENIVIEMARENQTTQKGQKNSRERMKRIEEGIKELGSQILKEHPVENTQLQNEKLYLYYLQNGRDMYVDQELDINRLSDYDVDHIVPQSFLKDDSIDNKVLTRSDKARGKSDNVPSEEVVKKMKNYWRQLLNAKLITQRKFDNLTKAERGGLSELDKAGFIKRQLVETRQITKHVAQILDSRMNTKYDENDKLIREVKVITLKSKLVSDFRKDFQFYKVREINNYHHAHDAYLNAVVGTALIKKYPKLESEFVYGDYKVYDVRKMIAKSEQEIGKATAKYFFYSNIMNFFKTEITLANGEIRKRPLIETNGETGEIVWDKGRDFATVRKVLSMPQVNIVKKTEVQTGGFSKESILPKRNSDKLIARKKDWDPKKYGGFDSPTVAYSVLVVAKVEKGKSKKLKSVKELLGITIMERSSFEKNPIDFLEAKGYKEVKKDLIIKLPKYSLFELENGRKRMLASAGELQKGNELALPSKYVNFLYLASHYEKLKGSPEDNEQKQLFVEQHKHYLDEIIEQISEFSKRVILADANLDKVLSAYNKHRDKPIREQAENIIHLFTLTNLGAPAAFKYFDTTIDRKRYTSTKEVLDATLIHQSITGLYETRIDLSQLGGDGGPAPAPAPGGTLNIEDEHRLHETSKEPDVSLGSTWLSDFPQAWAETGGMGLAVRQAPLIIPLKATSTPVSIKQYPMSQEARLGIKPHIQRLLDQGILVPCQSPWNTPLLPVKKPGTNDYRPVQDLREVNKRVEDIHPTVPNPYNLLSGLPPSHQWYTVLDLKDAFFCLRLHPTSQPLFAFEWRDPEMGISGQLTWTRLPQGFKNSPTLFNEALHRDLADFRIQHPDLILLQYVDDLLLAATSELDCQQGTRALLQTLGNLGYRASAKKAQICQKQVKYLGYLLKEGQRWLTEARKETVMGQPTPKTPRQLREFLGTAGFCRLWIPGFAEMAAPLYPLTKPGTLFNWGPDQQKAYQEIKQALLTAPALGLPDLTKPFELFVDEKQGYAKGVLTQKLGPWRRPVAYLSKKLDPVAAGWPPCLRMVAAIAVLTKDAGKLTMGQPLVILAPHAVEALVKQPPDRWLSNARMTHYQALLLDTDRVQFGPVVALNPATLLPLPEEGLQHNCLDILAEAHGTRPDLTDQPLPDADHTWYTDGSSLLQEGQRKAGAAVTTETEVIWAKALPAGTSAQRAELIALTQALKMAEGKKLNVYTDSRYAFATAHIHGEIYRRRGWLTSEGKEIKNKDEILALLKALFLPKRLSIIHCPGHQKGHSAEARGNRMADQAARKAAITETPDTSTLLAGKRTADGSEFEKRTADGSEFESPKKKAKVE

SEQ ID NO: 2981 - protein, 2100 aa, synthetic construct
MPAAKRVKLDGGDKKYSIGLDIGTNSVGWAVITDEYKVPSKKFKVLGNTDRHSIKKNLIGALLFDSGETAEATRLKRTARRRYTRRKNRICYLQEIFSNEMAKVDDSFFHRLEESFLVEEDKKHERHPIFGNIVDEVAYHEKYPTIYHLRKKLVDSTDKADLRLIYLALAHMIKFRGHFLIEGDLNPDNSDVDKLFIQLVQTYNQLFEENPINASGVDAKAILSARLSKSRRLENLIAQLPGEKKNGLFGNLIALSLGLTPNFKSNFDLAEDAKLQLSKDTYDDDLDNLLAQIGDQYADLFLAAKNLSDAILLSDILRVNTEITKAPLSASMIKRYDEHHQDLTLLKALVRQQLPEKYKEIFFDQSKNGYAGYIDGGASQEEFYKFIKPILEKMDGTEELLVKLNREDLLRKQRTFDNGSIPHQIHLGELHAILRRQEDFYPFLKDNREKIEKILTFRIPYYVGPLARGNSRFAWMTRKSEETITPWNFEEVVDKGASAQSFIERMTNFDKNLPNEKVLPKHSLLYEYFTVYNELTKVKYVTEGMRKPAFLSGEQKKAIVDLLFKTNRKVTVKQLKEDYFKKIECFDSVEISGVEDRFNASLGTYHDLLKIIKDKDFLDNEENEDILEDIVLTLTLFEDREMIEERLKTYAHLFDDKVMKQLKRRRYTGWGRLSRKLINGIRDKQSGKTILDFLKSDGFANRNFMQLIHDDSLTFKEDIQKAQVSGQGDSLHEHIANLAGSPAIKKGILQTVKVVDELVKVMGRHKPENIVIEMARENQTTQKGQKNSRERMKRIEEGIKELGSQILKEHPVENTQLQNEKLYLYYLQNGRDMYVDQELDINRLSDYDVDHIVPQSFLKDDSIDNKVLTRSDKARGKSDNVPSEEVVKKMKNYWRQLLNAKLITQRKFDNLTKAERGGLSELDKAGFIKRQLVETRQITKHVAQILDSRMNTKYDENDKLIREVKVITLKSKLVSDFRKDFQFYKVREINNYHHAHDAYLNAVVGTALIKKYPKLESEFVYGDYKVYDVRKMIAKSEQEIGKATAKYFFYSNIMNFFKTEITLANGEIRKRPLIETNGETGEIVWDKGRDFATVRKVLSMPQVNIVKKTEVQTGGFSKESILPKRNSDKLIARKKDWDPKKYGGFDSPTVAYSVLVVAKVEKGKSKKLKSVKELLGITIMERSSFEKNPIDFLEAKGYKEVKKDLIIKLPKYSLFELENGRKRMLASAGELQKGNELALPSKYVNFLYLASHYEKLKGSPEDNEQKQLFVEQHKHYLDEIIEQISEFSKRVILADANLDKVLSAYNKHRDKPIREQAENIIHLFTLTNLGAPAAFKYFDTTIDRKRYTSTKEVLDATLIHQSITGLYETRIDLSQLGGDGGGGSGGSGGSGGSGGSGGTLNIEDEHRLHETSKEPDVSLGSTWLSDFPQAWAETGGMGLAVRQAPLIIPLKATSTPVSIKQYPMSQEARLGIKPHIQRLLDQGILVPCQSPWNTPLLPVKKPGTNDYRPVQDLREVNKRVEDIHPTVPNPYNLLSGLPPSHQWYTVLDLKDAFFCLRLHPTSQPLFAFEWRDPEMGISGQLTWTRLPQGFKNSPTLFNEALHRDLADFRIQHPDLILLQYVDDLLLAATSELDCQQGTRALLQTLGNLGYRASAKKAQICQKQVKYLGYLLKEGQRWLTEARKETVMGQPTPKTPRQLREFLGTAGFCRLWIPGFAEMAAPLYPLTKPGTLFNWGPDQQKAYQEIKQALLTAPALGLPDLTKPFELFVDEKQGYAKGVLTQKLGPWRRPVAYLSKKLDPVAAGWPPCLRMVAAIAVLTKDAGKLTMGQPLVILAPHAVEALVKQPPDRWLSNARMTHYQALLLDTDRVQFGPVVALNPATLLPLPEEGLQHNCLDILAEAHGTRPDLTDQPLPDADHTWYTDGSSLLQEGQRKAGAAVTTETEVIWAKALPAGTSAQRAELIALTQALKMAEGKKLNVYTDSRYAFATAHIHGEIYRRRGWLTSEGKEIKNKDEILALLKALFLPKRLSIIHCPGHQKGHSAEARGNRMADQAARKAAITETPDTSTLLAGKRTADGSEFEKRTADGSEFESPKKKAKVE

SEQ ID NO: 2982 - protein, 2093 aa, synthetic construct; identical to SEQ ID NO: 2726

SEQ ID NO: 2983 - protein, 2115 aa, synthetic construct; identical to SEQ ID NO: 2741

SEQ ID NO: 2984 - protein, 2090 aa, synthetic construct
MPAAKRVKLDGGDKKYSIGLDIGTNSVGWAVITDEYKVPSKKFKVLGNTDRHSIKKNLIGALLFDSGETAEATRLKRTARRRYTRRKNRICYLQEIFSNEMAKVDDSFFHRLEESFLVEEDKKHERHPIFGNIVDEVAYHEKYPTIYHLRKKLVDSTDKADLRLIYLALAHMIKFRGHFLIEGDLNPDNSDVDKLFIQLVQTYNQLFEENPINASGVDAKAILSARLSKSRRLENLIAQLPGEKKNGLFGNLIALSLGLTPNFKSNFDLAEDAKLQLSKDTYDDDLDNLLAQIGDQYADLFLAAKNLSDAILLSDILRVNTEITKAPLSASMIKRYDEHHQDLTLLKALVRQQLPEKYKEIFFDQSKNGYAGYIDGGASQEEFYKFIKPILEKMDGTEELLVKLNREDLLRKQRTFDNGSIPHQIHLGELHAILRRQEDFYPFLKDNREKIEKILTFRIPYYVGPLARGNSRFAWMTRKSEETITPWNFEEVVDKGASAQSFIERMTNFDKNLPNEKVLPKHSLLYEYFTVYNELTKVKYVTEGMRKPAFLSGEQKKAIVDLLFKTNRKVTVKQLKEDYFKKIECFDSVEISGVEDRFNASLGTYHDLLKIIKDKDFLDNEENEDILEDIVLTLTLFEDREMIEERLKTYAHLFDDKVMKQLKRRRYTGWGRLSRKLINGIRDKQSGKTILDFLKSDGFANRNFMQLIHDDSLTFKEDIQKAQVSGQGDSLHEHIANLAGSPAIKKGILQTVKVVDELVKVMGRHKPENIVIEMARENQTTQKGQKNSRERMKRIEEGIKELGSQILKEHPVENTQLQNEKLYLYYLQNGRDMYVDQELDINRLSDYDVDHIVPQSFLKDDSIDNKVLTRSDKARGKSDNVPSEEVVKKMKNYWRQLLNAKLITQRKFDNLTKAERGGLSELDKAGFIKRQLVETRQITKHVAQILDSRMNTKYDENDKLIREVKVITLKSKLVSDFRKDFQFYKVREINNYHHAHDAYLNAVVGTALIKKYPKLESEFVYGDYKVYDVRKMIAKSEQEIGKATAKYFFYSNIMNFFKTEITLANGEIRKRPLIETNGETGEIVWDKGRDFATVRKVLSMPQVNIVKKTEVQTGGFSKESILPKRNSDKLIARKKDWDPKKYGGFDSPTVAYSVLVVAKVEKGKSKKLKSVKELLGITIMERSSFEKNPIDFLEAKGYKEVKKDLIIKLPKYSLFELENGRKRMLASAGELQKGNELALPSKYVNFLYLASHYEKLKGSPEDNEQKQLFVEQHKHYLDEIIEQISEFSKRVILADANLDKVLSAYNKHRDKPIREQAENIIHLFTLTNLGAPAAFKYFDTTIDRKRYTSTKEVLDATLIHQSITGLYETRIDLSQLGGDGGGGGGGGGTLNIEDEHRLHETSKEPDVSLGSTWLSDFPQAWAETGGMGLAVRQAPLIIPLKATSTPVSIKQYPMSQEARLGIKPHIQRLLDQGILVPCQSPWNTPLLPVKKPGTNDYRPVQDLREVNKRVEDIHPTVPNPYNLLSGLPPSHQWYTVLDLKDAFFCLRLHPTSQPLFAFEWRDPEMGISGQLTWTRLPQGFKNSPTLFNEALHRDLADFRIQHPDLILLQYVDDLLLAATSELDCQQGTRALLQTLGNLGYRASAKKAQICQKQVKYLGYLLKEGQRWLTEARKETVMGQPTPKTPRQLREFLGTAGFCRLWIPGFAEMAAPLYPLTKPGTLFNWGPDQQKAYQEIKQALLTAPALGLPDLTKPFELFVDEKQGYAKGVLTQKLGPWRRPVAYLSKKLDPVAAGWPPCLRMVAAIAVLTKDAGKLTMGQPLVILAPHAVEALVKQPPDRWLSNARMTHYQALLLDTDRVQFGPVVALNPATLLPLPEEGLQHNCLDILAEAHGTRPDLTDQPLPDADHTWYTDGSSLLQEGQRKAGAAVTTETEVIWAKALPAGTSAQRAELIALTQALKMAEGKKLNVYTDSRYAFATAHIHGEIYRRRGWLTSEGKEIKNKDEILALLKALFLPKRLSIIHCPGHQKGHSAEARGNRMADQAARKAAITETPDTSTLLAGKRTADGSEFEKRTADGSEFESPKKKAKVE

SEQ ID NO: 2985 - protein, 2094 aa, synthetic construct
MPAAKRVKLDGGDKKYSIGLDIGTNSVGWAVITDEYKVPSKKFKVLGNTDRHSIKKNLIGALLFDSGETAEATRLKRTARRRYTRRKNRICYLQEIFSNEMAKVDDSFFHRLEESFLVEEDKKHERHPIFGNIVDEVAYHEKYPTIYHLRKKLVDSTDKADLRLIYLALAHMIKFRGHFLIEGDLNPDNSDVDKLFIQLVQTYNQLFEENPINASGVDAKAILSARLSKSRRLENLIAQLPGEKKNGLFGNLIALSLGLTPNFKSNFDLAEDAKLQLSKDTYDDDLDNLLAQIGDQYADLFLAAKNLSDAILLSDILRVNTEITKAPLSASMIKRYDEHHQDLTLLKALVRQQLPEKYKEIFFDQSKNGYAGYIDGGASQEEFYKFIKPILEKMDGTEELLVKLNREDLLRKQRTFDNGSIPHQIHLGELHAILRRQEDFYPFLKDNREKIEKILTFRIPYYVGPLARGNSRFAWMTRKSEETITPWNFEEVVDKGASAQSFIERMTNFDKNLPNEKVLPKHSLLYEYFTVYNELTKVKYVTEGMRKPAFLSGEQKKAIVDLLFKTNRKVTVKQLKEDYFKKIECFDSVEISGVEDRFNASLGTYHDLLKIIKDKDFLDNEENEDILEDIVLTLTLFEDREMIEERLKTYAHLFDDKVMKQLKRRRYTGWGRLSRKLINGIRDKQSGKTILDFLKSDGFANRNFMQLIHDDSLTFKEDIQKAQVSGQGDSLHEHIANLAGSPAIKKGILQTVKVVDELVKVMGRHKPENIVIEMARENQTTQKGQKNSRERMKRIEEGIKELGSQILKEHPVENTQLQNEKLYLYYLQNGRDMYVDQELDINRLSDYDVDHIVPQSFLKDDSIDNKVLTRSDKARGKSDNVPSEEVVKKMKNYWRQLLNAKLITQRKFDNLTKAERGGLSELDKAGFIKRQLVETRQITKHVAQILDSRMNTKYDENDKLIREVKVITLKSKLVSDFRKDFQFYKVREINNYHHAHDAYLNAVVGTALIKKYPKLESEFVYGDYKVYDVRKMIAKSEQEIGKATAKYFFYSNIMNFFKTEITLANGEIRKRPLIETNGETGEIVWDKGRDFATVRKVLSMPQVNIVKKTEVQTGGFSKESILPKRNSDKLIARKKDWDPKKYGGFDSPTVAYSVLVVAKVEKGKSKKLKSVKELLGITIMERSSFEKNPIDFLEAKGYKEVKKDLIIKLPKYSLFELENGRKRMLASAGELQKGNELALPSKYVNFLYLASHYEKLKGSPEDNEQKQLFVEQHKHYLDEIIEQISEFSKRVILADANLDKVLSAYNKHRDKPIREQAENIIHLFTLTNLGAPAAFKYFDTTIDRKRYTSTKEVLDATLIHQSITGLYETRIDLSQLGGDGGGGSGSSPAPGGTLNIEDEHRLHETSKEPDVSLGSTWLSDFPQAWAETGGMGLAVRQAPLIIPLKATSTPVSIKQYPMSQEARLGIKPHIQRLLDQGILVPCQSPWNTPLLPVKKPGTNDYRPVQDLREVNKRVEDIHPTVPNPYNLLSGLPPSHQWYTVLDLKDAFFCLRLHPTSQPLFAFEWRDPEMGISGQLTWTRLPQGFKNSPTLFNEALHRDLADFRIQHPDLILLQYVDDLLLAATSELDCQQGTRALLQTLGNLGYRASAKKAQICQKQVKYLGYLLKEGQRWLTEARKETVMGQPTPKTPRQLREFLGTAGFCRLWIPGFAEMAAPLYPLTKPGTLFNWGPDQQKAYQEIKQALLTAPALGLPDLTKPFELFVDEKQGYAKGVLTQKLGPWRRPVAYLSKKLDPVAAGWPPCLRMVAAIAVLTKDAGKLTMGQPLVILAPHAVEALVKQPPDRWLSNARMTHYQALLLDTDRVQFGPVVALNPATLLPLPEEGLQHNCLDILAEAHGTRPDLTDQPLPDADHTWYTDGSSLLQEGQRKAGAAVTTETEVIWAKALPAGTSAQRAELIALTQALKMAEGKKLNVYTDSRYAFATAHIHGEIYRRRGWLTSEGKEIKNKDEILALLKALFLPKRLSIIHCPGHQKGHSAEARGNRMADQAARKAAITETPDTSTLLAGKRTADGSEFEKRTADGSEFESPKKKAKVE

SEQ ID NO: 2986 - protein, 2088 aa, synthetic construct
MPAAKRVKLDGGDKKYSIGLDIGTNSVGWAVITDEYKVPSKKFKVLGNTDRHSIKKNLIGALLFDSGETAEATRLKRTARRRYTRRKNRICYLQEIFSNEMAKVDDSFFHRLEESFLVEEDKKHERHPIFGNIVDEVAYHEKYPTIYHLRKKLVDSTDKADLRLIYLALAHMIKFRGHFLIEGDLNPDNSDVDKLFIQLVQTYNQLFEENPINASGVDAKAILSARLSKSRRLENLIAQLPGEKKNGLFGNLIALSLGLTPNFKSNFDLAEDAKLQLSKDTYDDDLDNLLAQIGDQYADLFLAAKNLSDAILLSDILRVNTEITKAPLSASMIKRYDEHHQDLTLLKALVRQQLPEKYKEIFFDQSKNGYAGYIDGGASQEEFYKFIKPILEKMDGTEELLVKLNREDLLRKQRTFDNGSIPHQIHLGELHAILRRQEDFYPFLKDNREKIEKILTFRIPYYVGPLARGNSRFAWMTRKSEETITPWNFEEVVDKGASAQSFIERMTNFDKNLPNEKVLPKHSLLYEYFTVYNELTKVKYVTEGMRKPAFLSGEQKKAIVDLLFKTNRKVTVKQLKEDYFKKIECFDSVEISGVEDRFNASLGTYHDLLKIIKDKDFLDNEENEDILEDIVLTLTLFEDREMIEERLKTYAHLFDDKVMKQLKRRRYTGWGRLSRKLINGIRDKQSGKTILDFLKSDGFANRNFMQLIHDDSLTFKEDIQKAQVSGQGDSLHEHIANLAGSPAIKKGILQTVKVVDELVKVMGRHKPENIVIEMARENQTTQKGQKNSRERMKRIEEGIKELGSQILKEHPVENTQLQNEKLYLYYLQNGRDMYVDQELDINRLSDYDVDHIVPQSFLKDDSIDNKVLTRSDKARGKSDNVPSEEVVKKMKNYWRQLLNAKLITQRKFDNLTKAERGGLSELDKAGFIKRQLVETRQITKHVAQILDSRMNTKYDENDKLIREVKVITLKSKLVSDFRKDFQFYKVREINNYHHAHDAYLNAVVGTALIKKYPKLESEFVYGDYKVYDVRKMIAKSEQEIGKATAKYFFYSNIMNFFKTEITLANGEIRKRPLIETNGETGEIVWDKGRDFATVRKVLSMPQVNIVKKTEVQTGGFSKESILPKRNSDKLIARKKDWDPKKYGGFDSPTVAYSVLVVAKVEKGKSKKLKSVKELLGITIMERSSFEKNPIDFLEAKGYKEVKKDLIIKLPKYSLFELENGRKRMLASAGELQKGNELALPSKYVNFLYLASHYEKLKGSPEDNEQKQLFVEQHKHYLDEIIEQISEFSKRVILADANLDKVLSAYNKHRDKPIREQAENIIHLFTLTNLGAPAAFKYFDTTIDRKRYTSTKEVLDATLIHQSITGLYETRIDLSQLGGDGGGSSGGTLNIEDEHRLHETSKEPDVSLGSTWLSDFPQAWAETGGMGLAVRQAPLIIPLKATSTPVSIKQYPMSQEARLGIKPHIQRLLDQGILVPCQSPWNTPLLPVKKPGTNDYRPVQDLREVNKRVEDIHPTVPNPYNLLSGLPPSHQWYTVLDLKDAFFCLRLHPTSQPLFAFEWRDPEMGISGQLTWTRLPQGFKNSPTLFNEALHRDLADFRIQHPDLILLQYVDDLLLAATSELDCQQGTRALLQTLGNLGYRASAKKAQICQKQVKYLGYLLKEGQRWLTEARKETVMGQPTPKTPRQLREFLGTAGFCRLWIPGFAEMAAPLYPLTKPGTLFNWGPDQQKAYQEIKQALLTAPALGLPDLTKPFELFVDEKQGYAKGVLTQKLGPWRRPVAYLSKKLDPVAAGWPPCLRMVAAIAVLTKDAGKLTMGQPLVILAPHAVEALVKQPPDRWLSNARMTHYQALLLDTDRVQFGPVVALNPATLLPLPEEGLQHNCLDILAEAHGTRPDLTDQPLPDADHTWYTDGSSLLQEGQRKAGAAVTTETEVIWAKALPAGTSAQRAELIALTQALKMAEGKKLNVYTDSRYAFATAHIHGEIYRRRGWLTSEGKEIKNKDEILALLKALFLPKRLSIIHCPGHQKGHSAEARGNRMADQAARKAAITETPDTSTLLAGKRTADGSEFEKRTADGSEFESPKKKAKVE

SEQ ID NO: 2987 - protein, 2096 aa, synthetic construct; identical to SEQ ID NO: 2776

SEQ ID NO: 2988 - protein, 2094 aa, synthetic construct
MPAAKRVKLDGGDKKYSIGLDIGTNSVGWAVITDEYKVPSKKFKVLGNTDRHSIKKNLIGALLFDSGETAEATRLKRTARRRYTRRKNRICYLQEIFSNEMAKVDDSFFHRLEESFLVEEDKKHERHPIFGNIVDEVAYHEKYPTIYHLRKKLVDSTDKADLRLIYLALAHMIKFRGHFLIEGDLNPDNSDVDKLFIQLVQTYNQLFEENPINASGVDAKAILSARLSKSRRLENLIAQLPGEKKNGLFGNLIALSLGLTPNFKSNFDLAEDAKLQLSKDTYDDDLDNLLAQIGDQYADLFLAAKNLSDAILLSDILRVNTEITKAPLSASMIKRYDEHHQDLTLLKALVRQQLPEKYKEIFFDQSKNGYAGYIDGGASQEEFYKFIKPILEKMDGTEELLVKLNREDLLRKQRTFDNGSIPHQIHLGELHAILRRQEDFYPFLKDNREKIEKILTFRIPYYVGPLARGNSRFAWMTRKSEETITPWNFEEVVDKGASAQSFIERMTNFDKNLPNEKVLPKHSLLYEYFTVYNELTKVKYVTEGMRKPAFLSGEQKKAIVDLLFKTNRKVTVKQLKEDYFKKIECFDSVEISGVEDRFNASLGTYHDLLKIIKDKDFLDNEENEDILEDIVLTLTLFEDREMIEERLKTYAHLFDDKVMKQLKRRRYTGWGRLSRKLINGIRDKQSGKTILDFLKSDGFANRNFMQLIHDDSLTFKEDIQKAQVSGQGDSLHEHIANLAGSPAIKKGILQTVKVVDELVKVMGRHKPENIVIEMARENQTTQKGQKNSRERMKRIEEGIKELGSQILKEHPVENTQLQNEKLYLYYLQNGRDMYVDQELDINRLSDYDVDHIVPQSFLKDDSIDNKVLTRSDKARGKSDNVPSEEVVKKMKNYWRQLLNAKLITQRKFDNLTKAERGGLSELDKAGFIKRQLVETRQITKHVAQILDSRMNTKYDENDKLIREVKVITLKSKLVSDFRKDFQFYKVREINNYHHAHDAYLNAVVGTALIKKYPKLESEFVYGDYKVYDVRKMIAKSEQEIGKATAKYFFYSNIMNFFKTEITLANGEIRKRPLIETNGETGEIVWDKGRDFATVRKVLSMPQVNIVKKTEVQTGGFSKESILPKRNSDKLIARKKDWDPKKYGGFDSPTVAYSVLVVAKVEKGKSKKLKSVKELLGITIMERSSFEKNPIDFLEAKGYKEVKKDLIIKLPKYSLFELENGRKRMLASAGELQKGNELALPSKYVNFLYLASHYEKLKGSPEDNEQKQLFVEQHKHYLDEIIEQISEFSKRVILADANLDKVLSAYNKHRDKPIREQAENIIHLFTLTNLGAPAAFKYFDTTIDRKRYTSTKEVLDATLIHQSITGLYETRIDLSQLGGDGGGSSPAPGGGGGTLNIEDEHRLHETSKEPDVSLGSTWLSDFPQAWAETGGMGLAVRQAPLIIPLKATSTPVSIKQYPMSQEARLGIKPHIQRLLDQGILVPCQSPWNTPLLPVKKPGTNDYRPVQDLREVNKRVEDIHPTVPNPYNLLSGLPPSHQWYTVLDLKDAFFCLRLHPTSQPLFAFEWRDPEMGISGQLTWTRLPQGFKNSPTLFNEALHRDLADFRIQHPDLILLQYVDDLLLAATSELDCQQGTRALLQTLGNLGYRASAKKAQICQKQVKYLGYLLKEGQRWLTEARKETVMGQPTPKTPRQLREFLGTAGFCRLWIPGFAEMAAPLYPLTKPGTLFNWGPDQQKAYQEIKQALLTAPALGLPDLTKPFELFVDEKQGYAKGVLTQKLGPWRRPVAYLSKKLDPVAAGWPPCLRMVAAIAVLTKDAGKLTMGQPLVILAPHAVEALVKQPPDRWLSNARMTHYQALLLDTDRVQFGPVVALNPATLLPLPEEGLQHNCLDILAEAHGTRPDLTDQPLPDADHTWYTDGSSLLQEGQRKAGAAVTTETEVIWAKALPAGTSAQRAELIALTQALKMAEGKKLNVYTDSRYAFATAHIHGEIYRRRGWLTSEGKEIKNKDEILALLKALFLPKRLSIIHCPGHQKGHSAEARGNRMADQAARKAAITETPDTSTLLAGKRTADGSEFEKRTADGSEFESPKKKAKVE

SEQ ID NO: 2989 - protein, 2096 aa, synthetic construct; identical to SEQ ID NO: 2727

SEQ ID NO: 2990 - protein, 2096 aa, synthetic construct; identical to SEQ ID NO: 2764

SEQ ID NO: 2991 - protein, 2110 aa, synthetic construct; identical to SEQ ID NO: 2716

SEQ ID NO: 2992 - protein, 2115 aa, synthetic construct
MPAAKRVKLDGGDKKYSIGLDIGTNSVGWAVITDEYKVPSKKFKVLGNTDRHSIKKNLIGALLFDSGETAEATRLKRTARRRYTRRKNRICYLQEIFSNEMAKVDDSFFHRLEESFLVEEDKKHERHPIFGNIVDEVAYHEKYPTIYHLRKKLVDSTDKADLRLIYLALAHMIKFRGHFLIEGDLNPDNSDVDKLFIQLVQTYNQLFEENPINASGVDAKAILSARLSKSRRLENLIAQLPGEKKNGLFGNLIALSLGLTPNFKSNFDLAEDAKLQLSKDTYDDDLDNLLAQIGDQYADLFLAAKNLSDAILLSDILRVNTEITKAPLSASMIKRYDEHHQDLTLLKALVRQQLPEKYKEIFFDQSKNGYAGYIDGGASQEEFYKFIKPILEKMDGTEELLVKLNREDLLRKQRTFDNGSIPHQIHLGELHAILRRQEDFYPFLKDNREKIEKILTFRIPYYVGPLARGNSRFAWMTRKSEETITPWNFEEVVDKGASAQSFIERMTNFDKNLPNEKVLPKHSLLYEYFTVYNELTKVKYVTEGMRKPAFLSGEQKKAIVDLLFKTNRKVTVKQLKEDYFKKIECFDSVEISGVEDRFNASLGTYHDLLKIIKDKDFLDNEENEDILEDIVLTLTLFEDREMIEERLKTYAHLFDDKVMKQLKRRRYTGWGRLSRKLINGIRDKQSGKTILDFLKSDGFANRNFMQLIHDDSLTFKEDIQKAQVSGQGDSLHEHIANLAGSPAIKKGILQTVKVVDELVKVMGRHKPENIVIEMARENQTTQKGQKNSRERMKRIEEGIKELGSQILKEHPVENTQLQNEKLYLYYLQNGRDMYVDQELDINRLSDYDVDHIVPQSFLKDDSIDNKVLTRSDKARGKSDNVPSEEVVKKMKNYWRQLLNAKLITQRKFDNLTKAERGGLSELDKAGFIKRQLVETRQITKHVAQILDSRMNTKYDENDKLIREVKVITLKSKLVSDFRKDFQFYKVREINNYHHAHDAYLNAVVGTALIKKYPKLESEFVYGDYKVYDVRKMIAKSEQEIGKATAKYFFYSNIMNFFKTEITLANGEIRKRPLIETNGETGEIVWDKGRDFATVRKVLSMPQVNIVKKTEVQTGGFSKESILPKRNSDKLIARKKDWDPKKYGGFDSPTVAYSVLVVAKVEKGKSKKLKSVKELLGITIMERSSFEKNPIDFLEAKGYKEVKKDLIIKLPKYSLFELENGRKRMLASAGELQKGNELALPSKYVNFLYLASHYEKLKGSPEDNEQKQLFVEQHKHYLDEIIEQISEFSKRVILADANLDKVLSAYNKHRDKPIREQAENIIHLFTLTNLGAPAAFKYFDTTIDRKRYTSTKEVLDATLIHQSITGLYETRIDLSQLGGDGGEAAAKEAAAKEAAAKEAAAKEAAAKEAAAKGGTLNIEDEHRLHETSKEPDVSLGSTWLSDFPQAWAETGGMGLAVRQAPLIIPLKATSTPVSIKQYPMSQEARLGIKPHIQRLLDQGILVPCQSPWNTPLLPVKKPGTNDYRPVQDLREVNKRVEDIHPTVPNPYNLLSGLPPSHQWYTVLDLKDAFFCLRLHPTSQPLFAFEWRDPEMGISGQLTWTRLPQGFKNSPTLFNEALHRDLADFRIQHPDLILLQYVDDLLLAATSELDCQQGTRALLQTLGNLGYRASAKKAQICQKQVKYLGYLLKEGQRWLTEARKETVMGQPTPKTPRQLREFLGTAGFCRLWIPGFAEMAAPLYPLTKPGTLFNWGPDQQKAYQEIKQALLTAPALGLPDLTKPFELFVDEKQGYAKGVLTQKLGPWRRPVAYLSKKLDPVAAGWPPCLRMVAAIAVLTKDAGKLTMGQPLVILAPHAVEALVKQPPDRWLSNARMTHYQALLLDTDRVQFGPVVALNPATLLPLPEEGLQHNCLDILAEAHGTRPDLTDQPLPDADHTWYTDGSSLLQEGQRKAGAAVTTETEVIWAKALPAGTSAQRAELIALTQALKMAEGKKLNVYTDSRYAFATAHIHGEIYRRRGWLTSEGKEIKNKDEILALLKALFLPKRLSIIHCPGHQKGHSAEARGNRMADQAARKAAITETPDTSTLLAGKRTADGSEFEKRTADGSEFESPKKKAKVE

SEQ ID NO: 2993 - protein, 2094 aa, synthetic construct; identical to SEQ ID NO: 2766

SEQ ID NO: 2994 - protein, 2094 aa, synthetic construct; identical to SEQ ID NO: 2773

SEQ ID NO: 2995 - protein, 2097 aa, synthetic construct
MPAAKRVKLDGGDKKYSIGLDIGTNSVGWAVITDEYKVPSKKFKVLGNTDRHSIKKNLIGALLFDSGETAEATRLKRTARRRYTRRKNRICYLQEIFSNEMAKVDDSFFHRLEESFLVEEDKKHERHPIFGNIVDEVAYHEKYPTIYHLRKKLVDSTDKADLRLIYLALAHMIKFRGHFLIEGDLNPDNSDVDKLFIQLVQTYNQLFEENPINASGVDAKAILSARLSKSRRLENLIAQLPGEKKNGLFGNLIALSLGLTPNFKSNFDLAEDAKLQLSKDTYDDDLDNLLAQIGDQYADLFLAAKNLSDAILLSDILRVNTEITKAPLSASMIKRYDEHHQDLTLLKALVRQQLPEKYKEIFFDQSKNGYAGYIDGGASQEEFYKFIKPILEKMDGTEELLVKLNREDLLRKQRTFDNGSIPHQIHLGELHAILRRQEDFYPFLKDNREKIEKILTFRIPYYVGPLARGNSRFAWMTRKSEETITPWNFEEVVDKGASAQSFIERMTNFDKNLPNEKVLPKHSLLYEYFTVYNELTKVKYVTEGMRKPAFLSGEQKKAIVDLLFKTNRKVTVKQLKEDYFKKIECFDSVEISGVEDRFNASLGTYHDLLKIIKDKDFLDNEENEDILEDIVLTLTLFEDREMIEERLKTYAHLFDDKVMKQLKRRRYTGWGRLSRKLINGIRDKQSGKTILDFLKSDGFANRNFMQLIHDDSLTFKEDIQKAQVSGQGDSLHEHIANLAGSPAIKKGILQTVKVVDELVKVMGRHKPENIVIEMARENQTTQKGQKNSRERMKRIEEGIKELGSQILKEHPVENTQLQNEKLYLYYLQNGRDMYVDQELDINRLSDYDVDHIVPQSFLKDDSIDNKVLTRSDKARGKSDNVPSEEVVKKMKNYWRQLLNAKLITQRKFDNLTKAERGGLSELDKAGFIKRQLVETRQITKHVAQILDSRMNTKYDENDKLIREVKVITLKSKLVSDFRKDFQFYKVREINNYHHAHDAYLNAVVGTALIKKYPKLESEFVYGDYKVYDVRKMIAKSEQEIGKATAKYFFYSNIMNFFKTEITLANGEIRKRPLIETNGETGEIVWDKGRDFATVRKVLSMPQVNIVKKTEVQTGGFSKESILPKRNSDKLIARKKDWDPKKYGGFDSPTVAYSVLVVAKVEKGKSKKLKSVKELLGITIMERSSFEKNPIDFLEAKGYKEVKKDLIIKLPKYSLFELENGRKRMLASAGELQKGNELALPSKYVNFLYLASHYEKLKGSPEDNEQKQLFVEQHKHYLDEIIEQISEFSKRVILADANLDKVLSAYNKHRDKPIREQAENIIHLFTLTNLGAPAAFKYFDTTIDRKRYTSTKEVLDATLIHQSITGLYETRIDLSQLGGDGGGSAGSAAGSGEFGGTLNIEDEHRLHETSKEPDVSLGSTWLSDFPQAWAETGGMGLAVRQAPLIIPLKATSTPVSIKQYPMSQEARLGIKPHIQRLLDQGILVPCQSPWNTPLLPVKKPGTNDYRPVQDLREVNKRVEDIHPTVPNPYNLLSGLPPSHQWYTVLDLKDAFFCLRLHPTSQPLFAFEWRDPEMGISGQLTWTRLPQGFKNSPTLFNEALHRDLADFRIQHPDLILLQYVDDLLLAATSELDCQQGTRALLQTLGNLGYRASAKKAQICQKQVKYLGYLLKEGQRWLTEARKETVMGQPTPKTPRQLREFLGTAGFCRLWIPGFAEMAAPLYPLTKPGTLFNWGPDQQKAYQEIKQALLTAPALGLPDLTKPFELFVDEKQGYAKGVLTQKLGPWRRPVAYLSKKLDPVAAGWPPCLRMVAAIAVLTKDAGKLTMGQPLVILAPHAVEALVKQPPDRWLSNARMTHYQALLLDTDRVQFGPVVALNPATLLPLPEEGLQHNCLDILAEAHGTRPDLTDQPLPDADHTWYTDGSSLLQEGQRKAGAAVTTETEVIWAKALPAGTSAQRAELIALTQALKMAEGKKLNVYTDSRYAFATAHIHGEIYRRRGWLTSEGKEIKNKDEILALLKALFLPKRLSIIHCPGHQKGHSAEARGNRMADQAARKAAITETPDTSTLLAGKRTADGSEFEKRTADGSEFESPKKKAKVE

SEQ ID NO: 2996 - protein, 2091 aa, synthetic construct
MPAAKRVKLDGGDKKYSIGLDIGTNSVGWAVITDEYKVPSKKFKVLGNTDRHSIKKNLIGALLFDSGETAEATRLKRTARRRYTRRKNRICYLQEIFSNEMAKVDDSFFHRLEESFLVEEDKKHERHPIFGNIVDEVAYHEKYPTIYHLRKKLVDSTDKADLRLIYLALAHMIKFRGHFLIEGDLNPDNSDVDKLFIQLVQTYNQLFEENPINASGVDAKAILSARLSKSRRLENLIAQLPGEKKNGLFGNLIALSLGLTPNFKSNFDLAEDAKLQLSKDTYDDDLDNLLAQIGDQYADLFLAAKNLSDAILLSDILRVNTEITKAPLSASMIKRYDEHHQDLTLLKALVRQQLPEKYKEIFFDQSKNGYAGYIDGGASQEEFYKFIKPILEKMDGTEELLVKLNREDLLRKQRTFDNGSIPHQIHLGELHAILRRQEDFYPFLKDNREKIEKILTFRIPYYVGPLARGNSRFAWMTRKSEETITPWNFEEVVDKGASAQSFIERMTNFDKNLPNEKVLPKHSLLYEYFTVYNELTKVKYVTEGMRKPAFLSGEQKKAIVDLLFKTNRKVTVKQLKEDYFKKIECFDSVEISGVEDRFNASLGTYHDLLKIIKDKDFLDNEENEDILEDIVLTLTLFEDREMIEERLKTYAHLFDDKVMKQLKRRRYTGWGRLSRKLINGIRDKQSGKTILDFLKSDGFANRNFMQLIHDDSLTFKEDIQKAQVSGQGDSLHEHIANLAGSPAIKKGILQTVKVVDELVKVMGRHKPENIVIEMARENQTTQKGQKNSRERMKRIEEGIKELGSQILKEHPVENTQLQNEKLYLYYLQNGRDMYVDQELDINRLSDYDVDHIVPQSFLKDDSIDNKVLTRSDKARGKSDNVPSEEVVKKMKNYWRQLLNAKLITQRKFDNLTKAERGGLSELDKAGFIKRQLVETRQITKHVAQILDSRMNTKYDENDKLIREVKVITLKSKLVSDFRKDFQFYKVREINNYHHAHDAYLNAVVGTALIKKYPKLESEFVYGDYKVYDVRKMIAKSEQEIGKATAKYFFYSNIMNFFKTEITLANGEIRKRPLIETNGETGEIVWDKGRDFATVRKVLSMPQVNIVKKTEVQTGGFSKESILPKRNSDKLIARKKDWDPKKYGGFDSPTVAYSVLVVAKVEKGKSKKLKSVKELLGITIMERSSFEKNPIDFLEAKGYKEVKKDLIIKLPKYSLFELENGRKRMLASAGELQKGNELALPSKYVNFLYLASHYEKLKGSPEDNEQKQLFVEQHKHYLDEIIEQISEFSKRVILADANLDKVLSAYNKHRDKPIREQAENIIHLFTLTNLGAPAAFKYFDTTIDRKRYTSTKEVLDATLIHQSITGLYETRIDLSQLGGDGGPAPGSSGGTLNIEDEHRLHETSKEPDVSLGSTWLSDFPQAWAETGGMGLAVRQAPLIIPLKATSTPVSIKQYPMSQEARLGIKPHIQRLLDQGILVPCQSPWNTPLLPVKKPGTNDYRPVQDLREVNKRVEDIHPTVPNPYNLLSGLPPSHQWYTVLDLKDAFFCLRLHPTSQPLFAFEWRDPEMGISGQLTWTRLPQGFKNSPTLFNEALHRDLADFRIQHPDLILLQYVDDLLLAATSELDCQQGTRALLQTLGNLGYRASAKKAQICQKQVKYLGYLLKEGQRWLTEARKETVMGQPTPKTPRQLREFLGTAGFCRLWIPGFAEMAAPLYPLTKPGTLFNWGPDQQKAYQEIKQALLTAPALGLPDLTKPFELFVDEKQGYAKGVLTQKLGPWRRPVAYLSKKLDPVAAGWPPCLRMVAAIAVLTKDAGKLTMGQPLVILAPHAVEALVKQPPDRWLSNARMTHYQALLLDTDRVQFGPVVALNPATLLPLPEEGLQHNCLDILAEAHGTRPDLTDQPLPDADHTWYTDGSSLLQEGQRKAGAAVTTETEVIWAKALPAGTSAQRAELIALTQALKMAEGKKLNVYTDSRYAFATAHIHGEIYRRRGWLTSEGKEIKNKDEILALLKALFLPKRLSIIHCPGHQKGHSAEARGNRMADQAARKAAITETPDTSTLLAGKRTADGSEFEKRTADGSEFESPKKKAKVE

SEQ ID NO: 2997 - protein, 2096 aa, synthetic construct
MPAAKRVKLDGGDKKYSIGLDIGTNSVGWAVITDEYKVPSKKFKVLGNTDRHSIKKNLIGALLFDSGETAEATRLKRTARRRYTRRKNRICYLQEIFSNEMAKVDDSFFHRLEESFLVEEDKKHERHPIFGNIVDEVAYHEKYPTIYHLRKKLVDSTDKADLRLIYLALAHMIKFRGHFLIEGDLNPDNSDVDKLFIQLVQTYNQLFEENPINASGVDAKAILSARLSKSRRLENLIAQLPGEKKNGLFGNLIALSLGLTPNFKSNFDLAEDAKLQLSKDTYDDDLDNLLAQIGDQYADLFLAAKNLSDAILLSDILRVNTEITKAPLSASMIKRYDEHHQDLTLLKALVRQQLPEKYKEIFFDQSKNGYAGYIDGGASQEEFYKFIKPILEKMDGTEELLVKLNREDLLRKQRTFDNGSIPHQIHLGELHAILRRQEDFYPFLKDNREKIEKILTFRIPYYVGPLARGNSRFAWMTRKSEETITPWNFEEVVDKGASAQSFIERMTNFDKNLPNEKVLPKHSLLYEYFTVYNELTKVKYVTEGMRKPAFLSGEQKKAIVDLLFKTNRKVTVKQLKEDYFKKIECFDSVEISGVEDRFNASLGTYHDLLKIIKDKDFLDNEENEDILEDIVLTLTLFEDREMIEERLKTYAHLFDDKVMKQLKRRRYTGWGRLSRKLINGIRDKQSGKTILDFLKSDGFANRNFMQLIHDDSLTFKEDIQKAQVSGQGDSLHEHIANLAGSPAIKKGILQTVKVVDELVKVMGRHKPENIVIEMARENQTTQKGQKNSRERMKRIEEGIKELGSQILKEHPVENTQLQNEKLYLYYLQNGRDMYVDQELDINRLSDYDVDHIVPQSFLKDDSIDNKVLTRSDKARGKSDNVPSEEVVKKMKNYWRQLLNAKLITQRKFDNLTKAERGGLSELDKAGFIKRQLVETRQITKHVAQILDSRMNTKYDENDKLIREVKVITLKSKLVSDFRKDFQFYKVREINNYHHAHDAYLNAVVGTALIKKYPKLESEFVYGDYKVYDVRKMIAKSEQEIGKATAKYFFYSNIMNFFKTEITLANGEIRKRPLIETNGETGEIVWDKGRDFATVRKVLSMPQVNIVKKTEVQTGGFSKESILPKRNSDKLIARKKDWDPKKYGGFDSPTVAYSVLVVAKVEKGKSKKLKSVKELLGITIMERSSFEKNPIDFLEAKGYKEVKKDLIIKLPKYSLFELENGRKRMLASAGELQKGNELALPSKYVNFLYLASHYEKLKGSPEDNEQKQLFVEQHKHYLDEIIEQISEFSKRVILADANLDKVLSAYNKHRDKPIREQAENIIHLFTLTNLGAPAAFKYFDTTIDRKRYTSTKEVLDATLIHQSITGLYETRIDLSQLGGDGGEAAAKGGGGSSGGTLNIEDEHRLHETSKEPDVSLGSTWLSDFPQAWAETGGMGLAVRQAPLIIPLKATSTPVSIKQYPMSQEARLGIKPHIQRLLDQGILVPCQSPWNTPLLPVKKPGTNDYRPVQDLREVNKRVEDIHPTVPNPYNLLSGLPPSHQWYTVLDLKDAFFCLRLHPTSQPLFAFEWRDPEMGISGQLTWTRLPQGFKNSPTLFNEALHRDLADFRIQHPDLILLQYVDDLLLAATSELDCQQGTRALLQTLGNLGYRASAKKAQICQKQVKYLGYLLKEGQRWLTEARKETVMGQPTPKTPRQLREFLGTAGFCRLWIPGFAEMAAPLYPLTKPGTLFNWGPDQQKAYQEIKQALLTAPALGLPDLTKPFELFVDEKQGYAKGVLTQKLGPWRRPVAYLSKKLDPVAAGWPPCLRMVAAIAVLTKDAGKLTMGQPLVILAPHAVEALVKQPPDRWLSNARMTHYQALLLDTDRVQFGPVVALNPATLLPLPEEGLQHNCLDILAEAHGTRPDLTDQPLPDADHTWYTDGSSLLQEGQRKAGAAVTTETEVIWAKALPAGTSAQRAELIALTQALKMAEGKKLNVYTDSRYAFATAHIHGEIYRRRGWLTSEGKEIKNKDEILALLKALFLPKRLSIIHCPGHQKGHSAEARGNRMADQAARKAAITETPDTSTLLAGKRTADGSEFEKRTADGSEFESPKKKAKVE

SEQ ID NO: 2998 - protein, 2100 aa, synthetic construct
MPAAKRVKLDGGDKKYSIGLDIGTNSVGWAVITDEYKVPSKKFKVLGNTDRHSIKKNLIGALLFDSGETAEATRLKRTARRRYTRRKNRICYLQEIFSNEMAKVDDSFFHRLEESFLVEEDKKHERHPIFGNIVDEVAYHEKYPTIYHLRKKLVDSTDKADLRLIYLALAHMIKFRGHFLIEGDLNPDNSDVDKLFIQLVQTYNQLFEENPINASGVDAKAILSARLSKSRRLENLIAQLPGEKKNGLFGNLIALSLGLTPNFKSNFDLAEDAKLQLSKDTYDDDLDNLLAQIGDQYADLFLAAKNLSDAILLSDILRVNTEITKAPLSASMIKRYDEHHQDLTLLKALVRQQLPEKYKEIFFDQSKNGYAGYIDGGASQEEFYKFIKPILEKMDGTEELLVKLNREDLLRKQRTFDNGSIPHQIHLGELHAILRRQEDFYPFLKDNREKIEKILTFRIPYYVGPLARGNSRFAWMTRKSEETITPWNFEEVVDKGASAQSFIERMTNFDKNLPNEKVLPKHSLLYEYFTVYNELTKVKYVTEGMRKPAFLSGEQKKAIVDLLFKTNRKVTVKQLKEDYFKKIECFDSVEISGVEDRFNASLGTYHDLLKIIKDKDFLDNEENEDILEDIVLTLTLFEDREMIEERLKTYAHLFDDKVMKQLKRRRYTGWGRLSRKLINGIRDKQSGKTILDFLKSDGFANRNFMQLIHDDSLTFKEDIQKAQVSGQGDSLHEHIANLAGSPAIKKGILQTVKVVDELVKVMGRHKPENIVIEMARENQTTQKGQKNSRERMKRIEEGIKELGSQILKEHPVENTQLQNEKLYLYYLQNGRDMYVDQELDINRLSDYDVDHIVPQSFLKDDSIDNKVLTRSDKARGKSDNVPSEEVVKKMKNYWRQLLNAKLITQRKFDNLTKAERGGLSELDKAGFIKRQLVETRQITKHVAQILDSRMNTKYDENDKLIREVKVITLKSKLVSDFRKDFQFYKVREINNYHHAHDAYLNAVVGTALIKKYPKLESEFVYGDYKVYDVRKMIAKSEQEIGKATAKYFFYSNIMNFFKTEITLANGEIRKRPLIETNGETGEIVWDKGRDFATVRKVLSMPQVNIVKKTEVQTGGFSKESILPKRNSDKLIARKKDWDPKKYGGFDSPTVAYSVLVVAKVEKGKSKKLKSVKELLGITIMERSSFEKNPIDFLEAKGYKEVKKDLIIKLPKYSLFELENGRKRMLASAGELQKGNELALPSKYVNFLYLASHYEKLKGSPEDNEQKQLFVEQHKHYLDEIIEQISEFSKRVILADANLDKVLSAYNKHRDKPIREQAENIIHLFTLTNLGAPAAFKYFDTTIDRKRYTSTKEVLDATLIHQSITGLYETRIDLSQLGGDGGGSSGSSGSSGSSGSSGGTLNIEDEHRLHETSKEPDVSLGSTWLSDFPQAWAETGGMGLAVRQAPLIIPLKATSTPVSIKQYPMSQEARLGIKPHIQRLLDQGILVPCQSPWNTPLLPVKKPGTNDYRPVQDLREVNKRVEDIHPTVPNPYNLLSGLPPSHQWYTVLDLKDAFFCLRLHPTSQPLFAFEWRDPEMGISGQLTWTRLPQGFKNSPTLFNEALHRDLADFRIQHPDLILLQYVDDLLLAATSELDCQQGTRALLQTLGNLGYRASAKKAQICQKQVKYLGYLLKEGQRWLTEARKETVMGQPTPKTPRQLREFLGTAGFCRLWIPGFAEMAAPLYPLTKPGTLFNWGPDQQKAYQEIKQALLTAPALGLPDLTKPFELFVDEKQGYAKGVLTQKLGPWRRPVAYLSKKLDPVAAGWPPCLRMVAAIAVLTKDAGKLTMGQPLVILAPHAVEALVKQPPDRWLSNARMTHYQALLLDTDRVQFGPVVALNPATLLPLPEEGLQHNCLDILAEAHGTRPDLTDQPLPDADHTWYTDGSSLLQEGQRKAGAAVTTETEVIWAKALPAGTSAQRAELIALTQALKMAEGKKLNVYTDSRYAFATAHIHGEIYRRRGWLTSEGKEIKNKDEILALLKALFLPKRLSIIHCPGHQKGHSAEARGNRMADQAARKAAITETPDTSTLLAGKRTADGSEFEKRTADGSEFESPKKKAKVE

SEQ ID NO: 2999 - protein, 2096 aa, synthetic construct; identical to SEQ ID NO: 2719

SEQ ID NO: 3000 - protein, 2088 aa, synthetic construct
MPAAKRVKLDGGDKKYSIGLDIGTNSVGWAVITDEYKVPSKKFKVLGNTDRHSIKKNLIGALLFDSGETAEATRLKRTARRRYTRRKNRICYLQEIFSNEMAKVDDSFFHRLEESFLVEEDKKHERHPIFGNIVDEVAYHEKYPTIYHLRKKLVDSTDKADLRLIYLALAHMIKFRGHFLIEGDLNPDNSDVDKLFIQLVQTYNQLFEENPINASGVDAKAILSARLSKSRRLENLIAQLPGEKKNGLFGNLIALSLGLTPNFKSNFDLAEDAKLQLSKDTYDDDLDNLLAQIGDQYADLFLAAKNLSDAILLSDILRVNTEITKAPLSASMIKRYDEHHQDLTLLKALVRQQLPEKYKEIFFDQSKNGYAGYIDGGASQEEFYKFIKPILEKMDGTEELLVKLNREDLLRKQRTFDNGSIPHQIHLGELHAILRRQEDFYPFLKDNREKIEKILTFRIPYYVGPLARGNSRFAWMTRKSEETITPWNFEEVVDKGASAQSFIERMTNFDKNLPNEKVLPKHSLLYEYFTVYNELTKVKYVTEGMRKPAFLSGEQKKAIVDLLFKTNRKVTVKQLKEDYFKKIECFDSVEISGVEDRFNASLGTYHDLLKIIKDKDFLDNEENEDILEDIVLTLTLFEDREMIEERLKTYAHLFDDKVMKQLKRRRYTGWGRLSRKLINGIRDKQSGKTILDFLKSDGFANRNFMQLIHDDSLTFKEDIQKAQVSGQGDSLHEHIANLAGSPAIKKGILQTVKVVDELVKVMGRHKPENIVIEMARENQTTQKGQKNSRERMKRIEEGIKELGSQILKEHPVENTQLQNEKLYLYYLQNGRDMYVDQELDINRLSDYDVDHIVPQSFLKDDSIDNKVLTRSDKARGKSDNVPSEEVVKKMKNYWRQLLNAKLITQRKFDNLTKAERGGLSELDKAGFIKRQLVETRQITKHVAQILDSRMNTKYDENDKLIREVKVITLKSKLVSDFRKDFQFYKVREINNYHHAHDAYLNAVVGTALIKKYPKLESEFVYGDYKVYDVRKMIAKSEQEIGKATAKYFFYSNIMNFFKTEITLANGEIRKRPLIETNGETGEIVWDKGRDFATVRKVLSMPQVNIVKKTEVQTGGFSKESILPKRNSDKLIARKKDWDPKKYGGFDSPTVAYSVLVVAKVEKGKSKKLKSVKELLGITIMERSSFEKNPIDFLEAKGYKEVKKDLIIKLPKYSLFELENGRKRMLASAGELQKGNELALPSKYVNFLYLASHYEKLKGSPEDNEQKQLFVEQHKHYLDEIIEQISEFSKRVILADANLDKVLSAYNKHRDKPIREQAENIIHLFTLTNLGAPAAFKYFDTTIDRKRYTSTKEVLDATLIHQSITGLYETRIDLSQLGGDGGGGSGGTLNIEDEHRLHETSKEPDVSLGSTWLSDFPQAWAETGGMGLAVRQAPLIIPLKATSTPVSIKQYPMSQEARLGIKPHIQRLLDQGILVPCQSPWNTPLLPVKKPGTNDYRPVQDLREVNKRVEDIHPTVPNPYNLLSGLPPSHQWYTVLDLKDAFFCLRLHPTSQPLFAFEWRDPEMGISGQLTWTRLPQGFKNSPTLFNEALHRDLADFRIQHPDLILLQYVDDLLLAATSELDCQQGTRALLQTLGNLGYRASAKKAQICQKQVKYLGYLLKEGQRWLTEARKETVMGQPTPKTPRQLREFLGTAGFCRLWIPGFAEMAAPLYPLTKPGTLFNWGPDQQKAYQEIKQALLTAPALGLPDLTKPFELFVDEKQGYAKGVLTQKLGPWRRPVAYLSKKLDPVAAGWPPCLRMVAAIAVLTKDAGKLTMGQPLVILAPHAVEALVKQPPDRWLSNARMTHYQALLLDTDRVQFGPVVALNPATLLPLPEEGLQHNCLDILAEAHGTRPDLTDQPLPDADHTWYTDGSSLLQEGQRKAGAAVTTETEVIWAKALPAGTSAQRAELIALTQALKMAEGKKLNVYTDSRYAFATAHIHGEIYRRRGWLTSEGKEIKNKDEILALLKALFLPKRLSIIHCPGHQKGHSAEARGNRMADQAARKAAITETPDTSTLLAGKRTADGSEFEKRTADGSEFESPKKKAKVE

SEQ ID NO: 3001 - protein, 2100 aa, synthetic construct; identical to SEQ ID NO: 2725

SEQ ID NO: 3002 - protein, 2093 aa, synthetic construct; identical to SEQ ID NO: 2740

SEQ ID NO: 3003 - protein, 2094 aa, synthetic construct; identical to SEQ ID NO: 2752

SEQ ID NO: 3004 - protein, 2097 aa, synthetic construct; identical to SEQ ID NO: 2763

SEQ ID NO: 3005 - protein, 2096 aa, synthetic construct
MPAAKRVKLDGGDKKYSIGLDIGTNSVGWAVITDEYKVPSKKFKVLGNTDRHSIKKNLIGALLFDSGETAEATRLKRTARRRYTRRKNRICYLQEIFSNEMAKVDDSFFHRLEESFLVEEDKKHERHPIFGNIVDEVAYHEKYPTIYHLRKKLVDSTDKADLRLIYLALAHMIKFRGHFLIEGDLNPDNSDVDKLFIQLVQTYNQLFEENPINASGVDAKAILSARLSKSRRLENLIAQLPGEKKNGLFGNLIALSLGLTPNFKSNFDLAEDAKLQLSKDTYDDDLDNLLAQIGDQYADLFLAAKNLSDAILLSDILRVNTEITKAPLSASMIKRYDEHHQDLTLLKALVRQQLPEKYKEIFFDQSKNGYAGYIDGGASQEEFYKFIKPILEKMDGTEELLVKLNREDLLRKQRTFDNGSIPHQIHLGELHAILRRQEDFYPFLKDNREKIEKILTFRIPYYVGPLARGNSRFAWMTRKSEETITPWNFEEVVDKGASAQSFIERMTNFDKNLPNEKVLPKHSLLYEYFTVYNELTKVKYVTEGMRKPAFLSGEQKKAIVDLLFKTNRKVTVKQLKEDYFKKIECFDSVEISGVEDRFNASLGTYHDLLKIIKDKDFLDNEENEDILEDIVLTLTLFEDREMIEERLKTYAHLFDDKVMKQLKRRRYTGWGRLSRKLINGIRDKQSGKTILDFLKSDGFANRNFMQLIHDDSLTFKEDIQKAQVSGQGDSLHEHIANLAGSPAIKKGILQTVKVVDELVKVMGRHKPENIVIEMARENQTTQKGQKNSRERMKRIEEGIKELGSQILKEHPVENTQLQNEKLYLYYLQNGRDMYVDQELDINRLSDYDVDHIVPQSFLKDDSIDNKVLTRSDKARGKSDNVPSEEVVKKMKNYWRQLLNAKLITQRKFDNLTKAERGGLSELDKAGFIKRQLVETRQITKHVAQILDSRMNTKYDENDKLIREVKVITLKSKLVSDFRKDFQFYKVREINNYHHAHDAYLNAVVGTALIKKYPKLESEFVYGDYKVYDVRKMIAKSEQEIGKATAKYFFYSNIMNFFKTEITLANGEIRKRPLIETNGETGEIVWDKGRDFATVRKVLSMPQVNIVKKTEVQTGGFSKESILPKRNSDKLIARKKDWDPKKYGGFDSPTVAYSVLVVAKVEKGKSKKLKSVKELLGITIMERSSFEKNPIDFLEAKGYKEVKKDLIIKLPKYSLFELENGRKRMLASAGELQKGNELALPSKYVNFLYLASHYEKLKGSPEDNEQKQLFVEQHKHYLDEIIEQISEFSKRVILADANLDKVLSAYNKHRDKPIREQAENIIHLFTLTNLGAPAAFKYFDTTIDRKRYTSTKEVLDATLIHQSITGLYETRIDLSQLGGDGGEAAAKPAPGSSGGTLNIEDEHRLHETSKEPDVSLGSTWLSDFPQAWAETGGMGLAVRQAPLIIPLKATSTPVSIKQYPMSQEARLGIKPHIQRLLDQGILVPCQSPWNTPLLPVKKPGTNDYRPVQDLREVNKRVEDIHPTVPNPYNLLSGLPPSHQWYTVLDLKDAFFCLRLHPTSQPLFAFEWRDPEMGISGQLTWTRLPQGFKNSPTLFNEALHRDLADFRIQHPDLILLQYVDDLLLAATSELDCQQGTRALLQTLGNLGYRASAKKAQICQKQVKYLGYLLKEGQRWLTEARKETVMGQPTPKTPRQLREFLGTAGFCRLWIPGFAEMAAPLYPLTKPGTLFNWGPDQQKAYQEIKQALLTAPALGLPDLTKPFELFVDEKQGYAKGVLTQKLGPWRRPVAYLSKKLDPVAAGWPPCLRMVAAIAVLTKDAGKLTMGQPLVILAPHAVEALVKQPPDRWLSNARMTHYQALLLDTDRVQFGPVVALNPATLLPLPEEGLQHNCLDILAEAHGTRPDLTDQPLPDADHTWYTDGSSLLQEGQRKAGAAVTTETEVIWAKALPAGTSAQRAELIALTQALKMAEGKKLNVYTDSRYAFATAHIHGEIYRRRGWLTSEGKEIKNKDEILALLKALFLPKRLSIIHCPGHQKGHSAEARGNRMADQAARKAAITETPDTSTLLAGKRTADGSEFEKRTADGSEFESPKKKAKVE

SEQ ID NO: 3006 - protein, 2089 aa, synthetic construct
MPAAKRVKLDGGDKKYSIGLDIGTNSVGWAVITDEYKVPSKKFKVLGNTDRHSIKKNLIGALLFDSGETAEATRLKRTARRRYTRRKNRICYLQEIFSNEMAKVDDSFFHRLEESFLVEEDKKHERHPIFGNIVDEVAYHEKYPTIYHLRKKLVDSTDKADLRLIYLALAHMIKFRGHFLIEGDLNPDNSDVDKLFIQLVQTYNQLFEENPINASGVDAKAILSARLSKSRRLENLIAQLPGEKKNGLFGNLIALSLGLTPNFKSNFDLAEDAKLQLSKDTYDDDLDNLLAQIGDQYADLFLAAKNLSDAILLSDILRVNTEITKAPLSASMIKRYDEHHQDLTLLKALVRQQLPEKYKEIFFDQSKNGYAGYIDGGASQEEFYKFIKPILEKMDGTEELLVKLNREDLLRKQRTFDNGSIPHQIHLGELHAILRRQEDFYPFLKDNREKIEKILTFRIPYYVGPLARGNSRFAWMTRKSEETITPWNFEEVVDKGASAQSFIERMTNFDKNLPNEKVLPKHSLLYEYFTVYNELTKVKYVTEGMRKPAFLSGEQKKAIVDLLFKTNRKVTVKQLKEDYFKKIECFDSVEISGVEDRFNASLGTYHDLLKIIKDKDFLDNEENEDILEDIVLTLTLFEDREMIEERLKTYAHLFDDKVMKQLKRRRYTGWGRLSRKLINGIRDKQSGKTILDFLKSDGFANRNFMQLIHDDSLTFKEDIQKAQVSGQGDSLHEHIANLAGSPAIKKGILQTVKVVDELVKVMGRHKPENIVIEMARENQTTQKGQKNSRERMKRIEEGIKELGSQILKEHPVENTQLQNEKLYLYYLQNGRDMYVDQELDINRLSDYDVDHIVPQSFLKDDSIDNKVLTRSDKARGKSDNVPSEEVVKKMKNYWRQLLNAKLITQRKFDNLTKAERGGLSELDKAGFIKRQLVETRQITKHVAQILDSRMNTKYDENDKLIREVKVITLKSKLVSDFRKDFQFYKVREINNYHHAHDAYLNAVVGTALIKKYPKLESEFVYGDYKVYDVRKMIAKSEQEIGKATAKYFFYSNIMNFFKTEITLANGEIRKRPLIETNGETGEIVWDKGRDFATVRKVLSMPQVNIVKKTEVQTGGFSKESILPKRNSDKLIARKKDWDPKKYGGFDSPTVAYSVLVVAKVEKGKSKKLKSVKELLGITIMERSSFEKNPIDFLEAKGYKEVKKDLIIKLPKYSLFELENGRKRMLASAGELQKGNELALPSKYVNFLYLASHYEKLKGSPEDNEQKQLFVEQHKHYLDEIIEQISEFSKRVILADANLDKVLSAYNKHRDKPIREQAENIIHLFTLTNLGAPAAFKYFDTTIDRKRYTSTKEVLDATLIHQSITGLYETRIDLSQLGGDGGGGGGGGTLNIEDEHRLHETSKEPDVSLGSTWLSDFPQAWAETGGMGLAVRQAPLIIPLKATSTPVSIKQYPMSQEARLGIKPHIQRLLDQGILVPCQSPWNTPLLPVKKPGTNDYRPVQDLREVNKRVEDIHPTVPNPYNLLSGLPPSHQWYTVLDLKDAFFCLRLHPTSQPLFAFEWRDPEMGISGQLTWTRLPQGFKNSPTLFNEALHRDLADFRIQHPDLILLQYVDDLLLAATSELDCQQGTRALLQTLGNLGYRASAKKAQICQKQVKYLGYLLKEGQRWLTEARKETVMGQPTPKTPRQLREFLGTAGFCRLWIPGFAEMAAPLYPLTKPGTLFNWGPDQQKAYQEIKQALLTAPALGLPDLTKPFELFVDEKQGYAKGVLTQKLGPWRRPVAYLSKKLDPVAAGWPPCLRMVAAIAVLTKDAGKLTMGQPLVILAPHAVEALVKQPPDRWLSNARMTHYQALLLDTDRVQFGPVVALNPATLLPLPEEGLQHNCLDILAEAHGTRPDLTDQPLPDADHTWYTDGSSLLQEGQRKAGAAVTTETEVIWAKALPAGTSAQRAELIALTQALKMAEGKKLNVYTDSRYAFATAHIHGEIYRRRGWLTSEGKEIKNKDEILALLKALFLPKRLSIIHCPGHQKGHSAEARGNRMADQAARKAAITETPDTSTLLAGKRTADGSEFEKRTADGSEFESPKKKAKVE

SEQ ID NO: 3007 - protein, 2096 aa, synthetic construct; identical to SEQ ID NO: 2748

SEQ ID NO: 3008 - protein, 2090 aa, synthetic construct; identical to SEQ ID NO: 2730

SEQ ID NO: 3009 - protein, 2096 aa, synthetic construct
MPAAKRVKLDGGDKKYSIGLDIGTNSVGWAVITDEYKVPSKKFKVLGNTDRHSIKKNLIGALLFDSGETAEATRLKRTARRRYTRRKNRICYLQEIFSNEMAKVDDSFFHRLEESFLVEEDKKHERHPIFGNIVDEVAYHEKYPTIYHLRKKLVDSTDKADLRLIYLALAHMIKFRGHFLIEGDLNPDNSDVDKLFIQLVQTYNQLFEENPINASGVDAKAILSARLSKSRRLENLIAQLPGEKKNGLFGNLIALSLGLTPNFKSNFDLAEDAKLQLSKDTYDDDLDNLLAQIGDQYADLFLAAKNLSDAILLSDILRVNTEITKAPLSASMIKRYDEHHQDLTLLKALVRQQLPEKYKEIFFDQSKNGYAGYIDGGASQEEFYKFIKPILEKMDGTEELLVKLNREDLLRKQRTFDNGSIPHQIHLGELHAILRRQEDFYPFLKDNREKIEKILTFRIPYYVGPLARGNSRFAWMTRKSEETITPWNFEEVVDKGASAQSFIERMTNFDKNLPNEKVLPKHSLLYEYFTVYNELTKVKYVTEGMRKPAFLSGEQKKAIVDLLFKTNRKVTVKQLKEDYFKKIECFDSVEISGVEDRFNASLGTYHDLLKIIKDKDFLDNEENEDILEDIVLTLTLFEDREMIEERLKTYAHLFDDKVMKQLKRRRYTGWGRLSRKLINGIRDKQSGKTILDFLKSDGFANRNFMQLIHDDSLTFKEDIQKAQVSGQGDSLHEHIANLAGSPAIKKGILQTVKVVDELVKVMGRHKPENIVIEMARENQTTQKGQKNSRERMKRIEEGIKELGSQILKEHPVENTQLQNEKLYLYYLQNGRDMYVDQELDINRLSDYDVDHIVPQSFLKDDSIDNKVLTRSDKARGKSDNVPSEEVVKKMKNYWRQLLNAKLITQRKFDNLTKAERGGLSELDKAGFIKRQLVETRQITKHVAQILDSRMNTKYDENDKLIREVKVITLKSKLVSDFRKDFQFYKVREINNYHHAHDAYLNAVVGTALIKKYPKLESEFVYGDYKVYDVRKMIAKSEQEIGKATAKYFFYSNIMNFFKTEITLANGEIRKRPLIETNGETGEIVWDKGRDFATVRKVLSMPQVNIVKKTEVQTGGFSKESILPKRNSDKLIARKKDWDPKKYGGFDSPTVAYSVLVVAKVEKGKSKKLKSVKELLGITIMERSSFEKNPIDFLEAKGYKEVKKDLIIKLPKYSLFELENGRKRMLASAGELQKGNELALPSKYVNFLYLASHYEKLKGSPEDNEQKQLFVEQHKHYLDEIIEQISEFSKRVILADANLDKVLSAYNKHRDKPIREQAENIIHLFTLTNLGAPAAFKYFDTTIDRKRYTSTKEVLDATLIHQSITGLYETRIDLSQLGGDGGPAPEAAAKGGGGGTLNIEDEHRLHETSKEPDVSLGSTWLSDFPQAWAETGGMGLAVRQAPLIIPLKATSTPVSIKQYPMSQEARLGIKPHIQRLLDQGILVPCQSPWNTPLLPVKKPGTNDYRPVQDLREVNKRVEDIHPTVPNPYNLLSGLPPSHQWYTVLDLKDAFFCLRLHPTSQPLFAFEWRDPEMGISGQLTWTRLPQGFKNSPTLFNEALHRDLADFRIQHPDLILLQYVDDLLLAATSELDCQQGTRALLQTLGNLGYRASAKKAQICQKQVKYLGYLLKEGQRWLTEARKETVMGQPTPKTPRQLREFLGTAGFCRLWIPGFAEMAAPLYPLTKPGTLFNWGPDQQKAYQEIKQALLTAPALGLPDLTKPFELFVDEKQGYAKGVLTQKLGPWRRPVAYLSKKLDPVAAGWPPCLRMVAAIAVLTKDAGKLTMGQPLVILAPHAVEALVKQPPDRWLSNARMTHYQALLLDTDRVQFGPVVALNPATLLPLPEEGLQHNCLDILAEAHGTRPDLTDQPLPDADHTWYTDGSSLLQEGQRKAGAAVTTETEVIWAKALPAGTSAQRAELIALTQALKMAEGKKLNVYTDSRYAFATAHIHGEIYRRRGWLTSEGKEIKNKDEILALLKALFLPKRLSIIHCPGHQKGHSAEARGNRMADQAARKAAITETPDTSTLLAGKRTADGSEFEKRTADGSEFESPKKKAKVE

SEQ ID NO: 3010 - protein, 2101 aa, synthetic construct
MPAAKRVKLDGGDKKYSIGLDIGTNSVGWAVITDEYKVPSKKFKVLGNTDRHSIKKNLIGALLFDSGETAEATRLKRTARRRYTRRKNRICYLQEIFSNEMAKVDDSFFHRLEESFLVEEDKKHERHPIFGNIVDEVAYHEKYPTIYHLRKKLVDSTDKADLRLIYLALAHMIKFRGHFLIEGDLNPDNSDVDKLFIQLVQTYNQLFEENPINASGVDAKAILSARLSKSRRLENLIAQLPGEKKNGLFGNLIALSLGLTPNFKSNFDLAEDAKLQLSKDTYDDDLDNLLAQIGDQYADLFLAAKNLSDAILLSDILRVNTEITKAPLSASMIKRYDEHHQDLTLLKALVRQQLPEKYKEIFFDQSKNGYAGYIDGGASQEEFYKFIKPILEKMDGTEELLVKLNREDLLRKQRTFDNGSIPHQIHLGELHAILRRQEDFYPFLKDNREKIEKILTFRIPYYVGPLARGNSRFAWMTRKSEETITPWNFEEVVDKGASAQSFIERMTNFDKNLPNEKVLPKHSLLYEYFTVYNELTKVKYVTEGMRKPAFLSGEQKKAIVDLLFKTNRKVTVKQLKEDYFKKIECFDSVEISGVEDRFNASLGTYHDLLKIIKDKDFLDNEENEDILEDIVLTLTLFEDREMIEERLKTYAHLFDDKVMKQLKRRRYTGWGRLSRKLINGIRDKQSGKTILDFLKSDGFANRNFMQLIHDDSLTFKEDIQKAQVSGQGDSLHEHIANLAGSPAIKKGILQTVKVVDELVKVMGRHKPENIVIEMARENQTTQKGQKNSRERMKRIEEGIKELGSQILKEHPVENTQLQNEKLYLYYLQNGRDMYVDQELDINRLSDYDVDHIVPQSFLKDDSIDNKVLTRSDKARGKSDNVPSEEVVKKMKNYWRQLLNAKLITQRKFDNLTKAERGGLSELDKAGFIKRQLVETRQITKHVAQILDSRMNTKYDENDKLIREVKVITLKSKLVSDFRKDFQFYKVREINNYHHAHDAYLNAVVGTALIKKYPKLESEFVYGDYKVYDVRKMIAKSEQEIGKATAKYFFYSNIMNFFKTEITLANGEIRKRPLIETNGETGEIVWDKGRDFATVRKVLSMPQVNIVKKTEVQTGGFSKESILPKRNSDKLIARKKDWDPKKYGGFDSPTVAYSVLVVAKVEKGKSKKLKSVKELLGITIMERSSFEKNPIDFLEAKGYKEVKKDLIIKLPKYSLFELENGRKRMLASAGELQKGNELALPSKYVNFLYLASHYEKLKGSPEDNEQKQLFVEQHKHYLDEIIEQISEFSKRVILADANLDKVLSAYNKHRDKPIREQAENIIHLFTLTNLGAPAAFKYFDTTIDRKRYTSTKEVLDATLIHQSITGLYETRIDLSQLGGDGGSGSETPGTSESATPESGGTLNIEDEHRLHETSKEPDVSLGSTWLSDFPQAWAETGGMGLAVRQAPLIIPLKATSTPVSIKQYPMSQEARLGIKPHIQRLLDQGILVPCQSPWNTPLLPVKKPGTNDYRPVQDLREVNKRVEDIHPTVPNPYNLLSGLPPSHQWYTVLDLKDAFFCLRLHPTSQPLFAFEWRDPEMGISGQLTWTRLPQGFKNSPTLFNEALHRDLADFRIQHPDLILLQYVDDLLLAATSELDCQQGTRALLQTLGNLGYRASAKKAQICQKQVKYLGYLLKEGQRWLTEARKETVMGQPTPKTPRQLREFLGTAGFCRLWIPGFAEMAAPLYPLTKPGTLFNWGPDQQKAYQEIKQALLTAPALGLPDLTKPFELFVDEKQGYAKGVLTQKLGPWRRPVAYLSKKLDPVAAGWPPCLRMVAAIAVLTKDAGKLTMGQPLVILAPHAVEALVKQPPDRWLSNARMTHYQALLLDTDRVQFGPVVALNPATLLPLPEEGLQHNCLDILAEAHGTRPDLTDQPLPDADHTWYTDGSSLLQEGQRKAGAAVTTETEVIWAKALPAGTSAQRAELIALTQALKMAEGKKLNVYTDSRYAFATAHIHGEIYRRRGWLTSEGKEIKNKDEILALLKALFLPKRLSIIHCPGHQKGHSAEARGNRMADQAARKAAITETPDTSTLLAGKRTADGSEFEKRTADGSEFESPKKKAKVE

SEQ ID NO: 3011 - protein, 2091 aa, synthetic construct
MPAAKRVKLDGGDKKYSIGLDIGTNSVGWAVITDEYKVPSKKFKVLGNTDRHSIKKNLIGALLFDSGETAEATRLKRTARRRYTRRKNRICYLQEIFSNEMAKVDDSFFHRLEESFLVEEDKKHERHPIFGNIVDEVAYHEKYPTIYHLRKKLVDSTDKADLRLIYLALAHMIKFRGHFLIEGDLNPDNSDVDKLFIQLVQTYNQLFEENPINASGVDAKAILSARLSKSRRLENLIAQLPGEKKNGLFGNLIALSLGLTPNFKSNFDLAEDAKLQLSKDTYDDDLDNLLAQIGDQYADLFLAAKNLSDAILLSDILRVNTEITKAPLSASMIKRYDEHHQDLTLLKALVRQQLPEKYKEIFFDQSKNGYAGYIDGGASQEEFYKFIKPILEKMDGTEELLVKLNREDLLRKQRTFDNGSIPHQIHLGELHAILRRQEDFYPFLKDNREKIEKILTFRIPYYVGPLARGNSRFAWMTRKSEETITPWNFEEVVDKGASAQSFIERMTNFDKNLPNEKVLPKHSLLYEYFTVYNELTKVKYVTEGMRKPAFLSGEQKKAIVDLLFKTNRKVTVKQLKEDYFKKIECFDSVEISGVEDRFNASLGTYHDLLKIIKDKDFLDNEENEDILEDIVLTLTLFEDREMIEERLKTYAHLFDDKVMKQLKRRRYTGWGRLSRKLINGIRDKQSGKTILDFLKSDGFANRNFMQLIHDDSLTFKEDIQKAQVSGQGDSLHEHIANLAGSPAIKKGILQTVKVVDELVKVMGRHKPENIVIEMARENQTTQKGQKNSRERMKRIEEGIKELGSQILKEHPVENTQLQNEKLYLYYLQNGRDMYVDQELDINRLSDYDVDHIVPQSFLKDDSIDNKVLTRSDKARGKSDNVPSEEVVKKMKNYWRQLLNAKLITQRKFDNLTKAERGGLSELDKAGFIKRQLVETRQITKHVAQILDSRMNTKYDENDKLIREVKVITLKSKLVSDFRKDFQFYKVREINNYHHAHDAYLNAVVGTALIKKYPKLESEFVYGDYKVYDVRKMIAKSEQEIGKATAKYFFYSNIMNFFKTEITLANGEIRKRPLIETNGETGEIVWDKGRDFATVRKVLSMPQVNIVKKTEVQTGGFSKESILPKRNSDKLIARKKDWDPKKYGGFDSPTVAYSVLVVAKVEKGKSKKLKSVKELLGITIMERSSFEKNPIDFLEAKGYKEVKKDLIIKLPKYSLFELENGRKRMLASAGELQKGNELALPSKYVNFLYLASHYEKLKGSPEDNEQKQLFVEQHKHYLDEIIEQISEFSKRVILADANLDKVLSAYNKHRDKPIREQAENIIHLFTLTNLGAPAAFKYFDTTIDRKRYTSTKEVLDATLIHQSITGLYETRIDLSQLGGDGGGGSGSSGGTLNIEDEHRLHETSKEPDVSLGSTWLSDFPQAWAETGGMGLAVRQAPLIIPLKATSTPVSIKQYPMSQEARLGIKPHIQRLLDQGILVPCQSPWNTPLLPVKKPGTNDYRPVQDLREVNKRVEDIHPTVPNPYNLLSGLPPSHQWYTVLDLKDAFFCLRLHPTSQPLFAFEWRDPEMGISGQLTWTRLPQGFKNSPTLFNEALHRDLADFRIQHPDLILLQYVDDLLLAATSELDCQQGTRALLQTLGNLGYRASAKKAQICQKQVKYLGYLLKEGQRWLTEARKETVMGQPTPKTPRQLREFLGTAGFCRLWIPGFAEMAAPLYPLTKPGTLFNWGPDQQKAYQEIKQALLTAPALGLPDLTKPFELFVDEKQGYAKGVLTQKLGPWRRPVAYLSKKLDPVAAGWPPCLRMVAAIAVLTKDAGKLTMGQPLVILAPHAVEALVKQPPDRWLSNARMTHYQALLLDTDRVQFGPVVALNPATLLPLPEEGLQHNCLDILAEAHGTRPDLTDQPLPDADHTWYTDGSSLLQEGQRKAGAAVTTETEVIWAKALPAGTSAQRAELIALTQALKMAEGKKLNVYTDSRYAFATAHIHGEIYRRRGWLTSEGKEIKNKDEILALLKALFLPKRLSIIHCPGHQKGHSAEARGNRMADQAARKAAITETPDTSTLLAGKRTADGSEFEKRTADGSEFESPKKKAKVE

SEQ ID NO: 3012 - protein, 2096 aa, synthetic construct; identical to SEQ ID NO: 2758

SEQ ID NO: 3013 - protein, 2094 aa, synthetic construct
MPAAKRVKLDGGDKKYSIGLDIGTNSVGWAVITDEYKVPSKKFKVLGNTDRHSIKKNLIGALLFDSGETAEATRLKRTARRRYTRRKNRICYLQEIFSNEMAKVDDSFFHRLEESFLVEEDKKHERHPIFGNIVDEVAYHEKYPTIYHLRKKLVDSTDKADLRLIYLALAHMIKFRGHFLIEGDLNPDNSDVDKLFIQLVQTYNQLFEENPINASGVDAKAILSARLSKSRRLENLIAQLPGEKKNGLFGNLIALSLGLTPNFKSNFDLAEDAKLQLSKDTYDDDLDNLLAQIGDQYADLFLAAKNLSDAILLSDILRVNTEITKAPLSASMIKRYDEHHQDLTLLKALVRQQLPEKYKEIFFDQSKNGYAGYIDGGASQEEFYKFIKPILEKMDGTEELLVKLNREDLLRKQRTFDNGSIPHQIHLGELHAILRRQEDFYPFLKDNREKIEKILTFRIPYYVGPLARGNSRFAWMTRKSEETITPWNFEEVVDKGASAQSFIERMTNFDKNLPNEKVLPKHSLLYEYFTVYNELTKVKYVTEGMRKPAFLSGEQKKAIVDLLFKTNRKVTVKQLKEDYFKKIECFDSVEISGVEDRFNASLGTYHDLLKIIKDKDFLDNEENEDILEDIVLTLTLFEDREMIEERLKTYAHLFDDKVMKQLKRRRYTGWGRLSRKLINGIRDKQSGKTILDFLKSDGFANRNFMQLIHDDSLTFKEDIQKAQVSGQGDSLHEHIANLAGSPAIKKGILQTVKVVDELVKVMGRHKPENIVIEMARENQTTQKGQKNSRERMKRIEEGIKELGSQILKEHPVENTQLQNEKLYLYYLQNGRDMYVDQELDINRLSDYDVDHIVPQSFLKDDSIDNKVLTRSDKARGKSDNVPSEEVVKKMKNYWRQLLNAKLITQRKFDNLTKAERGGLSELDKAGFIKRQLVETRQITKHVAQILDSRMNTKYDENDKLIREVKVITLKSKLVSDFRKDFQFYKVREINNYHHAHDAYLNAVVGTALIKKYPKLESEFVYGDYKVYDVRKMIAKSEQEIGKATAKYFFYSNIMNFFKTEITLANGEIRKRPLIETNGETGEIVWDKGRDFATVRKVLSMPQVNIVKKTEVQTGGFSKESILPKRNSDKLIARKKDWDPKKYGGFDSPTVAYSVLVVAKVEKGKSKKLKSVKELLGITIMERSSFEKNPIDFLEAKGYKEVKKDLIIKLPKYSLFELENGRKRMLASAGELQKGNELALPSKYVNFLYLASHYEKLKGSPEDNEQKQLFVEQHKHYLDEIIEQISEFSKRVILADANLDKVLSAYNKHRDKPIREQAENIIHLFTLTNLGAPAAFKYFDTTIDRKRYTSTKEVLDATLIHQSITGLYETRIDLSQLGGDGGPAPGGSGGGGGTLNIEDEHRLHETSKEPDVSLGSTWLSDFPQAWAETGGMGLAVRQAPLIIPLKATSTPVSIKQYPMSQEARLGIKPHIQRLLDQGILVPCQSPWNTPLLPVKKPGTNDYRPVQDLREVNKRVEDIHPTVPNPYNLLSGLPPSHQWYTVLDLKDAFFCLRLHPTSQPLFAFEWRDPEMGISGQLTWTRLPQGFKNSPTLFNEALHRDLADFRIQHPDLILLQYVDDLLLAATSELDCQQGTRALLQTLGNLGYRASAKKAQICQKQVKYLGYLLKEGQRWLTEARKETVMGQPTPKTPRQLREFLGTAGFCRLWIPGFAEMAAPLYPLTKPGTLFNWGPDQQKAYQEIKQALLTAPALGLPDLTKPFELFVDEKQGYAKGVLTQKLGPWRRPVAYLSKKLDPVAAGWPPCLRMVAAIAVLTKDAGKLTMGQPLVILAPHAVEALVKQPPDRWLSNARMTHYQALLLDTDRVQFGPVVALNPATLLPLPEEGLQHNCLDILAEAHGTRPDLTDQPLPDADHTWYTDGSSLLQEGQRKAGAAVTTETEVIWAKALPAGTSAQRAELIALTQALKMAEGKKLNVYTDSRYAFATAHIHGEIYRRRGWLTSEGKEIKNKDEILALLKALFLPKRLSIIHCPGHQKGHSAEARGNRMADQAARKAAITETPDTSTLLAGKRTADGSEFEKRTADGSEFESPKKKAKVE

SEQ ID NO: 3014 - protein, 2096 aa, synthetic construct; identical to SEQ ID NO: 2714

SEQ ID NO: 3015 - protein, 2093 aa, synthetic construct; identical to SEQ ID NO: 2718

SEQ ID NO: 3016 - protein, 2094 aa, synthetic construct; identical to SEQ ID NO: 2762

SEQ ID NO: 3017 - protein, 2095 aa, synthetic construct; identical to SEQ ID NO: 2749

SEQ ID NO: 3018 - protein, 2096 aa, synthetic construct; identical to SEQ ID NO: 2721

SEQ ID NO: 3019 - protein, 2096 aa, synthetic construct; identical to SEQ ID NO: 2747

SEQ ID NO: 3020 - protein, 2096 aa, synthetic construct; identical to SEQ ID NO: 2755

SEQ ID NO: 3021 - protein, 2096 aa, synthetic construct
MPAAKRVKLDGGDKKYSIGLDIGTNSVGWAVITDEYKVPSKKFKVLGNTDRHSIKKNLIGALLFDSGETAEATRLKRTARRRYTRRKNRICYLQEIFSNEMAKVDDSFFHRLEESFLVEEDKKHERHPIFGNIVDEVAYHEKYPTIYHLRKKLVDSTDKADLRLIYLALAHMIKFRGHFLIEGDLNPDNSDVDKLFIQLVQTYNQLFEENPINASGVDAKAILSARLSKSRRLENLIAQLPGEKKNGLFGNLIALSLGLTPNFKSNFDLAEDAKLQLSKDTYDDDLDNLLAQIGDQYADLFLAAKNLSDAILLSDILRVNTEITKAPLSASMIKRYDEHHQDLTLLKALVRQQLPEKYKEIFFDQSKNGYAGYIDGGASQEEFYKFIKPILEKMDGTEELLVKLNREDLLRKQRTFDNGSIPHQIHLGELHAILRRQEDFYPFLKDNREKIEKILTFRIPYYVGPLARGNSRFAWMTRKSEETITPWNFEEVVDKGASAQSFIERMTNFDKNLPNEKVLPKHSLLYEYFTVYNELTKVKYVTEGMRKPAFLSGEQKKAIVDLLFKTNRKVTVKQLKEDYFKKIECFDSVEISGVEDRFNASLGTYHDLLKIIKDKDFLDNEENEDILEDIVLTLTLFEDREMIEERLKTYAHLFDDKVMKQLKRRRYTGWGRLSRKLINGIRDKQSGKTILDFLKSDGFANRNFMQLIHDDSLTFKEDIQKAQVSGQGDSLHEHIANLAGSPAIKKGILQTVKVVDELVKVMGRHKPENIVIEMARENQTTQKGQKNSRERMKRIEEGIKELGSQILKEHPVENTQLQNEKLYLYYLQNGRDMYVDQELDINRLSDYDVDHIVPQSFLKDDSIDNKVLTRSDKARGKSDNVPSEEVVKKMKNYWRQLLNAKLITQRKFDNLTKAERGGLSELDKAGFIKRQLVETRQITKHVAQILDSRMNTKYDENDKLIREVKVITLKSKLVSDFRKDFQFYKVREINNYHHAHDAYLNAVVGTALIKKYPKLESEFVYGDYKVYDVRKMIAKSEQEIGKATAKYFFYSNIMNFFKTEITLANGEIRKRPLIETNGETGEIVWDKGRDFATVRKVLSMPQVNIVKKTEVQTGGFSKESILPKRNSDKLIARKKDWDPKKYGGFDSPTVAYSVLVVAKVEKGKSKKLKSVKELLGITIMERSSFEKNPIDFLEAKGYKEVKKDLIIKLPKYSLFELENGRKRMLASAGELQKGNELALPSKYVNFLYLASHYEKLKGSPEDNEQKQLFVEQHKHYLDEIIEQISEFSKRVILADANLDKVLSAYNKHRDKPIREQAENIIHLFTLTNLGAPAAFKYFDTTIDRKRYTSTKEVLDATLIHQSITGLYETRIDLSQLGGDGGEAAAKGSSGGSGGTLNIEDEHRLHETSKEPDVSLGSTWLSDFPQAWAETGGMGLAVRQAPLIIPLKATSTPVSIKQYPMSQEARLGIKPHIQRLLDQGILVPCQSPWNTPLLPVKKPGTNDYRPVQDLREVNKRVEDIHPTVPNPYNLLSGLPPSHQWYTVLDLKDAFFCLRLHPTSQPLFAFEWRDPEMGISGQLTWTRLPQGFKNSPTLFNEALHRDLADFRIQHPDLILLQYVDDLLLAATSELDCQQGTRALLQTLGNLGYRASAKKAQICQKQVKYLGYLLKEGQRWLTEARKETVMGQPTPKTPRQLREFLGTAGFCRLWIPGFAEMAAPLYPLTKPGTLFNWGPDQQKAYQEIKQALLTAPALGLPDLTKPFELFVDEKQGYAKGVLTQKLGPWRRPVAYLSKKLDPVAAGWPPCLRMVAAIAVLTKDAGKLTMGQPLVILAPHAVEALVKQPPDRWLSNARMTHYQALLLDTDRVQFGPVVALNPATLLPLPEEGLQHNCLDILAEAHGTRPDLTDQPLPDADHTWYTDGSSLLQEGQRKAGAAVTTETEVIWAKALPAGTSAQRAELIALTQALKMAEGKKLNVYTDSRYAFATAHIHGEIYRRRGWLTSEGKEIKNKDEILALLKALFLPKRLSIIHCPGHQKGHSAEARGNRMADQAARKAAITETPDTSTLLAGKRTADGSEFEKRTADGSEFESPKKKAKVE

SEQ ID NO: 3022 - protein, 2094 aa, synthetic construct
MPAAKRVKLDGGDKKYSIGLDIGTNSVGWAVITDEYKVPSKKFKVLGNTDRHSIKKNLIGALLFDSGETAEATRLKRTARRRYTRRKNRICYLQEIFSNEMAKVDDSFFHRLEESFLVEEDKKHERHPIFGNIVDEVAYHEKYPTIYHLRKKLVDSTDKADLRLIYLALAHMIKFRGHFLIEGDLNPDNSDVDKLFIQLVQTYNQLFEENPINASGVDAKAILSARLSKSRRLENLIAQLPGEKKNGLFGNLIALSLGLTPNFKSNFDLAEDAKLQLSKDTYDDDLDNLLAQIGDQYADLFLAAKNLSDAILLSDILRVNTEITKAPLSASMIKRYDEHHQDLTLLKALVRQQLPEKYKEIFFDQSKNGYAGYIDGGASQEEFYKFIKPILEKMDGTEELLVKLNREDLLRKQRTFDNGSIPHQIHLGELHAILRRQEDFYPFLKDNREKIEKILTFRIPYYVGPLARGNSRFAWMTRKSEETITPWNFEEVVDKGASAQSFIERMTNFDKNLPNEKVLPKHSLLYEYFTVYNELTKVKYVTEGMRKPAFLSGEQKKAIVDLLFKTNRKVTVKQLKEDYFKKIECFDSVEISGVEDRFNASLGTYHDLLKIIKDKDFLDNEENEDILEDIVLTLTLFEDREMIEERLKTYAHLFDDKVMKQLKRRRYTGWGRLSRKLINGIRDKQSGKTILDFLKSDGFANRNFMQLIHDDSLTFKEDIQKAQVSGQGDSLHEHIANLAGSPAIKKGILQTVKVVDELVKVMGRHKPENIVIEMARENQTTQKGQKNSRERMKRIEEGIKELGSQILKEHPVENTQLQNEKLYLYYLQNGRDMYVDQELDINRLSDYDVDHIVPQSFLKDDSIDNKVLTRSDKARGKSDNVPSEEVVKKMKNYWRQLLNAKLITQRKFDNLTKAERGGLSELDKAGFIKRQLVETRQITKHVAQILDSRMNTKYDENDKLIREVKVITLKSKLVSDFRKDFQFYKVREINNYHHAHDAYLNAVVGTALIKKYPKLESEFVYGDYKVYDVRKMIAKSEQEIGKATAKYFFYSNIMNFFKTEITLANGEIRKRPLIETNGETGEIVWDKGRDFATVRKVLSMPQVNIVKKTEVQTGGFSKESILPKRNSDKLIARKKDWDPKKYGGFDSPTVAYSVLVVAKVEKGKSKKLKSVKELLGITIMERSSFEKNPIDFLEAKGYKEVKKDLIIKLPKYSLFELENGRKRMLASAGELQKGNELALPSKYVNFLYLASHYEKLKGSPEDNEQKQLFVEQHKHYLDEIIEQISEFSKRVILADANLDKVLSAYNKHRDKPIREQAENIIHLFTLTNLGAPAAFKYFDTTIDRKRYTSTKEVLDATLIHQSITGLYETRIDLSQLGGDGGGGGGSSGGSGGTLNIEDEHRLHETSKEPDVSLGSTWLSDFPQAWAETGGMGLAVRQAPLIIPLKATSTPVSIKQYPMSQEARLGIKPHIQRLLDQGILVPCQSPWNTPLLPVKKPGTNDYRPVQDLREVNKRVEDIHPTVPNPYNLLSGLPPSHQWYTVLDLKDAFFCLRLHPTSQPLFAFEWRDPEMGISGQLTWTRLPQGFKNSPTLFNEALHRDLADFRIQHPDLILLQYVDDLLLAATSELDCQQGTRALLQTLGNLGYRASAKKAQICQKQVKYLGYLLKEGQRWLTEARKETVMGQPTPKTPRQLREFLGTAGFCRLWIPGFAEMAAPLYPLTKPGTLFNWGPDQQKAYQEIKQALLTAPALGLPDLTKPFELFVDEKQGYAKGVLTQKLGPWRRPVAYLSKKLDPVAAGWPPCLRMVAAIAVLTKDAGKLTMGQPLVILAPHAVEALVKQPPDRWLSNARMTHYQALLLDTDRVQFGPVVALNPATLLPLPEEGLQHNCLDILAEAHGTRPDLTDQPLPDADHTWYTDGSSLLQEGQRKAGAAVTTETEVIWAKALPAGTSAQRAELIALTQALKMAEGKKLNVYTDSRYAFATAHIHGEIYRRRGWLTSEGKEIKNKDEILALLKALFLPKRLSIIHCPGHQKGHSAEARGNRMADQAARKAAITETPDTSTLLAGKRTADGSEFEKRTADGSEFESPKKKAKVE

SEQ ID NO: 3023 - protein, 2096 aa, synthetic construct; identical to SEQ ID NO: 2759

SEQ ID NO: 3024 - protein, 2092 aa, synthetic construct
MPAAKRVKLDGGDKKYSIGLDIGTNSVGWAVITDEYKVPSKKFKVLGNTDRHSIKKNLIGALLFDSGETAEATRLKRTARRRYTRRKNRICYLQEIFSNEMAKVDDSFFHRLEESFLVEEDKKHERHPIFGNIVDEVAYHEKYPTIYHLRKKLVDSTDKADLRLIYLALAHMIKFRGHFLIEGDLNPDNSDVDKLFIQLVQTYNQLFEENPINASGVDAKAILSARLSKSRRLENLIAQLPGEKKNGLFGNLIALSLGLTPNFKSNFDLAEDAKLQLSKDTYDDDLDNLLAQIGDQYADLFLAAKNLSDAILLSDILRVNTEITKAPLSASMIKRYDEHHQDLTLLKALVRQQLPEKYKEIFFDQSKNGYAGYIDGGASQEEFYKFIKPILEKMDGTEELLVKLNREDLLRKQRTFDNGSIPHQIHLGELHAILRRQEDFYPFLKDNREKIEKILTFRIPYYVGPLARGNSRFAWMTRKSEETITPWNFEEVVDKGASAQSFIERMTNFDKNLPNEKVLPKHSLLYEYFTVYNELTKVKYVTEGMRKPAFLSGEQKKAIVDLLFKTNRKVTVKQLKEDYFKKIECFDSVEISGVEDRFNASLGTYHDLLKIIKDKDFLDNEENEDILEDIVLTLTLFEDREMIEERLKTYAHLFDDKVMKQLKRRRYTGWGRLSRKLINGIRDKQSGKTILDFLKSDGFANRNFMQLIHDDSLTFKEDIQKAQVSGQGDSLHEHIANLAGSPAIKKGILQTVKVVDELVKVMGRHKPENIVIEMARENQTTQKGQKNSRERMKRIEEGIKELGSQILKEHPVENTQLQNEKLYLYYLQNGRDMYVDQELDINRLSDYDVDHIVPQSFLKDDSIDNKVLTRSDKARGKSDNVPSEEVVKKMKNYWRQLLNAKLITQRKFDNLTKAERGGLSELDKAGFIKRQLVETRQITKHVAQILDSRMNTKYDENDKLIREVKVITLKSKLVSDFRKDFQFYKVREINNYHHAHDAYLNAVVGTALIKKYPKLESEFVYGDYKVYDVRKMIAKSEQEIGKATAKYFFYSNIMNFFKTEITLANGEIRKRPLIETNGETGEIVWDKGRDFATVRKVLSMPQVNIVKKTEVQTGGFSKESILPKRNSDKLIARKKDWDPKKYGGFDSPTVAYSVLVVAKVEKGKSKKLKSVKELLGITIMERSSFEKNPIDFLEAKGYKEVKKDLIIKLPKYSLFELENGRKRMLASAGELQKGNELALPSKYVNFLYLASHYEKLKGSPEDNEQKQLFVEQHKHYLDEIIEQISEFSKRVILADANLDKVLSAYNKHRDKPIREQAENIIHLFTLTNLGAPAAFKYFDTTIDRKRYTSTKEVLDATLIHQSITGLYETRIDLSQLGGDGGGGGGGGGGGTLNIEDEHRLHETSKEPDVSLGSTWLSDFPQAWAETGGMGLAVRQAPLIIPLKATSTPVSIKQYPMSQEARLGIKPHIQRLLDQGILVPCQSPWNTPLLPVKKPGTNDYRPVQDLREVNKRVEDIHPTVPNPYNLLSGLPPSHQWYTVLDLKDAFFCLRLHPTSQPLFAFEWRDPEMGISGQLTWTRLPQGFKNSPTLFNEALHRDLADFRIQHPDLILLQYVDDLLLAATSELDCQQGTRALLQTLGNLGYRASAKKAQICQKQVKYLGYLLKEGQRWLTEARKETVMGQPTPKTPRQLREFLGTAGFCRLWIPGFAEMAAPLYPLTKPGTLFNWGPDQQKAYQEIKQALLTAPALGLPDLTKPFELFVDEKQGYAKGVLTQKLGPWRRPVAYLSKKLDPVAAGWPPCLRMVAAIAVLTKDAGKLTMGQPLVILAPHAVEALVKQPPDRWLSNARMTHYQALLLDTDRVQFGPVVALNPATLLPLPEEGLQHNCLDILAEAHGTRPDLTDQPLPDADHTWYTDGSSLLQEGQRKAGAAVTTETEVIWAKALPAGTSAQRAELIALTQALKMAEGKKLNVYTDSRYAFATAHIHGEIYRRRGWLTSEGKEIKNKDEILALLKALFLPKRLSIIHCPGHQKGHSAEARGNRMADQAARKAAITETPDTSTLLAGKRTADGSEFEKRTADGSEFESPKKKAKVE

SEQ ID NO: 3025 - protein, 2094 aa, synthetic construct; identical to SEQ ID NO: 2742

SEQ ID NO: 3026 - protein, 2094 aa, synthetic construct; identical to SEQ ID NO: 2715

SEQ ID NO: 3027 - protein, 2097 aa, synthetic construct; identical to SEQ ID NO: 2728

SEQ ID NO: 3028 - protein, 2091 aa, synthetic construct; identical to SEQ ID NO: 2743

SEQ ID NO: 3029 - protein, 2090 aa, synthetic construct
MPAAKRVKLDGGDKKYSIGLDIGTNSVGWAVITDEYKVPSKKFKVLGNTDRHSIKKNLIGALLFDSGETAEATRLKRTARRRYTRRKNRICYLQEIFSNEMAKVDDSFFHRLEESFLVEEDKKHERHPIFGNIVDEVAYHEKYPTIYHLRKKLVDSTDKADLRLIYLALAHMIKFRGHFLIEGDLNPDNSDVDKLFIQLVQTYNQLFEENPINASGVDAKAILSARLSKSRRLENLIAQLPGEKKNGLFGNLIALSLGLTPNFKSNFDLAEDAKLQLSKDTYDDDLDNLLAQIGDQYADLFLAAKNLSDAILLSDILRVNTEITKAPLSASMIKRYDEHHQDLTLLKALVRQQLPEKYKEIFFDQSKNGYAGYIDGGASQEEFYKFIKPILEKMDGTEELLVKLNREDLLRKQRTFDNGSIPHQIHLGELHAILRRQEDFYPFLKDNREKIEKILTFRIPYYVGPLARGNSRFAWMTRKSEETITPWNFEEVVDKGASAQSFIERMTNFDKNLPNEKVLPKHSLLYEYFTVYNELTKVKYVTEGMRKPAFLSGEQKKAIVDLLFKTNRKVTVKQLKEDYFKKIECFDSVEISGVEDRFNASLGTYHDLLKIIKDKDFLDNEENEDILEDIVLTLTLFEDREMIEERLKTYAHLFDDKVMKQLKRRRYTGWGRLSRKLINGIRDKQSGKTILDFLKSDGFANRNFMQLIHDDSLTFKEDIQKAQVSGQGDSLHEHIANLAGSPAIKKGILQTVKVVDELVKVMGRHKPENIVIEMARENQTTQKGQKNSRERMKRIEEGIKELGSQILKEHPVENTQLQNEKLYLYYLQNGRDMYVDQELDINRLSDYDVDHIVPQSFLKDDSIDNKVLTRSDKARGKSDNVPSEEVVKKMKNYWRQLLNAKLITQRKFDNLTKAERGGLSELDKAGFIKRQLVETRQITKHVAQILDSRMNTKYDENDKLIREVKVITLKSKLVSDFRKDFQFYKVREINNYHHAHDAYLNAVVGTALIKKYPKLESEFVYGDYKVYDVRKMIAKSEQEIGKATAKYFFYSNIMNFFKTEITLANGEIRKRPLIETNGETGEIVWDKGRDFATVRKVLSMPQVNIVKKTEVQTGGFSKESILPKRNSDKLIARKKDWDPKKYGGFDSPTVAYSVLVVAKVEKGKSKKLKSVKELLGITIMERSSFEKNPIDFLEAKGYKEVKKDLIIKLPKYSLFELENGRKRMLASAGELQKGNELALPSKYVNFLYLASHYEKLKGSPEDNEQKQLFVEQHKHYLDEIIEQISEFSKRVILADANLDKVLSAYNKHRDKPIREQAENIIHLFTLTNLGAPAAFKYFDTTIDRKRYTSTKEVLDATLIHQSITGLYETRIDLSQLGGDGGPAPAPGGTLNIEDEHRLHETSKEPDVSLGSTWLSDFPQAWAETGGMGLAVRQAPLIIPLKATSTPVSIKQYPMSQEARLGIKPHIQRLLDQGILVPCQSPWNTPLLPVKKPGTNDYRPVQDLREVNKRVEDIHPTVPNPYNLLSGLPPSHQWYTVLDLKDAFFCLRLHPTSQPLFAFEWRDPEMGISGQLTWTRLPQGFKNSPTLFNEALHRDLADFRIQHPDLILLQYVDDLLLAATSELDCQQGTRALLQTLGNLGYRASAKKAQICQKQVKYLGYLLKEGQRWLTEARKETVMGQPTPKTPRQLREFLGTAGFCRLWIPGFAEMAAPLYPLTKPGTLFNWGPDQQKAYQEIKQALLTAPALGLPDLTKPFELFVDEKQGYAKGVLTQKLGPWRRPVAYLSKKLDPVAAGWPPCLRMVAAIAVLTKDAGKLTMGQPLVILAPHAVEALVKQPPDRWLSNARMTHYQALLLDTDRVQFGPVVALNPATLLPLPEEGLQHNCLDILAEAHGTRPDLTDQPLPDADHTWYTDGSSLLQEGQRKAGAAVTTETEVIWAKALPAGTSAQRAELIALTQALKMAEGKKLNVYTDSRYAFATAHIHGEIYRRRGWLTSEGKEIKNKDEILALLKALFLPKRLSIIHCPGHQKGHSAEARGNRMADQAARKAAITETPDTSTLLAGKRTADGSEFEKRTADGSEFESPKKKAKVE

SEQ ID NO: 3030 - protein, 2091 aa, synthetic construct; identical to SEQ ID NO: 2750

SEQ ID NO: 3031 - protein, 2094 aa, synthetic construct; identical to SEQ ID NO: 2768

SEQ ID NO: 3032 - protein, 2094 aa, synthetic construct; identical to SEQ ID NO: 2770

SEQ ID NO: 3033 - protein, 2091 aa, synthetic construct; identical to SEQ ID NO: 2779

SEQ ID NO: 3034 - protein, 2093 aa, synthetic construct; identical to SEQ ID NO: 2774

SEQ ID NO: 3035 - protein, 2103 aa, synthetic construct
MPAAKRVKLDGGDKKYSIGLDIGTNSVGWAVITDEYKVPSKKFKVLGNTDRHSIKKNLIGALLFDSGETAEATRLKRTARRRYTRRKNRICYLQEIFSNEMAKVDDSFFHRLEESFLVEEDKKHERHPIFGNIVDEVAYHEKYPTIYHLRKKLVDSTDKADLRLIYLALAHMIKFRGHFLIEGDLNPDNSDVDKLFIQLVQTYNQLFEENPINASGVDAKAILSARLSKSRRLENLIAQLPGEKKNGLFGNLIALSLGLTPNFKSNFDLAEDAKLQLSKDTYDDDLDNLLAQIGDQYADLFLAAKNLSDAILLSDILRVNTEITKAPLSASMIKRYDEHHQDLTLLKALVRQQLPEKYKEIFFDQSKNGYAGYIDGGASQEEFYKFIKPILEKMDGTEELLVKLNREDLLRKQRTFDNGSIPHQIHLGELHAILRRQEDFYPFLKDNREKIEKILTFRIPYYVGPLARGNSRFAWMTRKSEETITPWNFEEVVDKGASAQSFIERMTNFDKNLPNEKVLPKHSLLYEYFTVYNELTKVKYVTEGMRKPAFLSGEQKKAIVDLLFKTNRKVTVKQLKEDYFKKIECFDSVEISGVEDRFNASLGTYHDLLKIIKDKDFLDNEENEDILEDIVLTLTLFEDREMIEERLKTYAHLFDDKVMKQLKRRRYTGWGRLSRKLINGIRDKQSGKTILDFLKSDGFANRNFMQLIHDDSLTFKEDIQKAQVSGQGDSLHEHIANLAGSPAIKKGILQTVKVVDELVKVMGRHKPENIVIEMARENQTTQKGQKNSRERMKRIEEGIKELGSQILKEHPVENTQLQNEKLYLYYLQNGRDMYVDQELDINRLSDYDVDHIVPQSFLKDDSIDNKVLTRSDKARGKSDNVPSEEVVKKMKNYWRQLLNAKLITQRKFDNLTKAERGGLSELDKAGFIKRQLVETRQITKHVAQILDSRMNTKYDENDKLIREVKVITLKSKLVSDFRKDFQFYKVREINNYHHAHDAYLNAVVGTALIKKYPKLESEFVYGDYKVYDVRKMIAKSEQEIGKATAKYFFYSNIMNFFKTEITLANGEIRKRPLIETNGETGEIVWDKGRDFATVRKVLSMPQVNIVKKTEVQTGGFSKESILPKRNSDKLIARKKDWDPKKYGGFDSPTVAYSVLVVAKVEKGKSKKLKSVKELLGITIMERSSFEKNPIDFLEAKGYKEVKKDLIIKLPKYSLFELENGRKRMLASAGELQKGNELALPSKYVNFLYLASHYEKLKGSPEDNEQKQLFVEQHKHYLDEIIEQISEFSKRVILADANLDKVLSAYNKHRDKPIREQAENIIHLFTLTNLGAPAAFKYFDTTIDRKRYTSTKEVLDATLIHQSITGLYETRIDLSQLGGDGGGGSGGSGGSGGSGGSGGSGGTLNIEDEHRLHETSKEPDVSLGSTWLSDFPQAWAETGGMGLAVRQAPLIIPLKATSTPVSIKQYPMSQEARLGIKPHIQRLLDQGILVPCQSPWNTPLLPVKKPGTNDYRPVQDLREVNKRVEDIHPTVPNPYNLLSGLPPSHQWYTVLDLKDAFFCLRLHPTSQPLFAFEWRDPEMGISGQLTWTRLPQGFKNSPTLFNEALHRDLADFRIQHPDLILLQYVDDLLLAATSELDCQQGTRALLQTLGNLGYRASAKKAQICQKQVKYLGYLLKEGQRWLTEARKETVMGQPTPKTPRQLREFLGKAGFCRLFIPGFAEMAAPLYPLTKPGTLFNWGPDQQKAYQEIKQALLTAPALGLPDLTKPFELFVDEKQGYAKGVLTQKLGPWRRPVAYLSKKLDPVAAGWPPCLRMVAAIAVLTKDAGKLTMGQPLVILAPHAVEALVKQPPDRWLSNARMTHYQALLLDTDRVQFGPVVALNPATLLPLPEEGLQHNCLDILAEAHGTRPDLTDQPLPDADHTWYTDGSSLLQEGQRKAGAAVTTETEVIWAKALPAGTSAQRAELIALTQALKMAEGKKLNVYTDSRYAFATAHIHGEIYRRRGWLTSEGKEIKNKDEILALLKALFLPKRLSIIHCPGHQKGHSAEARGNRMADQAARKAAITETPDTSTLLAGKRTADGSEFEKRTADGSEFESPKKKAKVE

SEQ ID NO: 3036 - protein, 2105 aa, synthetic construct; identical to SEQ ID NO: 2844

SEQ ID NO: 3037 - protein, 2088 aa, synthetic construct; identical to SEQ ID NO: 2812

SEQ ID NO: 3038 - protein, 2103 aa, synthetic construct; identical to SEQ ID NO: 2816

SEQ ID NO: 3039 - protein, 2097 aa, synthetic construct; identical to SEQ ID NO: 2795

SEQ ID NO: 3040 - protein, 2096 aa, synthetic construct; identical to SEQ ID NO: 2831

SEQ ID NO: 3041 - protein, 2095 aa, synthetic construct; identical to SEQ ID NO: 2845

SEQ ID NO: 3042 - protein, 2094 aa, synthetic construct; identical to SEQ ID NO: 2818

SEQ ID NO: 3043 - protein, 2110 aa, synthetic construct; identical to SEQ ID NO: 2803

SEQ ID NO: 3044 - protein, 2091 aa, synthetic construct
MPAAKRVKLDGGDKKYSIGLDIGTNSVGWAVITDEYKVPSKKFKVLGNTDRHSIKKNLIGALLFDSGETAEATRLKRTARRRYTRRKNRICYLQEIFSNEMAKVDDSFFHRLEESFLVEEDKKHERHPIFGNIVDEVAYHEKYPTIYHLRKKLVDSTDKADLRLIYLALAHMIKFRGHFLIEGDLNPDNSDVDKLFIQLVQTYNQLFEENPINASGVDAKAILSARLSKSRRLENLIAQLPGEKKNGLFGNLIALSLGLTPNFKSNFDLAEDAKLQLSKDTYDDDLDNLLAQIGDQYADLFLAAKNLSDAILLSDILRVNTEITKAPLSASMIKRYDEHHQDLTLLKALVRQQLPEKYKEIFFDQSKNGYAGYIDGGASQEEFYKFIKPILEKMDGTEELLVKLNREDLLRKQRTFDNGSIPHQIHLGELHAILRRQEDFYPFLKDNREKIEKILTFRIPYYVGPLARGNSRFAWMTRKSEETITPWNFEEVVDKGASAQSFIERMTNFDKNLPNEKVLPKHSLLYEYFTVYNELTKVKYVTEGMRKPAFLSGEQKKAIVDLLFKTNRKVTVKQLKEDYFKKIECFDSVEISGVEDRFNASLGTYHDLLKIIKDKDFLDNEENEDILEDIVLTLTLFEDREMIEERLKTYAHLFDDKVMKQLKRRRYTGWGRLSRKLINGIRDKQSGKTILDFLKSDGFANRNFMQLIHDDSLTFKEDIQKAQVSGQGDSLHEHIANLAGSPAIKKGILQTVKVVDELVKVMGRHKPENIVIEMARENQTTQKGQKNSRERMKRIEEGIKELGSQILKEHPVENTQLQNEKLYLYYLQNGRDMYVDQELDINRLSDYDVDHIVPQSFLKDDSIDNKVLTRSDKARGKSDNVPSEEVVKKMKNYWRQLLNAKLITQRKFDNLTKAERGGLSELDKAGFIKRQLVETRQITKHVAQILDSRMNTKYDENDKLIREVKVITLKSKLVSDFRKDFQFYKVREINNYHHAHDAYLNAVVGTALIKKYPKLESEFVYGDYKVYDVRKMIAKSEQEIGKATAKYFFYSNIMNFFKTEITLANGEIRKRPLIETNGETGEIVWDKGRDFATVRKVLSMPQVNIVKKTEVQTGGFSKESILPKRNSDKLIARKKDWDPKKYGGFDSPTVAYSVLVVAKVEKGKSKKLKSVKELLGITIMERSSFEKNPIDFLEAKGYKEVKKDLIIKLPKYSLFELENGRKRMLASAGELQKGNELALPSKYVNFLYLASHYEKLKGSPEDNEQKQLFVEQHKHYLDEIIEQISEFSKRVILADANLDKVLSAYNKHRDKPIREQAENIIHLFTLTNLGAPAAFKYFDTTIDRKRYTSTKEVLDATLIHQSITGLYETRIDLSQLGGDGGGGGGGGGGTLNIEDEHRLHETSKEPDVSLGSTWLSDFPQAWAETGGMGLAVRQAPLIIPLKATSTPVSIKQYPMSQEARLGIKPHIQRLLDQGILVPCQSPWNTPLLPVKKPGTNDYRPVQDLREVNKRVEDIHPTVPNPYNLLSGLPPSHQWYTVLDLKDAFFCLRLHPTSQPLFAFEWRDPEMGISGQLTWTRLPQGFKNSPTLFNEALHRDLADFRIQHPDLILLQYVDDLLLAATSELDCQQGTRALLQTLGNLGYRASAKKAQICQKQVKYLGYLLKEGQRWLTEARKETVMGQPTPKTPRQLREFLGKAGFCRLFIPGFAEMAAPLYPLTKPGTLFNWGPDQQKAYQEIKQALLTAPALGLPDLTKPFELFVDEKQGYAKGVLTQKLGPWRRPVAYLSKKLDPVAAGWPPCLRMVAAIAVLTKDAGKLTMGQPLVILAPHAVEALVKQPPDRWLSNARMTHYQALLLDTDRVQFGPVVALNPATLLPLPEEGLQHNCLDILAEAHGTRPDLTDQPLPDADHTWYTDGSSLLQEGQRKAGAAVTTETEVIWAKALPAGTSAQRAELIALTQALKMAEGKKLNVYTDSRYAFATAHIHGEIYRRRGWLTSEGKEIKNKDEILALLKALFLPKRLSIIHCPGHQKGHSAEARGNRMADQAARKAAITETPDTSTLLAGKRTADGSEFEKRTADGSEFESPKKKAKVE

SEQ ID NO: 3045 - protein, 2096 aa, synthetic construct
MPAAKRVKLDGGDKKYSIGLDIGTNSVGWAVITDEYKVPSKKFKVLGNTDRHSIKKNLIGALLFDSGETAEATRLKRTARRRYTRRKNRICYLQEIFSNEMAKVDDSFFHRLEESFLVEEDKKHERHPIFGNIVDEVAYHEKYPTIYHLRKKLVDSTDKADLRLIYLALAHMIKFRGHFLIEGDLNPDNSDVDKLFIQLVQTYNQLFEENPINASGVDAKAILSARLSKSRRLENLIAQLPGEKKNGLFGNLIALSLGLTPNFKSNFDLAEDAKLQLSKDTYDDDLDNLLAQIGDQYADLFLAAKNLSDAILLSDILRVNTEITKAPLSASMIKRYDEHHQDLTLLKALVRQQLPEKYKEIFFDQSKNGYAGYIDGGASQEEFYKFIKPILEKMDGTEELLVKLNREDLLRKQRTFDNGSIPHQIHLGELHAILRRQEDFYPFLKDNREKIEKILTFRIPYYVGPLARGNSRFAWMTRKSEETITPWNFEEVVDKGASAQSFIERMTNFDKNLPNEKVLPKHSLLYEYFTVYNELTKVKYVTEGMRKPAFLSGEQKKAIVDLLFKTNRKVTVKQLKEDYFKKIECFDSVEISGVEDRFNASLGTYHDLLKIIKDKDFLDNEENEDILEDIVLTLTLFEDREMIEERLKTYAHLFDDKVMKQLKRRRYTGWGRLSRKLINGIRDKQSGKTILDFLKSDGFANRNFMQLIHDDSLTFKEDIQKAQVSGQGDSLHEHIANLAGSPAIKKGILQTVKVVDELVKVMGRHKPENIVIEMARENQTTQKGQKNSRERMKRIEEGIKELGSQILKEHPVENTQLQNEKLYLYYLQNGRDMYVDQELDINRLSDYDVDHIVPQSFLKDDSIDNKVLTRSDKARGKSDNVPSEEVVKKMKNYWRQLLNAKLITQRKFDNLTKAERGGLSELDKAGFIKRQLVETRQITKHVAQILDSRMNTKYDENDKLIREVKVITLKSKLVSDFRKDFQFYKVREINNYHHAHDAYLNAVVGTALIKKYPKLESEFVYGDYKVYDVRKMIAKSEQEIGKATAKYFFYSNIMNFFKTEITLANGEIRKRPLIETNGETGEIVWDKGRDFATVRKVLSMPQVNIVKKTEVQTGGFSKESILPKRNSDKLIARKKDWDPKKYGGFDSPTVAYSVLVVAKVEKGKSKKLKSVKELLGITIMERSSFEKNPIDFLEAKGYKEVKKDLIIKLPKYSLFELENGRKRMLASAGELQKGNELALPSKYVNFLYLASHYEKLKGSPEDNEQKQLFVEQHKHYLDEIIEQISEFSKRVILADANLDKVLSAYNKHRDKPIREQAENIIHLFTLTNLGAPAAFKYFDTTIDRKRYTSTKEVLDATLIHQSITGLYETRIDLSQLGGDGGGGGEAAAKGGSGGTLNIEDEHRLHETSKEPDVSLGSTWLSDFPQAWAETGGMGLAVRQAPLIIPLKATSTPVSIKQYPMSQEARLGIKPHIQRLLDQGILVPCQSPWNTPLLPVKKPGTNDYRPVQDLREVNKRVEDIHPTVPNPYNLLSGLPPSHQWYTVLDLKDAFFCLRLHPTSQPLFAFEWRDPEMGISGQLTWTRLPQGFKNSPTLFNEALHRDLADFRIQHPDLILLQYVDDLLLAATSELDCQQGTRALLQTLGNLGYRASAKKAQICQKQVKYLGYLLKEGQRWLTEARKETVMGQPTPKTPRQLREFLGKAGFCRLFIPGFAEMAAPLYPLTKPGTLFNWGPDQQKAYQEIKQALLTAPALGLPDLTKPFELFVDEKQGYAKGVLTQKLGPWRRPVAYLSKKLDPVAAGWPPCLRMVAAIAVLTKDAGKLTMGQPLVILAPHAVEALVKQPPDRWLSNARMTHYQALLLDTDRVQFGPVVALNPATLLPLPEEGLQHNCLDILAEAHGTRPDLTDQPLPDADHTWYTDGSSLLQEGQRKAGAAVTTETEVIWAKALPAGTSAQRAELIALTQALKMAEGKKLNVYTDSRYAFATAHIHGEIYRRRGWLTSEGKEIKNKDEILALLKALFLPKRLSIIHCPGHQKGHSAEARGNRMADQAARKAAITETPDTSTLLAGKRTADGSEFEKRTADGSEFESPKKKAKVE

SEQ ID NO: 3046 - protein, 2096 aa, synthetic construct; identical to SEQ ID NO: 2829

SEQ ID NO: 3047 - protein, 2094 aa, synthetic construct
MPAAKRVKLDGGDKKYSIGLDIGTNSVGWAVITDEYKVPSKKFKVLGNTDRHSIKKNLIGALLFDSGETAEATRLKRTARRRYTRRKNRICYLQEIFSNEMAKVDDSFFHRLEESFLVEEDKKHERHPIFGNIVDEVAYHEKYPTIYHLRKKLVDSTDKADLRLIYLALAHMIKFRGHFLIEGDLNPDNSDVDKLFIQLVQTYNQLFEENPINASGVDAKAILSARLSKSRRLENLIAQLPGEKKNGLFGNLIALSLGLTPNFKSNFDLAEDAKLQLSKDTYDDDLDNLLAQIGDQYADLFLAAKNLSDAILLSDILRVNTEITKAPLSASMIKRYDEHHQDLTLLKALVRQQLPEKYKEIFFDQSKNGYAGYIDGGASQEEFYKFIKPILEKMDGTEELLVKLNREDLLRKQRTFDNGSIPHQIHLGELHAILRRQEDFYPFLKDNREKIEKILTFRIPYYVGPLARGNSRFAWMTRKSEETITPWNFEEVVDKGASAQSFIERMTNFDKNLPNEKVLPKHSLLYEYFTVYNELTKVKYVTEGMRKPAFLSGEQKKAIVDLLFKTNRKVTVKQLKEDYFKKIECFDSVEISGVEDRFNASLGTYHDLLKIIKDKDFLDNEENEDILEDIVLTLTLFEDREMIEERLKTYAHLFDDKVMKQLKRRRYTGWGRLSRKLINGIRDKQSGKTILDFLKSDGFANRNFMQLIHDDSLTFKEDIQKAQVSGQGDSLHEHIANLAGSPAIKKGILQTVKVVDELVKVMGRHKPENIVIEMARENQTTQKGQKNSRERMKRIEEGIKELGSQILKEHPVENTQLQNEKLYLYYLQNGRDMYVDQELDINRLSDYDVDHIVPQSFLKDDSIDNKVLTRSDKARGKSDNVPSEEVVKKMKNYWRQLLNAKLITQRKFDNLTKAERGGLSELDKAGFIKRQLVETRQITKHVAQILDSRMNTKYDENDKLIREVKVITLKSKLVSDFRKDFQFYKVREINNYHHAHDAYLNAVVGTALIKKYPKLESEFVYGDYKVYDVRKMIAKSEQEIGKATAKYFFYSNIMNFFKTEITLANGEIRKRPLIETNGETGEIVWDKGRDFATVRKVLSMPQVNIVKKTEVQTGGFSKESILPKRNSDKLIARKKDWDPKKYGGFDSPTVAYSVLVVAKVEKGKSKKLKSVKELLGITIMERSSFEKNPIDFLEAKGYKEVKKDLIIKLPKYSLFELENGRKRMLASAGELQKGNELALPSKYVNFLYLASHYEKLKGSPEDNEQKQLFVEQHKHYLDEIIEQISEFSKRVILADANLDKVLSAYNKHRDKPIREQAENIIHLFTLTNLGAPAAFKYFDTTIDRKRYTSTKEVLDATLIHQSITGLYETRIDLSQLGGDGGGSSGGGGGSGGTLNIEDEHRLHETSKEPDVSLGSTWLSDFPQAWAETGGMGLAVRQAPLIIPLKATSTPVSIKQYPMSQEARLGIKPHIQRLLDQGILVPCQSPWNTPLLPVKKPGTNDYRPVQDLREVNKRVEDIHPTVPNPYNLLSGLPPSHQWYTVLDLKDAFFCLRLHPTSQPLFAFEWRDPEMGISGQLTWTRLPQGFKNSPTLFNEALHRDLADFRIQHPDLILLQYVDDLLLAATSELDCQQGTRALLQTLGNLGYRASAKKAQICQKQVKYLGYLLKEGQRWLTEARKETVMGQPTPKTPRQLREFLGKAGFCRLFIPGFAEMAAPLYPLTKPGTLFNWGPDQQKAYQEIKQALLTAPALGLPDLTKPFELFVDEKQGYAKGVLTQKLGPWRRPVAYLSKKLDPVAAGWPPCLRMVAAIAVLTKDAGKLTMGQPLVILAPHAVEALVKQPPDRWLSNARMTHYQALLLDTDRVQFGPVVALNPATLLPLPEEGLQHNCLDILAEAHGTRPDLTDQPLPDADHTWYTDGSSLLQEGQRKAGAAVTTETEVIWAKALPAGTSAQRAELIALTQALKMAEGKKLNVYTDSRYAFATAHIHGEIYRRRGWLTSEGKEIKNKDEILALLKALFLPKRLSIIHCPGHQKGHSAEARGNRMADQAARKAAITETPDTSTLLAGKRTADGSEFEKRTADGSEFESPKKKAKVE

SEQ ID NO: 3048 - protein, 2094 aa, synthetic construct; identical to SEQ ID NO: 2852

SEQ ID NO: 3049 - protein, 2097 aa, synthetic construct; identical to SEQ ID NO: 2814

SEQ ID NO: 3050 - protein, 2096 aa, synthetic construct
MPAAKRVKLDGGDKKYSIGLDIGTNSVGWAVITDEYKVPSKKFKVLGNTDRHSIKKNLIGALLFDSGETAEATRLKRTARRRYTRRKNRICYLQEIFSNEMAKVDDSFFHRLEESFLVEEDKKHERHPIFGNIVDEVAYHEKYPTIYHLRKKLVDSTDKADLRLIYLALAHMIKFRGHFLIEGDLNPDNSDVDKLFIQLVQTYNQLFEENPINASGVDAKAILSARLSKSRRLENLIAQLPGEKKNGLFGNLIALSLGLTPNFKSNFDLAEDAKLQLSKDTYDDDLDNLLAQIGDQYADLFLAAKNLSDAILLSDILRVNTEITKAPLSASMIKRYDEHHQDLTLLKALVRQQLPEKYKEIFFDQSKNGYAGYIDGGASQEEFYKFIKPILEKMDGTEELLVKLNREDLLRKQRTFDNGSIPHQIHLGELHAILRRQEDFYPFLKDNREKIEKILTFRIPYYVGPLARGNSRFAWMTRKSEETITPWNFEEVVDKGASAQSFIERMTNFDKNLPNEKVLPKHSLLYEYFTVYNELTKVKYVTEGMRKPAFLSGEQKKAIVDLLFKTNRKVTVKQLKEDYFKKIECFDSVEISGVEDRFNASLGTYHDLLKIIKDKDFLDNEENEDILEDIVLTLTLFEDREMIEERLKTYAHLFDDKVMKQLKRRRYTGWGRLSRKLINGIRDKQSGKTILDFLKSDGFANRNFMQLIHDDSLTFKEDIQKAQVSGQGDSLHEHIANLAGSPAIKKGILQTVKVVDELVKVMGRHKPENIVIEMARENQTTQKGQKNSRERMKRIEEGIKELGSQILKEHPVENTQLQNEKLYLYYLQNGRDMYVDQELDINRLSDYDVDHIVPQSFLKDDSIDNKVLTRSDKARGKSDNVPSEEVVKKMKNYWRQLLNAKLITQRKFDNLTKAERGGLSELDKAGFIKRQLVETRQITKHVAQILDSRMNTKYDENDKLIREVKVITLKSKLVSDFRKDFQFYKVREINNYHHAHDAYLNAVVGTALIKKYPKLESEFVYGDYKVYDVRKMIAKSEQEIGKATAKYFFYSNIMNFFKTEITLANGEIRKRPLIETNGETGEIVWDKGRDFATVRKVLSMPQVNIVKKTEVQTGGFSKESILPKRNSDKLIARKKDWDPKKYGGFDSPTVAYSVLVVAKVEKGKSKKLKSVKELLGITIMERSSFEKNPIDFLEAKGYKEVKKDLIIKLPKYSLFELENGRKRMLASAGELQKGNELALPSKYVNFLYLASHYEKLKGSPEDNEQKQLFVEQHKHYLDEIIEQISEFSKRVILADANLDKVLSAYNKHRDKPIREQAENIIHLFTLTNLGAPAAFKYFDTTIDRKRYTSTKEVLDATLIHQSITGLYETRIDLSQLGGDGGGGGEAAAKGSSGGTLNIEDEHRLHETSKEPDVSLGSTWLSDFPQAWAETGGMGLAVRQAPLIIPLKATSTPVSIKQYPMSQEARLGIKPHIQRLLDQGILVPCQSPWNTPLLPVKKPGTNDYRPVQDLREVNKRVEDIHPTVPNPYNLLSGLPPSHQWYTVLDLKDAFFCLRLHPTSQPLFAFEWRDPEMGISGQLTWTRLPQGFKNSPTLFNEALHRDLADFRIQHPDLILLQYVDDLLLAATSELDCQQGTRALLQTLGNLGYRASAKKAQICQKQVKYLGYLLKEGQRWLTEARKETVMGQPTPKTPRQLREFLGKAGFCRLFIPGFAEMAAPLYPLTKPGTLFNWGPDQQKAYQEIKQALLTAPALGLPDLTKPFELFVDEKQGYAKGVLTQKLGPWRRPVAYLSKKLDPVAAGWPPCLRMVAAIAVLTKDAGKLTMGQPLVILAPHAVEALVKQPPDRWLSNARMTHYQALLLDTDRVQFGPVVALNPATLLPLPEEGLQHNCLDILAEAHGTRPDLTDQPLPDADHTWYTDGSSLLQEGQRKAGAAVTTETEVIWAKALPAGTSAQRAELIALTQALKMAEGKKLNVYTDSRYAFATAHIHGEIYRRRGWLTSEGKEIKNKDEILALLKALFLPKRLSIIHCPGHQKGHSAEARGNRMADQAARKAAITETPDTSTLLAGKRTADGSEFEKRTADGSEFESPKKKAKVE

SEQ ID NO: 3051 - protein, 2096 aa, synthetic construct; identical to SEQ ID NO: 2785

SEQ ID NO: 3052 - protein, 2096 aa, synthetic construct; identical to SEQ ID NO: 2822

SEQ ID NO: 3053 - protein, 2096 aa, synthetic construct; identical to SEQ ID NO: 2817

SEQ ID NO: 3054 - protein, 2096 aa, synthetic construct; identical to SEQ ID NO: 2851

SEQ ID NO: 3055 - protein, 2091 aa, synthetic construct
MPAAKRVKLDGGDKKYSIGLDIGTNSVGWAVITDEYKVPSKKFKVLGNTDRHSIKKNLIGALLFDSGETAEATRLKRTARRRYTRRKNRICYLQEIFSNEMAKVDDSFFHRLEESFLVEEDKKHERHPIFGNIVDEVAYHEKYPTIYHLRKKLVDSTDKADLRLIYLALAHMIKFRGHFLIEGDLNPDNSDVDKLFIQLVQTYNQLFEENPINASGVDAKAILSARLSKSRRLENLIAQLPGEKKNGLFGNLIALSLGLTPNFKSNFDLAEDAKLQLSKDTYDDDLDNLLAQIGDQYADLFLAAKNLSDAILLSDILRVNTEITKAPLSASMIKRYDEHHQDLTLLKALVRQQLPEKYKEIFFDQSKNGYAGYIDGGASQEEFYKFIKPILEKMDGTEELLVKLNREDLLRKQRTFDNGSIPHQIHLGELHAILRRQEDFYPFLKDNREKIEKILTFRIPYYVGPLARGNSRFAWMTRKSEETITPWNFEEVVDKGASAQSFIERMTNFDKNLPNEKVLPKHSLLYEYFTVYNELTKVKYVTEGMRKPAFLSGEQKKAIVDLLFKTNRKVTVKQLKEDYFKKIECFDSVEISGVEDRFNASLGTYHDLLKIIKDKDFLDNEENEDILEDIVLTLTLFEDREMIEERLKTYAHLFDDKVMKQLKRRRYTGWGRLSRKLINGIRDKQSGKTILDFLKSDGFANRNFMQLIHDDSLTFKEDIQKAQVSGQGDSLHEHIANLAGSPAIKKGILQTVKVVDELVKVMGRHKPENIVIEMARENQTTQKGQKNSRERMKRIEEGIKELGSQILKEHPVENTQLQNEKLYLYYLQNGRDMYVDQELDINRLSDYDVDHIVPQSFLKDDSIDNKVLTRSDKARGKSDNVPSEEVVKKMKNYWRQLLNAKLITQRKFDNLTKAERGGLSELDKAGFIKRQLVETRQITKHVAQILDSRMNTKYDENDKLIREVKVITLKSKLVSDFRKDFQFYKVREINNYHHAHDAYLNAVVGTALIKKYPKLESEFVYGDYKVYDVRKMIAKSEQEIGKATAKYFFYSNIMNFFKTEITLANGEIRKRPLIETNGETGEIVWDKGRDFATVRKVLSMPQVNIVKKTEVQTGGFSKESILPKRNSDKLIARKKDWDPKKYGGFDSPTVAYSVLVVAKVEKGKSKKLKSVKELLGITIMERSSFEKNPIDFLEAKGYKEVKKDLIIKLPKYSLFELENGRKRMLASAGELQKGNELALPSKYVNFLYLASHYEKLKGSPEDNEQKQLFVEQHKHYLDEIIEQISEFSKRVILADANLDKVLSAYNKHRDKPIREQAENIIHLFTLTNLGAPAAFKYFDTTIDRKRYTSTKEVLDATLIHQSITGLYETRIDLSQLGGDGGGSSPAPGGTLNIEDEHRLHETSKEPDVSLGSTWLSDFPQAWAETGGMGLAVRQAPLIIPLKATSTPVSIKQYPMSQEARLGIKPHIQRLLDQGILVPCQSPWNTPLLPVKKPGTNDYRPVQDLREVNKRVEDIHPTVPNPYNLLSGLPPSHQWYTVLDLKDAFFCLRLHPTSQPLFAFEWRDPEMGISGQLTWTRLPQGFKNSPTLFNEALHRDLADFRIQHPDLILLQYVDDLLLAATSELDCQQGTRALLQTLGNLGYRASAKKAQICQKQVKYLGYLLKEGQRWLTEARKETVMGQPTPKTPRQLREFLGKAGFCRLFIPGFAEMAAPLYPLTKPGTLFNWGPDQQKAYQEIKQALLTAPALGLPDLTKPFELFVDEKQGYAKGVLTQKLGPWRRPVAYLSKKLDPVAAGWPPCLRMVAAIAVLTKDAGKLTMGQPLVILAPHAVEALVKQPPDRWLSNARMTHYQALLLDTDRVQFGPVVALNPATLLPLPEEGLQHNCLDILAEAHGTRPDLTDQPLPDADHTWYTDGSSLLQEGQRKAGAAVTTETEVIWAKALPAGTSAQRAELIALTQALKMAEGKKLNVYTDSRYAFATAHIHGEIYRRRGWLTSEGKEIKNKDEILALLKALFLPKRLSIIHCPGHQKGHSAEARGNRMADQAARKAAITETPDTSTLLAGKRTADGSEFEKRTADGSEFESPKKKAKVE

SEQ ID NO: 3056 - protein, 2094 aa, synthetic construct
MPAAKRVKLDGGDKKYSIGLDIGTNSVGWAVITDEYKVPSKKFKVLGNTDRHSIKKNLIGALLFDSGETAEATRLKRTARRRYTRRKNRICYLQEIFSNEMAKVDDSFFHRLEESFLVEEDKKHERHPIFGNIVDEVAYHEKYPTIYHLRKKLVDSTDKADLRLIYLALAHMIKFRGHFLIEGDLNPDNSDVDKLFIQLVQTYNQLFEENPINASGVDAKAILSARLSKSRRLENLIAQLPGEKKNGLFGNLIALSLGLTPNFKSNFDLAEDAKLQLSKDTYDDDLDNLLAQIGDQYADLFLAAKNLSDAILLSDILRVNTEITKAPLSASMIKRYDEHHQDLTLLKALVRQQLPEKYKEIFFDQSKNGYAGYIDGGASQEEFYKFIKPILEKMDGTEELLVKLNREDLLRKQRTFDNGSIPHQIHLGELHAILRRQEDFYPFLKDNREKIEKILTFRIPYYVGPLARGNSRFAWMTRKSEETITPWNFEEVVDKGASAQSFIERMTNFDKNLPNEKVLPKHSLLYEYFTVYNELTKVKYVTEGMRKPAFLSGEQKKAIVDLLFKTNRKVTVKQLKEDYFKKIECFDSVEISGVEDRFNASLGTYHDLLKIIKDKDFLDNEENEDILEDIVLTLTLFEDREMIEERLKTYAHLFDDKVMKQLKRRRYTGWGRLSRKLINGIRDKQSGKTILDFLKSDGFANRNFMQLIHDDSLTFKEDIQKAQVSGQGDSLHEHIANLAGSPAIKKGILQTVKVVDELVKVMGRHKPENIVIEMARENQTTQKGQKNSRERMKRIEEGIKELGSQILKEHPVENTQLQNEKLYLYYLQNGRDMYVDQELDINRLSDYDVDHIVPQSFLKDDSIDNKVLTRSDKARGKSDNVPSEEVVKKMKNYWRQLLNAKLITQRKFDNLTKAERGGLSELDKAGFIKRQLVETRQITKHVAQILDSRMNTKYDENDKLIREVKVITLKSKLVSDFRKDFQFYKVREINNYHHAHDAYLNAVVGTALIKKYPKLESEFVYGDYKVYDVRKMIAKSEQEIGKATAKYFFYSNIMNFFKTEITLANGEIRKRPLIETNGETGEIVWDKGRDFATVRKVLSMPQVNIVKKTEVQTGGFSKESILPKRNSDKLIARKKDWDPKKYGGFDSPTVAYSVLVVAKVEKGKSKKLKSVKELLGITIMERSSFEKNPIDFLEAKGYKEVKKDLIIKLPKYSLFELENGRKRMLASAGELQKGNELALPSKYVNFLYLASHYEKLKGSPEDNEQKQLFVEQHKHYLDEIIEQISEFSKRVILADANLDKVLSAYNKHRDKPIREQAENIIHLFTLTNLGAPAAFKYFDTTIDRKRYTSTKEVLDATLIHQSITGLYETRIDLSQLGGDGGGSSGGGPAPGGTLNIEDEHRLHETSKEPDVSLGSTWLSDFPQAWAETGGMGLAVRQAPLIIPLKATSTPVSIKQYPMSQEARLGIKPHIQRLLDQGILVPCQSPWNTPLLPVKKPGTNDYRPVQDLREVNKRVEDIHPTVPNPYNLLSGLPPSHQWYTVLDLKDAFFCLRLHPTSQPLFAFEWRDPEMGISGQLTWTRLPQGFKNSPTLFNEALHRDLADFRIQHPDLILLQYVDDLLLAATSELDCQQGTRALLQTLGNLGYRASAKKAQICQKQVKYLGYLLKEGQRWLTEARKETVMGQPTPKTPRQLREFLGKAGFCRLFIPGFAEMAAPLYPLTKPGTLFNWGPDQQKAYQEIKQALLTAPALGLPDLTKPFELFVDEKQGYAKGVLTQKLGPWRRPVAYLSKKLDPVAAGWPPCLRMVAAIAVLTKDAGKLTMGQPLVILAPHAVEALVKQPPDRWLSNARMTHYQALLLDTDRVQFGPVVALNPATLLPLPEEGLQHNCLDILAEAHGTRPDLTDQPLPDADHTWYTDGSSLLQEGQRKAGAAVTTETEVIWAKALPAGTSAQRAELIALTQALKMAEGKKLNVYTDSRYAFATAHIHGEIYRRRGWLTSEGKEIKNKDEILALLKALFLPKRLSIIHCPGHQKGHSAEARGNRMADQAARKAAITETPDTSTLLAGKRTADGSEFEKRTADGSEFESPKKKAKVE

SEQ ID NO: 3057 - protein, 2096 aa, synthetic construct; identical to SEQ ID NO: 2810

SEQ ID NO: 3058 - protein, 2091 aa, synthetic construct
MPAAKRVKLDGGDKKYSIGLDIGTNSVGWAVITDEYKVPSKKFKVLGNTDRHSIKKNLIGALLFDSGETAEATRLKRTARRRYTRRKNRICYLQEIFSNEMAKVDDSFFHRLEESFLVEEDKKHERHPIFGNIVDEVAYHEKYPTIYHLRKKLVDSTDKADLRLIYLALAHMIKFRGHFLIEGDLNPDNSDVDKLFIQLVQTYNQLFEENPINASGVDAKAILSARLSKSRRLENLIAQLPGEKKNGLFGNLIALSLGLTPNFKSNFDLAEDAKLQLSKDTYDDDLDNLLAQIGDQYADLFLAAKNLSDAILLSDILRVNTEITKAPLSASMIKRYDEHHQDLTLLKALVRQQLPEKYKEIFFDQSKNGYAGYIDGGASQEEFYKFIKPILEKMDGTEELLVKLNREDLLRKQRTFDNGSIPHQIHLGELHAILRRQEDFYPFLKDNREKIEKILTFRIPYYVGPLARGNSRFAWMTRKSEETITPWNFEEVVDKGASAQSFIERMTNFDKNLPNEKVLPKHSLLYEYFTVYNELTKVKYVTEGMRKPAFLSGEQKKAIVDLLFKTNRKVTVKQLKEDYFKKIECFDSVEISGVEDRFNASLGTYHDLLKIIKDKDFLDNEENEDILEDIVLTLTLFEDREMIEERLKTYAHLFDDKVMKQLKRRRYTGWGRLSRKLINGIRDKQSGKTILDFLKSDGFANRNFMQLIHDDSLTFKEDIQKAQVSGQGDSLHEHIANLAGSPAIKKGILQTVKVVDELVKVMGRHKPENIVIEMARENQTTQKGQKNSRERMKRIEEGIKELGSQILKEHPVENTQLQNEKLYLYYLQNGRDMYVDQELDINRLSDYDVDHIVPQSFLKDDSIDNKVLTRSDKARGKSDNVPSEEVVKKMKNYWRQLLNAKLITQRKFDNLTKAERGGLSELDKAGFIKRQLVETRQITKHVAQILDSRMNTKYDENDKLIREVKVITLKSKLVSDFRKDFQFYKVREINNYHHAHDAYLNAVVGTALIKKYPKLESEFVYGDYKVYDVRKMIAKSEQEIGKATAKYFFYSNIMNFFKTEITLANGEIRKRPLIETNGETGEIVWDKGRDFATVRKVLSMPQVNIVKKTEVQTGGFSKESILPKRNSDKLIARKKDWDPKKYGGFDSPTVAYSVLVVAKVEKGKSKKLKSVKELLGITIMERSSFEKNPIDFLEAKGYKEVKKDLIIKLPKYSLFELENGRKRMLASAGELQKGNELALPSKYVNFLYLASHYEKLKGSPEDNEQKQLFVEQHKHYLDEIIEQISEFSKRVILADANLDKVLSAYNKHRDKPIREQAENIIHLFTLTNLGAPAAFKYFDTTIDRKRYTSTKEVLDATLIHQSITGLYETRIDLSQLGGDGGGSSGGGGGTLNIEDEHRLHETSKEPDVSLGSTWLSDFPQAWAETGGMGLAVRQAPLIIPLKATSTPVSIKQYPMSQEARLGIKPHIQRLLDQGILVPCQSPWNTPLLPVKKPGTNDYRPVQDLREVNKRVEDIHPTVPNPYNLLSGLPPSHQWYTVLDLKDAFFCLRLHPTSQPLFAFEWRDPEMGISGQLTWTRLPQGFKNSPTLFNEALHRDLADFRIQHPDLILLQYVDDLLLAATSELDCQQGTRALLQTLGNLGYRASAKKAQICQKQVKYLGYLLKEGQRWLTEARKETVMGQPTPKTPRQLREFLGKAGFCRLFIPGFAEMAAPLYPLTKPGTLFNWGPDQQKAYQEIKQALLTAPALGLPDLTKPFELFVDEKQGYAKGVLTQKLGPWRRPVAYLSKKLDPVAAGWPPCLRMVAAIAVLTKDAGKLTMGQPLVILAPHAVEALVKQPPDRWLSNARMTHYQALLLDTDRVQFGPVVALNPATLLPLPEEGLQHNCLDILAEAHGTRPDLTDQPLPDADHTWYTDGSSLLQEGQRKAGAAVTTETEVIWAKALPAGTSAQRAELIALTQALKMAEGKKLNVYTDSRYAFATAHIHGEIYRRRGWLTSEGKEIKNKDEILALLKALFLPKRLSIIHCPGHQKGHSAEARGNRMADQAARKAAITETPDTSTLLAGKRTADGSEFEKRTADGSEFESPKKKAKVE

SEQ ID NO: 3059 - protein, 2094 aa, synthetic construct; identical to SEQ ID NO: 2804

SEQ ID NO: 3060 - protein, 2091 aa, synthetic construct
MPAAKRVKLDGGDKKYSIGLDIGTNSVGWAVITDEYKVPSKKFKVLGNTDRHSIKKNLIGALLFDSGETAEATRLKRTARRRYTRRKNRICYLQEIFSNEMAKVDDSFFHRLEESFLVEEDKKHERHPIFGNIVDEVAYHEKYPTIYHLRKKLVDSTDKADLRLIYLALAHMIKFRGHFLIEGDLNPDNSDVDKLFIQLVQTYNQLFEENPINASGVDAKAILSARLSKSRRLENLIAQLPGEKKNGLFGNLIALSLGLTPNFKSNFDLAEDAKLQLSKDTYDDDLDNLLAQIGDQYADLFLAAKNLSDAILLSDILRVNTEITKAPLSASMIKRYDEHHQDLTLLKALVRQQLPEKYKEIFFDQSKNGYAGYIDGGASQEEFYKFIKPILEKMDGTEELLVKLNREDLLRKQRTFDNGSIPHQIHLGELHAILRRQEDFYPFLKDNREKIEKILTFRIPYYVGPLARGNSRFAWMTRKSEETITPWNFEEVVDKGASAQSFIERMTNFDKNLPNEKVLPKHSLLYEYFTVYNELTKVKYVTEGMRKPAFLSGEQKKAIVDLLFKTNRKVTVKQLKEDYFKKIECFDSVEISGVEDRFNASLGTYHDLLKIIKDKDFLDNEENEDILEDIVLTLTLFEDREMIEERLKTYAHLFDDKVMKQLKRRRYTGWGRLSRKLINGIRDKQSGKTILDFLKSDGFANRNFMQLIHDDSLTFKEDIQKAQVSGQGDSLHEHIANLAGSPAIKKGILQTVKVVDELVKVMGRHKPENIVIEMARENQTTQKGQKNSRERMKRIEEGIKELGSQILKEHPVENTQLQNEKLYLYYLQNGRDMYVDQELDINRLSDYDVDHIVPQSFLKDDSIDNKVLTRSDKARGKSDNVPSEEVVKKMKNYWRQLLNAKLITQRKFDNLTKAERGGLSELDKAGFIKRQLVETRQITKHVAQILDSRMNTKYDENDKLIREVKVITLKSKLVSDFRKDFQFYKVREINNYHHAHDAYLNAVVGTALIKKYPKLESEFVYGDYKVYDVRKMIAKSEQEIGKATAKYFFYSNIMNFFKTEITLANGEIRKRPLIETNGETGEIVWDKGRDFATVRKVLSMPQVNIVKKTEVQTGGFSKESILPKRNSDKLIARKKDWDPKKYGGFDSPTVAYSVLVVAKVEKGKSKKLKSVKELLGITIMERSSFEKNPIDFLEAKGYKEVKKDLIIKLPKYSLFELENGRKRMLASAGELQKGNELALPSKYVNFLYLASHYEKLKGSPEDNEQKQLFVEQHKHYLDEIIEQISEFSKRVILADANLDKVLSAYNKHRDKPIREQAENIIHLFTLTNLGAPAAFKYFDTTIDRKRYTSTKEVLDATLIHQSITGLYETRIDLSQLGGDGGPAPGGSGGTLNIEDEHRLHETSKEPDVSLGSTWLSDFPQAWAETGGMGLAVRQAPLIIPLKATSTPVSIKQYPMSQEARLGIKPHIQRLLDQGILVPCQSPWNTPLLPVKKPGTNDYRPVQDLREVNKRVEDIHPTVPNPYNLLSGLPPSHQWYTVLDLKDAFFCLRLHPTSQPLFAFEWRDPEMGISGQLTWTRLPQGFKNSPTLFNEALHRDLADFRIQHPDLILLQYVDDLLLAATSELDCQQGTRALLQTLGNLGYRASAKKAQICQKQVKYLGYLLKEGQRWLTEARKETVMGQPTPKTPRQLREFLGKAGFCRLFIPGFAEMAAPLYPLTKPGTLFNWGPDQQKAYQEIKQALLTAPALGLPDLTKPFELFVDEKQGYAKGVLTQKLGPWRRPVAYLSKKLDPVAAGWPPCLRMVAAIAVLTKDAGKLTMGQPLVILAPHAVEALVKQPPDRWLSNARMTHYQALLLDTDRVQFGPVVALNPATLLPLPEEGLQHNCLDILAEAHGTRPDLTDQPLPDADHTWYTDGSSLLQEGQRKAGAAVTTETEVIWAKALPAGTSAQRAELIALTQALKMAEGKKLNVYTDSRYAFATAHIHGEIYRRRGWLTSEGKEIKNKDEILALLKALFLPKRLSIIHCPGHQKGHSAEARGNRMADQAARKAAITETPDTSTLLAGKRTADGSEFEKRTADGSEFESPKKKAKVE

SEQ ID NO: 3061 - protein, 2093 aa, synthetic construct
MPAAKRVKLDGGDKKYSIGLDIGTNSVGWAVITDEYKVPSKKFKVLGNTDRHSIKKNLIGALLFDSGETAEATRLKRTARRRYTRRKNRICYLQEIFSNEMAKVDDSFFHRLEESFLVEEDKKHERHPIFGNIVDEVAYHEKYPTIYHLRKKLVDSTDKADLRLIYLALAHMIKFRGHFLIEGDLNPDNSDVDKLFIQLVQTYNQLFEENPINASGVDAKAILSARLSKSRRLENLIAQLPGEKKNGLFGNLIALSLGLTPNFKSNFDLAEDAKLQLSKDTYDDDLDNLLAQIGDQYADLFLAAKNLSDAILLSDILRVNTEITKAPLSASMIKRYDEHHQDLTLLKALVRQQLPEKYKEIFFDQSKNGYAGYIDGGASQEEFYKFIKPILEKMDGTEELLVKLNREDLLRKQRTFDNGSIPHQIHLGELHAILRRQEDFYPFLKDNREKIEKILTFRIPYYVGPLARGNSRFAWMTRKSEETITPWNFEEVVDKGASAQSFIERMTNFDKNLPNEKVLPKHSLLYEYFTVYNELTKVKYVTEGMRKPAFLSGEQKKAIVDLLFKTNRKVTVKQLKEDYFKKIECFDSVEISGVEDRFNASLGTYHDLLKIIKDKDFLDNEENEDILEDIVLTLTLFEDREMIEERLKTYAHLFDDKVMKQLKRRRYTGWGRLSRKLINGIRDKQSGKTILDFLKSDGFANRNFMQLIHDDSLTFKEDIQKAQVSGQGDSLHEHIANLAGSPAIKKGILQTVKVVDELVKVMGRHKPENIVIEMARENQTTQKGQKNSRERMKRIEEGIKELGSQILKEHPVENTQLQNEKLYLYYLQNGRDMYVDQELDINRLSDYDVDHIVPQSFLKDDSIDNKVLTRSDKARGKSDNVPSEEVVKKMKNYWRQLLNAKLITQRKFDNLTKAERGGLSELDKAGFIKRQLVETRQITKHVAQILDSRMNTKYDENDKLIREVKVITLKSKLVSDFRKDFQFYKVREINNYHHAHDAYLNAVVGTALIKKYPKLESEFVYGDYKVYDVRKMIAKSEQEIGKATAKYFFYSNIMNFFKTEITLANGEIRKRPLIETNGETGEIVWDKGRDFATVRKVLSMPQVNIVKKTEVQTGGFSKESILPKRNSDKLIARKKDWDPKKYGGFDSPTVAYSVLVVAKVEKGKSKKLKSVKELLGITIMERSSFEKNPIDFLEAKGYKEVKKDLIIKLPKYSLFELENGRKRMLASAGELQKGNELALPSKYVNFLYLASHYEKLKGSPEDNEQKQLFVEQHKHYLDEIIEQISEFSKRVILADANLDKVLSAYNKHRDKPIREQAENIIHLFTLTNLGAPAAFKYFDTTIDRKRYTSTKEVLDATLIHQSITGLYETRIDLSQLGGDGGPAPEAAAKGGTLNIEDEHRLHETSKEPDVSLGSTWLSDFPQAWAETGGMGLAVRQAPLIIPLKATSTPVSIKQYPMSQEARLGIKPHIQRLLDQGILVPCQSPWNTPLLPVKKPGTNDYRPVQDLREVNKRVEDIHPTVPNPYNLLSGLPPSHQWYTVLDLKDAFFCLRLHPTSQPLFAFEWRDPEMGISGQLTWTRLPQGFKNSPTLFNEALHRDLADFRIQHPDLILLQYVDDLLLAATSELDCQQGTRALLQTLGNLGYRASAKKAQICQKQVKYLGYLLKEGQRWLTEARKETVMGQPTPKTPRQLREFLGKAGFCRLFIPGFAEMAAPLYPLTKPGTLFNWGPDQQKAYQEIKQALLTAPALGLPDLTKPFELFVDEKQGYAKGVLTQKLGPWRRPVAYLSKKLDPVAAGWPPCLRMVAAIAVLTKDAGKLTMGQPLVILAPHAVEALVKQPPDRWLSNARMTHYQALLLDTDRVQFGPVVALNPATLLPLPEEGLQHNCLDILAEAHGTRPDLTDQPLPDADHTWYTDGSSLLQEGQRKAGAAVTTETEVIWAKALPAGTSAQRAELIALTQALKMAEGKKLNVYTDSRYAFATAHIHGEIYRRRGWLTSEGKEIKNKDEILALLKALFLPKRLSIIHCPGHQKGHSAEARGNRMADQAARKAAITETPDTSTLLAGKRTADGSEFEKRTADGSEFESPKKKAKVE

SEQ ID NO: 3062 - protein, 2093 aa, synthetic construct; identical to SEQ ID NO: 2828

SEQ ID NO: 3063 - protein, 2105 aa, synthetic construct
MPAAKRVKLDGGDKKYSIGLDIGTNSVGWAVITDEYKVPSKKFKVLGNTDRHSIKKNLIGALLFDSGETAEATRLKRTARRRYTRRKNRICYLQEIFSNEMAKVDDSFFHRLEESFLVEEDKKHERHPIFGNIVDEVAYHEKYPTIYHLRKKLVDSTDKADLRLIYLALAHMIKFRGHFLIEGDLNPDNSDVDKLFIQLVQTYNQLFEENPINASGVDAKAILSARLSKSRRLENLIAQLPGEKKNGLFGNLIALSLGLTPNFKSNFDLAEDAKLQLSKDTYDDDLDNLLAQIGDQYADLFLAAKNLSDAILLSDILRVNTEITKAPLSASMIKRYDEHHQDLTLLKALVRQQLPEKYKEIFFDQSKNGYAGYIDGGASQEEFYKFIKPILEKMDGTEELLVKLNREDLLRKQRTFDNGSIPHQIHLGELHAILRRQEDFYPFLKDNREKIEKILTFRIPYYVGPLARGNSRFAWMTRKSEETITPWNFEEVVDKGASAQSFIERMTNFDKNLPNEKVLPKHSLLYEYFTVYNELTKVKYVTEGMRKPAFLSGEQKKAIVDLLFKTNRKVTVKQLKEDYFKKIECFDSVEISGVEDRFNASLGTYHDLLKIIKDKDFLDNEENEDILEDIVLTLTLFEDREMIEERLKTYAHLFDDKVMKQLKRRRYTGWGRLSRKLINGIRDKQSGKTILDFLKSDGFANRNFMQLIHDDSLTFKEDIQKAQVSGQGDSLHEHIANLAGSPAIKKGILQTVKVVDELVKVMGRHKPENIVIEMARENQTTQKGQKNSRERMKRIEEGIKELGSQILKEHPVENTQLQNEKLYLYYLQNGRDMYVDQELDINRLSDYDVDHIVPQSFLKDDSIDNKVLTRSDKARGKSDNVPSEEVVKKMKNYWRQLLNAKLITQRKFDNLTKAERGGLSELDKAGFIKRQLVETRQITKHVAQILDSRMNTKYDENDKLIREVKVITLKSKLVSDFRKDFQFYKVREINNYHHAHDAYLNAVVGTALIKKYPKLESEFVYGDYKVYDVRKMIAKSEQEIGKATAKYFFYSNIMNFFKTEITLANGEIRKRPLIETNGETGEIVWDKGRDFATVRKVLSMPQVNIVKKTEVQTGGFSKESILPKRNSDKLIARKKDWDPKKYGGFDSPTVAYSVLVVAKVEKGKSKKLKSVKELLGITIMERSSFEKNPIDFLEAKGYKEVKKDLIIKLPKYSLFELENGRKRMLASAGELQKGNELALPSKYVNFLYLASHYEKLKGSPEDNEQKQLFVEQHKHYLDEIIEQISEFSKRVILADANLDKVLSAYNKHRDKPIREQAENIIHLFTLTNLGAPAAFKYFDTTIDRKRYTSTKEVLDATLIHQSITGLYETRIDLSQLGGDGGGGGGSGGGGSGGGGSGGGGSGGTLNIEDEHRLHETSKEPDVSLGSTWLSDFPQAWAETGGMGLAVRQAPLIIPLKATSTPVSIKQYPMSQEARLGIKPHIQRLLDQGILVPCQSPWNTPLLPVKKPGTNDYRPVQDLREVNKRVEDIHPTVPNPYNLLSGLPPSHQWYTVLDLKDAFFCLRLHPTSQPLFAFEWRDPEMGISGQLTWTRLPQGFKNSPTLFNEALHRDLADFRIQHPDLILLQYVDDLLLAATSELDCQQGTRALLQTLGNLGYRASAKKAQICQKQVKYLGYLLKEGQRWLTEARKETVMGQPTPKTPRQLREFLGKAGFCRLFIPGFAEMAAPLYPLTKPGTLFNWGPDQQKAYQEIKQALLTAPALGLPDLTKPFELFVDEKQGYAKGVLTQKLGPWRRPVAYLSKKLDPVAAGWPPCLRMVAAIAVLTKDAGKLTMGQPLVILAPHAVEALVKQPPDRWLSNARMTHYQALLLDTDRVQFGPVVALNPATLLPLPEEGLQHNCLDILAEAHGTRPDLTDQPLPDADHTWYTDGSSLLQEGQRKAGAAVTTETEVIWAKALPAGTSAQRAELIALTQALKMAEGKKLNVYTDSRYAFATAHIHGEIYRRRGWLTSEGKEIKNKDEILALLKALFLPKRLSIIHCPGHQKGHSAEARGNRMADQAARKAAITETPDTSTLLAGKRTADGSEFEKRTADGSEFESPKKKAKVE

SEQ ID NO: 3064 - protein, 2094 aa, synthetic construct
MPAAKRVKLDGGDKKYSIGLDIGTNSVGWAVITDEYKVPSKKFKVLGNTDRHSIKKNLIGALLFDSGETAEATRLKRTARRRYTRRKNRICYLQEIFSNEMAKVDDSFFHRLEESFLVEEDKKHERHPIFGNIVDEVAYHEKYPTIYHLRKKLVDSTDKADLRLIYLALAHMIKFRGHFLIEGDLNPDNSDVDKLFIQLVQTYNQLFEENPINASGVDAKAILSARLSKSRRLENLIAQLPGEKKNGLFGNLIALSLGLTPNFKSNFDLAEDAKLQLSKDTYDDDLDNLLAQIGDQYADLFLAAKNLSDAILLSDILRVNTEITKAPLSASMIKRYDEHHQDLTLLKALVRQQLPEKYKEIFFDQSKNGYAGYIDGGASQEEFYKFIKPILEKMDGTEELLVKLNREDLLRKQRTFDNGSIPHQIHLGELHAILRRQEDFYPFLKDNREKIEKILTFRIPYYVGPLARGNSRFAWMTRKSEETITPWNFEEVVDKGASAQSFIERMTNFDKNLPNEKVLPKHSLLYEYFTVYNELTKVKYVTEGMRKPAFLSGEQKKAIVDLLFKTNRKVTVKQLKEDYFKKIECFDSVEISGVEDRFNASLGTYHDLLKIIKDKDFLDNEENEDILEDIVLTLTLFEDREMIEERLKTYAHLFDDKVMKQLKRRRYTGWGRLSRKLINGIRDKQSGKTILDFLKSDGFANRNFMQLIHDDSLTFKEDIQKAQVSGQGDSLHEHIANLAGSPAIKKGILQTVKVVDELVKVMGRHKPENIVIEMARENQTTQKGQKNSRERMKRIEEGIKELGSQILKEHPVENTQLQNEKLYLYYLQNGRDMYVDQELDINRLSDYDVDHIVPQSFLKDDSIDNKVLTRSDKARGKSDNVPSEEVVKKMKNYWRQLLNAKLITQRKFDNLTKAERGGLSELDKAGFIKRQLVETRQITKHVAQILDSRMNTKYDENDKLIREVKVITLKSKLVSDFRKDFQFYKVREINNYHHAHDAYLNAVVGTALIKKYPKLESEFVYGDYKVYDVRKMIAKSEQEIGKATAKYFFYSNIMNFFKTEITLANGEIRKRPLIETNGETGEIVWDKGRDFATVRKVLSMPQVNIVKKTEVQTGGFSKESILPKRNSDKLIARKKDWDPKKYGGFDSPTVAYSVLVVAKVEKGKSKKLKSVKELLGITIMERSSFEKNPIDFLEAKGYKEVKKDLIIKLPKYSLFELENGRKRMLASAGELQKGNELALPSKYVNFLYLASHYEKLKGSPEDNEQKQLFVEQHKHYLDEIIEQISEFSKRVILADANLDKVLSAYNKHRDKPIREQAENIIHLFTLTNLGAPAAFKYFDTTIDRKRYTSTKEVLDATLIHQSITGLYETRIDLSQLGGDGGPAPGGSGSSGGTLNIEDEHRLHETSKEPDVSLGSTWLSDFPQAWAETGGMGLAVRQAPLIIPLKATSTPVSIKQYPMSQEARLGIKPHIQRLLDQGILVPCQSPWNTPLLPVKKPGTNDYRPVQDLREVNKRVEDIHPTVPNPYNLLSGLPPSHQWYTVLDLKDAFFCLRLHPTSQPLFAFEWRDPEMGISGQLTWTRLPQGFKNSPTLFNEALHRDLADFRIQHPDLILLQYVDDLLLAATSELDCQQGTRALLQTLGNLGYRASAKKAQICQKQVKYLGYLLKEGQRWLTEARKETVMGQPTPKTPRQLREFLGKAGFCRLFIPGFAEMAAPLYPLTKPGTLFNWGPDQQKAYQEIKQALLTAPALGLPDLTKPFELFVDEKQGYAKGVLTQKLGPWRRPVAYLSKKLDPVAAGWPPCLRMVAAIAVLTKDAGKLTMGQPLVILAPHAVEALVKQPPDRWLSNARMTHYQALLLDTDRVQFGPVVALNPATLLPLPEEGLQHNCLDILAEAHGTRPDLTDQPLPDADHTWYTDGSSLLQEGQRKAGAAVTTETEVIWAKALPAGTSAQRAELIALTQALKMAEGKKLNVYTDSRYAFATAHIHGEIYRRRGWLTSEGKEIKNKDEILALLKALFLPKRLSIIHCPGHQKGHSAEARGNRMADQAARKAAITETPDTSTLLAGKRTADGSEFEKRTADGSEFESPKKKAKVE

SEQ ID NO: 3065 - protein, 2090 aa, synthetic construct; identical to SEQ ID NO: 2825

SEQ ID NO: 3066 - protein, 2090 aa, synthetic construct
MPAAKRVKLDGGDKKYSIGLDIGTNSVGWAVITDEYKVPSKKFKVLGNTDRHSIKKNLIGALLFDSGETAEATRLKRTARRRYTRRKNRICYLQEIFSNEMAKVDDSFFHRLEESFLVEEDKKHERHPIFGNIVDEVAYHEKYPTIYHLRKKLVDSTDKADLRLIYLALAHMIKFRGHFLIEGDLNPDNSDVDKLFIQLVQTYNQLFEENPINASGVDAKAILSARLSKSRRLENLIAQLPGEKKNGLFGNLIALSLGLTPNFKSNFDLAEDAKLQLSKDTYDDDLDNLLAQIGDQYADLFLAAKNLSDAILLSDILRVNTEITKAPLSASMIKRYDEHHQDLTLLKALVRQQLPEKYKEIFFDQSKNGYAGYIDGGASQEEFYKFIKPILEKMDGTEELLVKLNREDLLRKQRTFDNGSIPHQIHLGELHAILRRQEDFYPFLKDNREKIEKILTFRIPYYVGPLARGNSRFAWMTRKSEETITPWNFEEVVDKGASAQSFIERMTNFDKNLPNEKVLPKHSLLYEYFTVYNELTKVKYVTEGMRKPAFLSGEQKKAIVDLLFKTNRKVTVKQLKEDYFKKIECFDSVEISGVEDRFNASLGTYHDLLKIIKDKDFLDNEENEDILEDIVLTLTLFEDREMIEERLKTYAHLFDDKVMKQLKRRRYTGWGRLSRKLINGIRDKQSGKTILDFLKSDGFANRNFMQLIHDDSLTFKEDIQKAQVSGQGDSLHEHIANLAGSPAIKKGILQTVKVVDELVKVMGRHKPENIVIEMARENQTTQKGQKNSRERMKRIEEGIKELGSQILKEHPVENTQLQNEKLYLYYLQNGRDMYVDQELDINRLSDYDVDHIVPQSFLKDDSIDNKVLTRSDKARGKSDNVPSEEVVKKMKNYWRQLLNAKLITQRKFDNLTKAERGGLSELDKAGFIKRQLVETRQITKHVAQILDSRMNTKYDENDKLIREVKVITLKSKLVSDFRKDFQFYKVREINNYHHAHDAYLNAVVGTALIKKYPKLESEFVYGDYKVYDVRKMIAKSEQEIGKATAKYFFYSNIMNFFKTEITLANGEIRKRPLIETNGETGEIVWDKGRDFATVRKVLSMPQVNIVKKTEVQTGGFSKESILPKRNSDKLIARKKDWDPKKYGGFDSPTVAYSVLVVAKVEKGKSKKLKSVKELLGITIMERSSFEKNPIDFLEAKGYKEVKKDLIIKLPKYSLFELENGRKRMLASAGELQKGNELALPSKYVNFLYLASHYEKLKGSPEDNEQKQLFVEQHKHYLDEIIEQISEFSKRVILADANLDKVLSAYNKHRDKPIREQAENIIHLFTLTNLGAPAAFKYFDTTIDRKRYTSTKEVLDATLIHQSITGLYETRIDLSQLGGDGGPAPAPGGTLNIEDEHRLHETSKEPDVSLGSTWLSDFPQAWAETGGMGLAVRQAPLIIPLKATSTPVSIKQYPMSQEARLGIKPHIQRLLDQGILVPCQSPWNTPLLPVKKPGTNDYRPVQDLREVNKRVEDIHPTVPNPYNLLSGLPPSHQWYTVLDLKDAFFCLRLHPTSQPLFAFEWRDPEMGISGQLTWTRLPQGFKNSPTLFNEALHRDLADFRIQHPDLILLQYVDDLLLAATSELDCQQGTRALLQTLGNLGYRASAKKAQICQKQVKYLGYLLKEGQRWLTEARKETVMGQPTPKTPRQLREFLGKAGFCRLFIPGFAEMAAPLYPLTKPGTLFNWGPDQQKAYQEIKQALLTAPALGLPDLTKPFELFVDEKQGYAKGVLTQKLGPWRRPVAYLSKKLDPVAAGWPPCLRMVAAIAVLTKDAGKLTMGQPLVILAPHAVEALVKQPPDRWLSNARMTHYQALLLDTDRVQFGPVVALNPATLLPLPEEGLQHNCLDILAEAHGTRPDLTDQPLPDADHTWYTDGSSLLQEGQRKAGAAVTTETEVIWAKALPAGTSAQRAELIALTQALKMAEGKKLNVYTDSRYAFATAHIHGEIYRRRGWLTSEGKEIKNKDEILALLKALFLPKRLSIIHCPGHQKGHSAEARGNRMADQAARKAAITETPDTSTLLAGKRTADGSEFEKRTADGSEFESPKKKAKVE

SEQ ID NO: 3067 - protein, 2096 aa, synthetic construct; identical to SEQ ID NO: 2787

SEQ ID NO: 3068 - protein, 2096 aa, synthetic construct
MPAAKRVKLDGGDKKYSIGLDIGTNSVGWAVITDEYKVPSKKFKVLGNTDRHSIKKNLIGALLFDSGETAEATRLKRTARRRYTRRKNRICYLQEIFSNEMAKVDDSFFHRLEESFLVEEDKKHERHPIFGNIVDEVAYHEKYPTIYHLRKKLVDSTDKADLRLIYLALAHMIKFRGHFLIEGDLNPDNSDVDKLFIQLVQTYNQLFEENPINASGVDAKAILSARLSKSRRLENLIAQLPGEKKNGLFGNLIALSLGLTPNFKSNFDLAEDAKLQLSKDTYDDDLDNLLAQIGDQYADLFLAAKNLSDAILLSDILRVNTEITKAPLSASMIKRYDEHHQDLTLLKALVRQQLPEKYKEIFFDQSKNGYAGYIDGGASQEEFYKFIKPILEKMDGTEELLVKLNREDLLRKQRTFDNGSIPHQIHLGELHAILRRQEDFYPFLKDNREKIEKILTFRIPYYVGPLARGNSRFAWMTRKSEETITPWNFEEVVDKGASAQSFIERMTNFDKNLPNEKVLPKHSLLYEYFTVYNELTKVKYVTEGMRKPAFLSGEQKKAIVDLLFKTNRKVTVKQLKEDYFKKIECFDSVEISGVEDRFNASLGTYHDLLKIIKDKDFLDNEENEDILEDIVLTLTLFEDREMIEERLKTYAHLFDDKVMKQLKRRRYTGWGRLSRKLINGIRDKQSGKTILDFLKSDGFANRNFMQLIHDDSLTFKEDIQKAQVSGQGDSLHEHIANLAGSPAIKKGILQTVKVVDELVKVMGRHKPENIVIEMARENQTTQKGQKNSRERMKRIEEGIKELGSQILKEHPVENTQLQNEKLYLYYLQNGRDMYVDQELDINRLSDYDVDHIVPQSFLKDDSIDNKVLTRSDKARGKSDNVPSEEVVKKMKNYWRQLLNAKLITQRKFDNLTKAERGGLSELDKAGFIKRQLVETRQITKHVAQILDSRMNTKYDENDKLIREVKVITLKSKLVSDFRKDFQFYKVREINNYHHAHDAYLNAVVGTALIKKYPKLESEFVYGDYKVYDVRKMIAKSEQEIGKATAKYFFYSNIMNFFKTEITLANGEIRKRPLIETNGETGEIVWDKGRDFATVRKVLSMPQVNIVKKTEVQTGGFSKESILPKRNSDKLIARKKDWDPKKYGGFDSPTVAYSVLVVAKVEKGKSKKLKSVKELLGITIMERSSFEKNPIDFLEAKGYKEVKKDLIIKLPKYSLFELENGRKRMLASAGELQKGNELALPSKYVNFLYLASHYEKLKGSPEDNEQKQLFVEQHKHYLDEIIEQISEFSKRVILADANLDKVLSAYNKHRDKPIREQAENIIHLFTLTNLGAPAAFKYFDTTIDRKRYTSTKEVLDATLIHQSITGLYETRIDLSQLGGDGGPAPEAAAKGGGGGTLNIEDEHRLHETSKEPDVSLGSTWLSDFPQAWAETGGMGLAVRQAPLIIPLKATSTPVSIKQYPMSQEARLGIKPHIQRLLDQGILVPCQSPWNTPLLPVKKPGTNDYRPVQDLREVNKRVEDIHPTVPNPYNLLSGLPPSHQWYTVLDLKDAFFCLRLHPTSQPLFAFEWRDPEMGISGQLTWTRLPQGFKNSPTLFNEALHRDLADFRIQHPDLILLQYVDDLLLAATSELDCQQGTRALLQTLGNLGYRASAKKAQICQKQVKYLGYLLKEGQRWLTEARKETVMGQPTPKTPRQLREFLGKAGFCRLFIPGFAEMAAPLYPLTKPGTLFNWGPDQQKAYQEIKQALLTAPALGLPDLTKPFELFVDEKQGYAKGVLTQKLGPWRRPVAYLSKKLDPVAAGWPPCLRMVAAIAVLTKDAGKLTMGQPLVILAPHAVEALVKQPPDRWLSNARMTHYQALLLDTDRVQFGPVVALNPATLLPLPEEGLQHNCLDILAEAHGTRPDLTDQPLPDADHTWYTDGSSLLQEGQRKAGAAVTTETEVIWAKALPAGTSAQRAELIALTQALKMAEGKKLNVYTDSRYAFATAHIHGEIYRRRGWLTSEGKEIKNKDEILALLKALFLPKRLSIIHCPGHQKGHSAEARGNRMADQAARKAAITETPDTSTLLAGKRTADGSEFEKRTADGSEFESPKKKAKVE

SEQ ID NO: 3069 - protein, 2088 aa, synthetic construct
MPAAKRVKLDGGDKKYSIGLDIGTNSVGWAVITDEYKVPSKKFKVLGNTDRHSIKKNLIGALLFDSGETAEATRLKRTARRRYTRRKNRICYLQEIFSNEMAKVDDSFFHRLEESFLVEEDKKHERHPIFGNIVDEVAYHEKYPTIYHLRKKLVDSTDKADLRLIYLALAHMIKFRGHFLIEGDLNPDNSDVDKLFIQLVQTYNQLFEENPINASGVDAKAILSARLSKSRRLENLIAQLPGEKKNGLFGNLIALSLGLTPNFKSNFDLAEDAKLQLSKDTYDDDLDNLLAQIGDQYADLFLAAKNLSDAILLSDILRVNTEITKAPLSASMIKRYDEHHQDLTLLKALVRQQLPEKYKEIFFDQSKNGYAGYIDGGASQEEFYKFIKPILEKMDGTEELLVKLNREDLLRKQRTFDNGSIPHQIHLGELHAILRRQEDFYPFLKDNREKIEKILTFRIPYYVGPLARGNSRFAWMTRKSEETITPWNFEEVVDKGASAQSFIERMTNFDKNLPNEKVLPKHSLLYEYFTVYNELTKVKYVTEGMRKPAFLSGEQKKAIVDLLFKTNRKVTVKQLKEDYFKKIECFDSVEISGVEDRFNASLGTYHDLLKIIKDKDFLDNEENEDILEDIVLTLTLFEDREMIEERLKTYAHLFDDKVMKQLKRRRYTGWGRLSRKLINGIRDKQSGKTILDFLKSDGFANRNFMQLIHDDSLTFKEDIQKAQVSGQGDSLHEHIANLAGSPAIKKGILQTVKVVDELVKVMGRHKPENIVIEMARENQTTQKGQKNSRERMKRIEEGIKELGSQILKEHPVENTQLQNEKLYLYYLQNGRDMYVDQELDINRLSDYDVDHIVPQSFLKDDSIDNKVLTRSDKARGKSDNVPSEEVVKKMKNYWRQLLNAKLITQRKFDNLTKAERGGLSELDKAGFIKRQLVETRQITKHVAQILDSRMNTKYDENDKLIREVKVITLKSKLVSDFRKDFQFYKVREINNYHHAHDAYLNAVVGTALIKKYPKLESEFVYGDYKVYDVRKMIAKSEQEIGKATAKYFFYSNIMNFFKTEITLANGEIRKRPLIETNGETGEIVWDKGRDFATVRKVLSMPQVNIVKKTEVQTGGFSKESILPKRNSDKLIARKKDWDPKKYGGFDSPTVAYSVLVVAKVEKGKSKKLKSVKELLGITIMERSSFEKNPIDFLEAKGYKEVKKDLIIKLPKYSLFELENGRKRMLASAGELQKGNELALPSKYVNFLYLASHYEKLKGSPEDNEQKQLFVEQHKHYLDEIIEQISEFSKRVILADANLDKVLSAYNKHRDKPIREQAENIIHLFTLTNLGAPAAFKYFDTTIDRKRYTSTKEVLDATLIHQSITGLYETRIDLSQLGGDGGGSSGGTLNIEDEHRLHETSKEPDVSLGSTWLSDFPQAWAETGGMGLAVRQAPLIIPLKATSTPVSIKQYPMSQEARLGIKPHIQRLLDQGILVPCQSPWNTPLLPVKKPGTNDYRPVQDLREVNKRVEDIHPTVPNPYNLLSGLPPSHQWYTVLDLKDAFFCLRLHPTSQPLFAFEWRDPEMGISGQLTWTRLPQGFKNSPTLFNEALHRDLADFRIQHPDLILLQYVDDLLLAATSELDCQQGTRALLQTLGNLGYRASAKKAQICQKQVKYLGYLLKEGQRWLTEARKETVMGQPTPKTPRQLREFLGKAGFCRLFIPGFAEMAAPLYPLTKPGTLFNWGPDQQKAYQEIKQALLTAPALGLPDLTKPFELFVDEKQGYAKGVLTQKLGPWRRPVAYLSKKLDPVAAGWPPCLRMVAAIAVLTKDAGKLTMGQPLVILAPHAVEALVKQPPDRWLSNARMTHYQALLLDTDRVQFGPVVALNPATLLPLPEEGLQHNCLDILAEAHGTRPDLTDQPLPDADHTWYTDGSSLLQEGQRKAGAAVTTETEVIWAKALPAGTSAQRAELIALTQALKMAEGKKLNVYTDSRYAFATAHIHGEIYRRRGWLTSEGKEIKNKDEILALLKALFLPKRLSIIHCPGHQKGHSAEARGNRMADQAARKAAITETPDTSTLLAGKRTADGSEFEKRTADGSEFESPKKKAKVE

SEQ ID NO: 3070 - protein, 2094 aa, synthetic construct; identical to SEQ ID NO: 2809

SEQ ID NO: 3071 - protein, 2097 aa, synthetic construct; identical to SEQ ID NO: 2806

SEQ ID NO: 3072 - protein, 2096 aa, synthetic construct
MPAAKRVKLDGGDKKYSIGLDIGTNSVGWAVITDEYKVPSKKFKVLGNTDRHSIKKNLIGALLFDSGETAEATRLKRTARRRYTRRKNRICYLQEIFSNEMAKVDDSFFHRLEESFLVEEDKKHERHPIFGNIVDEVAYHEKYPTIYHLRKKLVDSTDKADLRLIYLALAHMIKFRGHFLIEGDLNPDNSDVDKLFIQLVQTYNQLFEENPINASGVDAKAILSARLSKSRRLENLIAQLPGEKKNGLFGNLIALSLGLTPNFKSNFDLAEDAKLQLSKDTYDDDLDNLLAQIGDQYADLFLAAKNLSDAILLSDILRVNTEITKAPLSASMIKRYDEHHQDLTLLKALVRQQLPEKYKEIFFDQSKNGYAGYIDGGASQEEFYKFIKPILEKMDGTEELLVKLNREDLLRKQRTFDNGSIPHQIHLGELHAILRRQEDFYPFLKDNREKIEKILTFRIPYYVGPLARGNSRFAWMTRKSEETITPWNFEEVVDKGASAQSFIERMTNFDKNLPNEKVLPKHSLLYEYFTVYNELTKVKYVTEGMRKPAFLSGEQKKAIVDLLFKTNRKVTVKQLKEDYFKKIECFDSVEISGVEDRFNASLGTYHDLLKIIKDKDFLDNEENEDILEDIVLTLTLFEDREMIEERLKTYAHLFDDKVMKQLKRRRYTGWGRLSRKLINGIRDKQSGKTILDFLKSDGFANRNFMQLIHDDSLTFKEDIQKAQVSGQGDSLHEHIANLAGSPAIKKGILQTVKVVDELVKVMGRHKPENIVIEMARENQTTQKGQKNSRERMKRIEEGIKELGSQILKEHPVENTQLQNEKLYLYYLQNGRDMYVDQELDINRLSDYDVDHIVPQSFLKDDSIDNKVLTRSDKARGKSDNVPSEEVVKKMKNYWRQLLNAKLITQRKFDNLTKAERGGLSELDKAGFIKRQLVETRQITKHVAQILDSRMNTKYDENDKLIREVKVITLKSKLVSDFRKDFQFYKVREINNYHHAHDAYLNAVVGTALIKKYPKLESEFVYGDYKVYDVRKMIAKSEQEIGKATAKYFFYSNIMNFFKTEITLANGEIRKRPLIETNGETGEIVWDKGRDFATVRKVLSMPQVNIVKKTEVQTGGFSKESILPKRNSDKLIARKKDWDPKKYGGFDSPTVAYSVLVVAKVEKGKSKKLKSVKELLGITIMERSSFEKNPIDFLEAKGYKEVKKDLIIKLPKYSLFELENGRKRMLASAGELQKGNELALPSKYVNFLYLASHYEKLKGSPEDNEQKQLFVEQHKHYLDEIIEQISEFSKRVILADANLDKVLSAYNKHRDKPIREQAENIIHLFTLTNLGAPAAFKYFDTTIDRKRYTSTKEVLDATLIHQSITGLYETRIDLSQLGGDGGGSSEAAAKGGGGGTLNIEDEHRLHETSKEPDVSLGSTWLSDFPQAWAETGGMGLAVRQAPLIIPLKATSTPVSIKQYPMSQEARLGIKPHIQRLLDQGILVPCQSPWNTPLLPVKKPGTNDYRPVQDLREVNKRVEDIHPTVPNPYNLLSGLPPSHQWYTVLDLKDAFFCLRLHPTSQPLFAFEWRDPEMGISGQLTWTRLPQGFKNSPTLFNEALHRDLADFRIQHPDLILLQYVDDLLLAATSELDCQQGTRALLQTLGNLGYRASAKKAQICQKQVKYLGYLLKEGQRWLTEARKETVMGQPTPKTPRQLREFLGKAGFCRLFIPGFAEMAAPLYPLTKPGTLFNWGPDQQKAYQEIKQALLTAPALGLPDLTKPFELFVDEKQGYAKGVLTQKLGPWRRPVAYLSKKLDPVAAGWPPCLRMVAAIAVLTKDAGKLTMGQPLVILAPHAVEALVKQPPDRWLSNARMTHYQALLLDTDRVQFGPVVALNPATLLPLPEEGLQHNCLDILAEAHGTRPDLTDQPLPDADHTWYTDGSSLLQEGQRKAGAAVTTETEVIWAKALPAGTSAQRAELIALTQALKMAEGKKLNVYTDSRYAFATAHIHGEIYRRRGWLTSEGKEIKNKDEILALLKALFLPKRLSIIHCPGHQKGHSAEARGNRMADQAARKAAITETPDTSTLLAGKRTADGSEFEKRTADGSEFESPKKKAKVE

SEQ ID NO: 3073 - protein, 2091 aa, synthetic construct
MPAAKRVKLDGGDKKYSIGLDIGTNSVGWAVITDEYKVPSKKFKVLGNTDRHSIKKNLIGALLFDSGETAEATRLKRTARRRYTRRKNRICYLQEIFSNEMAKVDDSFFHRLEESFLVEEDKKHERHPIFGNIVDEVAYHEKYPTIYHLRKKLVDSTDKADLRLIYLALAHMIKFRGHFLIEGDLNPDNSDVDKLFIQLVQTYNQLFEENPINASGVDAKAILSARLSKSRRLENLIAQLPGEKKNGLFGNLIALSLGLTPNFKSNFDLAEDAKLQLSKDTYDDDLDNLLAQIGDQYADLFLAAKNLSDAILLSDILRVNTEITKAPLSASMIKRYDEHHQDLTLLKALVRQQLPEKYKEIFFDQSKNGYAGYIDGGASQEEFYKFIKPILEKMDGTEELLVKLNREDLLRKQRTFDNGSIPHQIHLGELHAILRRQEDFYPFLKDNREKIEKILTFRIPYYVGPLARGNSRFAWMTRKSEETITPWNFEEVVDKGASAQSFIERMTNFDKNLPNEKVLPKHSLLYEYFTVYNELTKVKYVTEGMRKPAFLSGEQKKAIVDLLFKTNRKVTVKQLKEDYFKKIECFDSVEISGVEDRFNASLGTYHDLLKIIKDKDFLDNEENEDILEDIVLTLTLFEDREMIEERLKTYAHLFDDKVMKQLKRRRYTGWGRLSRKLINGIRDKQSGKTILDFLKSDGFANRNFMQLIHDDSLTFKEDIQKAQVSGQGDSLHEHIANLAGSPAIKKGILQTVKVVDELVKVMGRHKPENIVIEMARENQTTQKGQKNSRERMKRIEEGIKELGSQILKEHPVENTQLQNEKLYLYYLQNGRDMYVDQELDINRLSDYDVDHIVPQSFLKDDSIDNKVLTRSDKARGKSDNVPSEEVVKKMKNYWRQLLNAKLITQRKFDNLTKAERGGLSELDKAGFIKRQLVETRQITKHVAQILDSRMNTKYDENDKLIREVKVITLKSKLVSDFRKDFQFYKVREINNYHHAHDAYLNAVVGTALIKKYPKLESEFVYGDYKVYDVRKMIAKSEQEIGKATAKYFFYSNIMNFFKTEITLANGEIRKRPLIETNGETGEIVWDKGRDFATVRKVLSMPQVNIVKKTEVQTGGFSKESILPKRNSDKLIARKKDWDPKKYGGFDSPTVAYSVLVVAKVEKGKSKKLKSVKELLGITIMERSSFEKNPIDFLEAKGYKEVKKDLIIKLPKYSLFELENGRKRMLASAGELQKGNELALPSKYVNFLYLASHYEKLKGSPEDNEQKQLFVEQHKHYLDEIIEQISEFSKRVILADANLDKVLSAYNKHRDKPIREQAENIIHLFTLTNLGAPAAFKYFDTTIDRKRYTSTKEVLDATLIHQSITGLYETRIDLSQLGGDGGGGGPAPGGTLNIEDEHRLHETSKEPDVSLGSTWLSDFPQAWAETGGMGLAVRQAPLIIPLKATSTPVSIKQYPMSQEARLGIKPHIQRLLDQGILVPCQSPWNTPLLPVKKPGTNDYRPVQDLREVNKRVEDIHPTVPNPYNLLSGLPPSHQWYTVLDLKDAFFCLRLHPTSQPLFAFEWRDPEMGISGQLTWTRLPQGFKNSPTLFNEALHRDLADFRIQHPDLILLQYVDDLLLAATSELDCQQGTRALLQTLGNLGYRASAKKAQICQKQVKYLGYLLKEGQRWLTEARKETVMGQPTPKTPRQLREFLGKAGFCRLFIPGFAEMAAPLYPLTKPGTLFNWGPDQQKAYQEIKQALLTAPALGLPDLTKPFELFVDEKQGYAKGVLTQKLGPWRRPVAYLSKKLDPVAAGWPPCLRMVAAIAVLTKDAGKLTMGQPLVILAPHAVEALVKQPPDRWLSNARMTHYQALLLDTDRVQFGPVVALNPATLLPLPEEGLQHNCLDILAEAHGTRPDLTDQPLPDADHTWYTDGSSLLQEGQRKAGAAVTTETEVIWAKALPAGTSAQRAELIALTQALKMAEGKKLNVYTDSRYAFATAHIHGEIYRRRGWLTSEGKEIKNKDEILALLKALFLPKRLSIIHCPGHQKGHSAEARGNRMADQAARKAAITETPDTSTLLAGKRTADGSEFEKRTADGSEFESPKKKAKVE

SEQ ID NO: 3074 - protein, 2091 aa, synthetic construct; identical to SEQ ID NO: 2853

SEQ ID NO: 3075 - protein, 2094 aa, synthetic construct
MPAAKRVKLDGGDKKYSIGLDIGTNSVGWAVITDEYKVPSKKFKVLGNTDRHSIKKNLIGALLFDSGETAEATRLKRTARRRYTRRKNRICYLQEIFSNEMAKVDDSFFHRLEESFLVEEDKKHERHPIFGNIVDEVAYHEKYPTIYHLRKKLVDSTDKADLRLIYLALAHMIKFRGHFLIEGDLNPDNSDVDKLFIQLVQTYNQLFEENPINASGVDAKAILSARLSKSRRLENLIAQLPGEKKNGLFGNLIALSLGLTPNFKSNFDLAEDAKLQLSKDTYDDDLDNLLAQIGDQYADLFLAAKNLSDAILLSDILRVNTEITKAPLSASMIKRYDEHHQDLTLLKALVRQQLPEKYKEIFFDQSKNGYAGYIDGGASQEEFYKFIKPILEKMDGTEELLVKLNREDLLRKQRTFDNGSIPHQIHLGELHAILRRQEDFYPFLKDNREKIEKILTFRIPYYVGPLARGNSRFAWMTRKSEETITPWNFEEVVDKGASAQSFIERMTNFDKNLPNEKVLPKHSLLYEYFTVYNELTKVKYVTEGMRKPAFLSGEQKKAIVDLLFKTNRKVTVKQLKEDYFKKIECFDSVEISGVEDRFNASLGTYHDLLKIIKDKDFLDNEENEDILEDIVLTLTLFEDREMIEERLKTYAHLFDDKVMKQLKRRRYTGWGRLSRKLINGIRDKQSGKTILDFLKSDGFANRNFMQLIHDDSLTFKEDIQKAQVSGQGDSLHEHIANLAGSPAIKKGILQTVKVVDELVKVMGRHKPENIVIEMARENQTTQKGQKNSRERMKRIEEGIKELGSQILKEHPVENTQLQNEKLYLYYLQNGRDMYVDQELDINRLSDYDVDHIVPQSFLKDDSIDNKVLTRSDKARGKSDNVPSEEVVKKMKNYWRQLLNAKLITQRKFDNLTKAERGGLSELDKAGFIKRQLVETRQITKHVAQILDSRMNTKYDENDKLIREVKVITLKSKLVSDFRKDFQFYKVREINNYHHAHDAYLNAVVGTALIKKYPKLESEFVYGDYKVYDVRKMIAKSEQEIGKATAKYFFYSNIMNFFKTEITLANGEIRKRPLIETNGETGEIVWDKGRDFATVRKVLSMPQVNIVKKTEVQTGGFSKESILPKRNSDKLIARKKDWDPKKYGGFDSPTVAYSVLVVAKVEKGKSKKLKSVKELLGITIMERSSFEKNPIDFLEAKGYKEVKKDLIIKLPKYSLFELENGRKRMLASAGELQKGNELALPSKYVNFLYLASHYEKLKGSPEDNEQKQLFVEQHKHYLDEIIEQISEFSKRVILADANLDKVLSAYNKHRDKPIREQAENIIHLFTLTNLGAPAAFKYFDTTIDRKRYTSTKEVLDATLIHQSITGLYETRIDLSQLGGDGGGSSGGSPAPGGTLNIEDEHRLHETSKEPDVSLGSTWLSDFPQAWAETGGMGLAVRQAPLIIPLKATSTPVSIKQYPMSQEARLGIKPHIQRLLDQGILVPCQSPWNTPLLPVKKPGTNDYRPVQDLREVNKRVEDIHPTVPNPYNLLSGLPPSHQWYTVLDLKDAFFCLRLHPTSQPLFAFEWRDPEMGISGQLTWTRLPQGFKNSPTLFNEALHRDLADFRIQHPDLILLQYVDDLLLAATSELDCQQGTRALLQTLGNLGYRASAKKAQICQKQVKYLGYLLKEGQRWLTEARKETVMGQPTPKTPRQLREFLGKAGFCRLFIPGFAEMAAPLYPLTKPGTLFNWGPDQQKAYQEIKQALLTAPALGLPDLTKPFELFVDEKQGYAKGVLTQKLGPWRRPVAYLSKKLDPVAAGWPPCLRMVAAIAVLTKDAGKLTMGQPLVILAPHAVEALVKQPPDRWLSNARMTHYQALLLDTDRVQFGPVVALNPATLLPLPEEGLQHNCLDILAEAHGTRPDLTDQPLPDADHTWYTDGSSLLQEGQRKAGAAVTTETEVIWAKALPAGTSAQRAELIALTQALKMAEGKKLNVYTDSRYAFATAHIHGEIYRRRGWLTSEGKEIKNKDEILALLKALFLPKRLSIIHCPGHQKGHSAEARGNRMADQAARKAAITETPDTSTLLAGKRTADGSEFEKRTADGSEFESPKKKAKVE

SEQ ID NO: 3076 - protein, 2091 aa, synthetic construct; identical to SEQ ID NO: 2780

SEQ ID NO: 3077 - protein, 2101 aa, synthetic construct; identical to SEQ ID NO: 2858

SEQ ID NO: 3078 - protein, 2093 aa, synthetic construct; identical to SEQ ID NO: 2821

SEQ ID NO: 3079 - protein, 2100 aa, synthetic construct; identical to SEQ ID NO: 2788

SEQ ID NO: 3080 - protein, 2096 aa, synthetic construct
MPAAKRVKLDGGDKKYSIGLDIGTNSVGWAVITDEYKVPSKKFKVLGNTDRHSIKKNLIGALLFDSGETAEATRLKRTARRRYTRRKNRICYLQEIFSNEMAKVDDSFFHRLEESFLVEEDKKHERHPIFGNIVDEVAYHEKYPTIYHLRKKLVDSTDKADLRLIYLALAHMIKFRGHFLIEGDLNPDNSDVDKLFIQLVQTYNQLFEENPINASGVDAKAILSARLSKSRRLENLIAQLPGEKKNGLFGNLIALSLGLTPNFKSNFDLAEDAKLQLSKDTYDDDLDNLLAQIGDQYADLFLAAKNLSDAILLSDILRVNTEITKAPLSASMIKRYDEHHQDLTLLKALVRQQLPEKYKEIFFDQSKNGYAGYIDGGASQEEFYKFIKPILEKMDGTEELLVKLNREDLLRKQRTFDNGSIPHQIHLGELHAILRRQEDFYPFLKDNREKIEKILTFRIPYYVGPLARGNSRFAWMTRKSEETITPWNFEEVVDKGASAQSFIERMTNFDKNLPNEKVLPKHSLLYEYFTVYNELTKVKYVTEGMRKPAFLSGEQKKAIVDLLFKTNRKVTVKQLKEDYFKKIECFDSVEISGVEDRFNASLGTYHDLLKIIKDKDFLDNEENEDILEDIVLTLTLFEDREMIEERLKTYAHLFDDKVMKQLKRRRYTGWGRLSRKLINGIRDKQSGKTILDFLKSDGFANRNFMQLIHDDSLTFKEDIQKAQVSGQGDSLHEHIANLAGSPAIKKGILQTVKVVDELVKVMGRHKPENIVIEMARENQTTQKGQKNSRERMKRIEEGIKELGSQILKEHPVENTQLQNEKLYLYYLQNGRDMYVDQELDINRLSDYDVDHIVPQSFLKDDSIDNKVLTRSDKARGKSDNVPSEEVVKKMKNYWRQLLNAKLITQRKFDNLTKAERGGLSELDKAGFIKRQLVETRQITKHVAQILDSRMNTKYDENDKLIREVKVITLKSKLVSDFRKDFQFYKVREINNYHHAHDAYLNAVVGTALIKKYPKLESEFVYGDYKVYDVRKMIAKSEQEIGKATAKYFFYSNIMNFFKTEITLANGEIRKRPLIETNGETGEIVWDKGRDFATVRKVLSMPQVNIVKKTEVQTGGFSKESILPKRNSDKLIARKKDWDPKKYGGFDSPTVAYSVLVVAKVEKGKSKKLKSVKELLGITIMERSSFEKNPIDFLEAKGYKEVKKDLIIKLPKYSLFELENGRKRMLASAGELQKGNELALPSKYVNFLYLASHYEKLKGSPEDNEQKQLFVEQHKHYLDEIIEQISEFSKRVILADANLDKVLSAYNKHRDKPIREQAENIIHLFTLTNLGAPAAFKYFDTTIDRKRYTSTKEVLDATLIHQSITGLYETRIDLSQLGGDGGEAAAKPAPGGSGGTLNIEDEHRLHETSKEPDVSLGSTWLSDFPQAWAETGGMGLAVRQAPLIIPLKATSTPVSIKQYPMSQEARLGIKPHIQRLLDQGILVPCQSPWNTPLLPVKKPGTNDYRPVQDLREVNKRVEDIHPTVPNPYNLLSGLPPSHQWYTVLDLKDAFFCLRLHPTSQPLFAFEWRDPEMGISGQLTWTRLPQGFKNSPTLFNEALHRDLADFRIQHPDLILLQYVDDLLLAATSELDCQQGTRALLQTLGNLGYRASAKKAQICQKQVKYLGYLLKEGQRWLTEARKETVMGQPTPKTPRQLREFLGKAGFCRLFIPGFAEMAAPLYPLTKPGTLFNWGPDQQKAYQEIKQALLTAPALGLPDLTKPFELFVDEKQGYAKGVLTQKLGPWRRPVAYLSKKLDPVAAGWPPCLRMVAAIAVLTKDAGKLTMGQPLVILAPHAVEALVKQPPDRWLSNARMTHYQALLLDTDRVQFGPVVALNPATLLPLPEEGLQHNCLDILAEAHGTRPDLTDQPLPDADHTWYTDGSSLLQEGQRKAGAAVTTETEVIWAKALPAGTSAQRAELIALTQALKMAEGKKLNVYTDSRYAFATAHIHGEIYRRRGWLTSEGKEIKNKDEILALLKALFLPKRLSIIHCPGHQKGHSAEARGNRMADQAARKAAITETPDTSTLLAGKRTADGSEFEKRTADGSEFESPKKKAKVE

SEQ ID NO: 3081 - protein, 2115 aa, synthetic construct; identical to SEQ ID NO: 2827

SEQ ID NO: 3082 - protein, 2093 aa, synthetic construct; identical to SEQ ID NO: 2856

SEQ ID NO: 3083 - protein, 2096 aa, synthetic construct; identical to SEQ ID NO: 2786

SEQ ID NO: 3084 - protein, 2098 aa, synthetic construct; identical to SEQ ID NO: 2797

SEQ ID NO: 3085 - protein, 2096 aa, synthetic construct; identical to SEQ ID NO: 2830

SEQ ID NO: 3086 - protein, 2094 aa, synthetic construct
MPAAKRVKLDGGDKKYSIGLDIGTNSVGWAVITDEYKVPSKKFKVLGNTDRHSIKKNLIGALLFDSGETAEATRLKRTARRRYTRRKNRICYLQEIFSNEMAKVDDSFFHRLEESFLVEEDKKHERHPIFGNIVDEVAYHEKYPTIYHLRKKLVDSTDKADLRLIYLALAHMIKFRGHFLIEGDLNPDNSDVDKLFIQLVQTYNQLFEENPINASGVDAKAILSARLSKSRRLENLIAQLPGEKKNGLFGNLIALSLGLTPNFKSNFDLAEDAKLQLSKDTYDDDLDNLLAQIGDQYADLFLAAKNLSDAILLSDILRVNTEITKAPLSASMIKRYDEHHQDLTLLKALVRQQLPEKYKEIFFDQSKNGYAGYIDGGASQEEFYKFIKPILEKMDGTEELLVKLNREDLLRKQRTFDNGSIPHQIHLGELHAILRRQEDFYPFLKDNREKIEKILTFRIPYYVGPLARGNSRFAWMTRKSEETITPWNFEEVVDKGASAQSFIERMTNFDKNLPNEKVLPKHSLLYEYFTVYNELTKVKYVTEGMRKPAFLSGEQKKAIVDLLFKTNRKVTVKQLKEDYFKKIECFDSVEISGVEDRFNASLGTYHDLLKIIKDKDFLDNEENEDILEDIVLTLTLFEDREMIEERLKTYAHLFDDKVMKQLKRRRYTGWGRLSRKLINGIRDKQSGKTILDFLKSDGFANRNFMQLIHDDSLTFKEDIQKAQVSGQGDSLHEHIANLAGSPAIKKGILQTVKVVDELVKVMGRHKPENIVIEMARENQTTQKGQKNSRERMKRIEEGIKELGSQILKEHPVENTQLQNEKLYLYYLQNGRDMYVDQELDINRLSDYDVDHIVPQSFLKDDSIDNKVLTRSDKARGKSDNVPSEEVVKKMKNYWRQLLNAKLITQRKFDNLTKAERGGLSELDKAGFIKRQLVETRQITKHVAQILDSRMNTKYDENDKLIREVKVITLKSKLVSDFRKDFQFYKVREINNYHHAHDAYLNAVVGTALIKKYPKLESEFVYGDYKVYDVRKMIAKSEQEIGKATAKYFFYSNIMNFFKTEITLANGEIRKRPLIETNGETGEIVWDKGRDFATVRKVLSMPQVNIVKKTEVQTGGFSKESILPKRNSDKLIARKKDWDPKKYGGFDSPTVAYSVLVVAKVEKGKSKKLKSVKELLGITIMERSSFEKNPIDFLEAKGYKEVKKDLIIKLPKYSLFELENGRKRMLASAGELQKGNELALPSKYVNFLYLASHYEKLKGSPEDNEQKQLFVEQHKHYLDEIIEQISEFSKRVILADANLDKVLSAYNKHRDKPIREQAENIIHLFTLTNLGAPAAFKYFDTTIDRKRYTSTKEVLDATLIHQSITGLYETRIDLSQLGGDGGPAPAPAPAPGGTLNIEDEHRLHETSKEPDVSLGSTWLSDFPQAWAETGGMGLAVRQAPLIIPLKATSTPVSIKQYPMSQEARLGIKPHIQRLLDQGILVPCQSPWNTPLLPVKKPGTNDYRPVQDLREVNKRVEDIHPTVPNPYNLLSGLPPSHQWYTVLDLKDAFFCLRLHPTSQPLFAFEWRDPEMGISGQLTWTRLPQGFKNSPTLFNEALHRDLADFRIQHPDLILLQYVDDLLLAATSELDCQQGTRALLQTLGNLGYRASAKKAQICQKQVKYLGYLLKEGQRWLTEARKETVMGQPTPKTPRQLREFLGKAGFCRLFIPGFAEMAAPLYPLTKPGTLFNWGPDQQKAYQEIKQALLTAPALGLPDLTKPFELFVDEKQGYAKGVLTQKLGPWRRPVAYLSKKLDPVAAGWPPCLRMVAAIAVLTKDAGKLTMGQPLVILAPHAVEALVKQPPDRWLSNARMTHYQALLLDTDRVQFGPVVALNPATLLPLPEEGLQHNCLDILAEAHGTRPDLTDQPLPDADHTWYTDGSSLLQEGQRKAGAAVTTETEVIWAKALPAGTSAQRAELIALTQALKMAEGKKLNVYTDSRYAFATAHIHGEIYRRRGWLTSEGKEIKNKDEILALLKALFLPKRLSIIHCPGHQKGHSAEARGNRMADQAARKAAITETPDTSTLLAGKRTADGSEFEKRTADGSEFESPKKKAKVE

SEQ ID NO: 3087 - protein, 2091 aa, synthetic construct; identical to SEQ ID NO: 2808

SEQ ID NO: 3088 - protein, 2096 aa, synthetic construct; identical to SEQ ID NO: 2857

SEQ ID NO: 3089 - protein, 2091 aa, synthetic construct; identical to SEQ ID NO: 2855

SEQ ID NO: 3090 - protein, 2094 aa, synthetic construct; identical to SEQ ID NO: 2847

SEQ ID NO: 3091 - protein, 2096 aa, synthetic construct; identical to SEQ ID NO: 2798

SEQ ID NO: 3092 - protein, 2100 aa, synthetic construct; identical to SEQ ID NO: 2819

SEQ ID NO: 3093 - protein, 2094 aa, synthetic construct; identical to SEQ ID NO: 2835

SEQ ID NO: 3094 - protein, 2089 aa, synthetic construct
MPAAKRVKLDGGDKKYSIGLDIGTNSVGWAVITDEYKVPSKKFKVLGNTDRHSIKKNLIGALLFDSGETAEATRLKRTARRRYTRRKNRICYLQEIFSNEMAKVDDSFFHRLEESFLVEEDKKHERHPIFGNIVDEVAYHEKYPTIYHLRKKLVDSTDKADLRLIYLALAHMIKFRGHFLIEGDLNPDNSDVDKLFIQLVQTYNQLFEENPINASGVDAKAILSARLSKSRRLENLIAQLPGEKKNGLFGNLIALSLGLTPNFKSNFDLAEDAKLQLSKDTYDDDLDNLLAQIGDQYADLFLAAKNLSDAILLSDILRVNTEITKAPLSASMIKRYDEHHQDLTLLKALVRQQLPEKYKEIFFDQSKNGYAGYIDGGASQEEFYKFIKPILEKMDGTEELLVKLNREDLLRKQRTFDNGSIPHQIHLGELHAILRRQEDFYPFLKDNREKIEKILTFRIPYYVGPLARGNSRFAWMTRKSEETITPWNFEEVVDKGASAQSFIERMTNFDKNLPNEKVLPKHSLLYEYFTVYNELTKVKYVTEGMRKPAFLSGEQKKAIVDLLFKTNRKVTVKQLKEDYFKKIECFDSVEISGVEDRFNASLGTYHDLLKIIKDKDFLDNEENEDILEDIVLTLTLFEDREMIEERLKTYAHLFDDKVMKQLKRRRYTGWGRLSRKLINGIRDKQSGKTILDFLKSDGFANRNFMQLIHDDSLTFKEDIQKAQVSGQGDSLHEHIANLAGSPAIKKGILQTVKVVDELVKVMGRHKPENIVIEMARENQTTQKGQKNSRERMKRIEEGIKELGSQILKEHPVENTQLQNEKLYLYYLQNGRDMYVDQELDINRLSDYDVDHIVPQSFLKDDSIDNKVLTRSDKARGKSDNVPSEEVVKKMKNYWRQLLNAKLITQRKFDNLTKAERGGLSELDKAGFIKRQLVETRQITKHVAQILDSRMNTKYDENDKLIREVKVITLKSKLVSDFRKDFQFYKVREINNYHHAHDAYLNAVVGTALIKKYPKLESEFVYGDYKVYDVRKMIAKSEQEIGKATAKYFFYSNIMNFFKTEITLANGEIRKRPLIETNGETGEIVWDKGRDFATVRKVLSMPQVNIVKKTEVQTGGFSKESILPKRNSDKLIARKKDWDPKKYGGFDSPTVAYSVLVVAKVEKGKSKKLKSVKELLGITIMERSSFEKNPIDFLEAKGYKEVKKDLIIKLPKYSLFELENGRKRMLASAGELQKGNELALPSKYVNFLYLASHYEKLKGSPEDNEQKQLFVEQHKHYLDEIIEQISEFSKRVILADANLDKVLSAYNKHRDKPIREQAENIIHLFTLTNLGAPAAFKYFDTTIDRKRYTSTKEVLDATLIHQSITGLYETRIDLSQLGGDGGGGGGGGTLNIEDEHRLHETSKEPDVSLGSTWLSDFPQAWAETGGMGLAVRQAPLIIPLKATSTPVSIKQYPMSQEARLGIKPHIQRLLDQGILVPCQSPWNTPLLPVKKPGTNDYRPVQDLREVNKRVEDIHPTVPNPYNLLSGLPPSHQWYTVLDLKDAFFCLRLHPTSQPLFAFEWRDPEMGISGQLTWTRLPQGFKNSPTLFNEALHRDLADFRIQHPDLILLQYVDDLLLAATSELDCQQGTRALLQTLGNLGYRASAKKAQICQKQVKYLGYLLKEGQRWLTEARKETVMGQPTPKTPRQLREFLGKAGFCRLFIPGFAEMAAPLYPLTKPGTLFNWGPDQQKAYQEIKQALLTAPALGLPDLTKPFELFVDEKQGYAKGVLTQKLGPWRRPVAYLSKKLDPVAAGWPPCLRMVAAIAVLTKDAGKLTMGQPLVILAPHAVEALVKQPPDRWLSNARMTHYQALLLDTDRVQFGPVVALNPATLLPLPEEGLQHNCLDILAEAHGTRPDLTDQPLPDADHTWYTDGSSLLQEGQRKAGAAVTTETEVIWAKALPAGTSAQRAELIALTQALKMAEGKKLNVYTDSRYAFATAHIHGEIYRRRGWLTSEGKEIKNKDEILALLKALFLPKRLSIIHCPGHQKGHSAEARGNRMADQAARKAAITETPDTSTLLAGKRTADGSEFEKRTADGSEFESPKKKAKVE

SEQ ID NO: 3095 - protein, 2088 aa, synthetic construct
MPAAKRVKLDGGDKKYSIGLDIGTNSVGWAVITDEYKVPSKKFKVLGNTDRHSIKKNLIGALLFDSGETAEATRLKRTARRRYTRRKNRICYLQEIFSNEMAKVDDSFFHRLEESFLVEEDKKHERHPIFGNIVDEVAYHEKYPTIYHLRKKLVDSTDKADLRLIYLALAHMIKFRGHFLIEGDLNPDNSDVDKLFIQLVQTYNQLFEENPINASGVDAKAILSARLSKSRRLENLIAQLPGEKKNGLFGNLIALSLGLTPNFKSNFDLAEDAKLQLSKDTYDDDLDNLLAQIGDQYADLFLAAKNLSDAILLSDILRVNTEITKAPLSASMIKRYDEHHQDLTLLKALVRQQLPEKYKEIFFDQSKNGYAGYIDGGASQEEFYKFIKPILEKMDGTEELLVKLNREDLLRKQRTFDNGSIPHQIHLGELHAILRRQEDFYPFLKDNREKIEKILTFRIPYYVGPLARGNSRFAWMTRKSEETITPWNFEEVVDKGASAQSFIERMTNFDKNLPNEKVLPKHSLLYEYFTVYNELTKVKYVTEGMRKPAFLSGEQKKAIVDLLFKTNRKVTVKQLKEDYFKKIECFDSVEISGVEDRFNASLGTYHDLLKIIKDKDFLDNEENEDILEDIVLTLTLFEDREMIEERLKTYAHLFDDKVMKQLKRRRYTGWGRLSRKLINGIRDKQSGKTILDFLKSDGFANRNFMQLIHDDSLTFKEDIQKAQVSGQGDSLHEHIANLAGSPAIKKGILQTVKVVDELVKVMGRHKPENIVIEMARENQTTQKGQKNSRERMKRIEEGIKELGSQILKEHPVENTQLQNEKLYLYYLQNGRDMYVDQELDINRLSDYDVDHIVPQSFLKDDSIDNKVLTRSDKARGKSDNVPSEEVVKKMKNYWRQLLNAKLITQRKFDNLTKAERGGLSELDKAGFIKRQLVETRQITKHVAQILDSRMNTKYDENDKLIREVKVITLKSKLVSDFRKDFQFYKVREINNYHHAHDAYLNAVVGTALIKKYPKLESEFVYGDYKVYDVRKMIAKSEQEIGKATAKYFFYSNIMNFFKTEITLANGEIRKRPLIETNGETGEIVWDKGRDFATVRKVLSMPQVNIVKKTEVQTGGFSKESILPKRNSDKLIARKKDWDPKKYGGFDSPTVAYSVLVVAKVEKGKSKKLKSVKELLGITIMERSSFEKNPIDFLEAKGYKEVKKDLIIKLPKYSLFELENGRKRMLASAGELQKGNELALPSKYVNFLYLASHYEKLKGSPEDNEQKQLFVEQHKHYLDEIIEQISEFSKRVILADANLDKVLSAYNKHRDKPIREQAENIIHLFTLTNLGAPAAFKYFDTTIDRKRYTSTKEVLDATLIHQSITGLYETRIDLSQLGGDGGGGSGGTLNIEDEHRLHETSKEPDVSLGSTWLSDFPQAWAETGGMGLAVRQAPLIIPLKATSTPVSIKQYPMSQEARLGIKPHIQRLLDQGILVPCQSPWNTPLLPVKKPGTNDYRPVQDLREVNKRVEDIHPTVPNPYNLLSGLPPSHQWYTVLDLKDAFFCLRLHPTSQPLFAFEWRDPEMGISGQLTWTRLPQGFKNSPTLFNEALHRDLADFRIQHPDLILLQYVDDLLLAATSELDCQQGTRALLQTLGNLGYRASAKKAQICQKQVKYLGYLLKEGQRWLTEARKETVMGQPTPKTPRQLREFLGKAGFCRLFIPGFAEMAAPLYPLTKPGTLFNWGPDQQKAYQEIKQALLTAPALGLPDLTKPFELFVDEKQGYAKGVLTQKLGPWRRPVAYLSKKLDPVAAGWPPCLRMVAAIAVLTKDAGKLTMGQPLVILAPHAVEALVKQPPDRWLSNARMTHYQALLLDTDRVQFGPVVALNPATLLPLPEEGLQHNCLDILAEAHGTRPDLTDQPLPDADHTWYTDGSSLLQEGQRKAGAAVTTETEVIWAKALPAGTSAQRAELIALTQALKMAEGKKLNVYTDSRYAFATAHIHGEIYRRRGWLTSEGKEIKNKDEILALLKALFLPKRLSIIHCPGHQKGHSAEARGNRMADQAARKAAITETPDTSTLLAGKRTADGSEFEKRTADGSEFESPKKKAKVE

SEQ ID NO: 3096 - protein, 2092 aa, synthetic construct; identical to SEQ ID NO: 2790

SEQ ID NO: 3097 - protein, 2093 aa, synthetic construct; identical to SEQ ID NO: 2849

SEQ ID NO: 3098 - protein, 2094 aa, synthetic construct; identical to SEQ ID NO: 2793

SEQ ID NO: 3099 - protein, 2100 aa, synthetic construct; identical to SEQ ID NO: 2836

SEQ ID NO: 3100 - protein, 2092 aa, synthetic construct
MPAAKRVKLDGGDKKYSIGLDIGTNSVGWAVITDEYKVPSKKFKVLGNTDRHSIKKNLIGALLFDSGETAEATRLKRTARRRYTRRKNRICYLQEIFSNEMAKVDDSFFHRLEESFLVEEDKKHERHPIFGNIVDEVAYHEKYPTIYHLRKKLVDSTDKADLRLIYLALAHMIKFRGHFLIEGDLNPDNSDVDKLFIQLVQTYNQLFEENPINASGVDAKAILSARLSKSRRLENLIAQLPGEKKNGLFGNLIALSLGLTPNFKSNFDLAEDAKLQLSKDTYDDDLDNLLAQIGDQYADLFLAAKNLSDAILLSDILRVNTEITKAPLSASMIKRYDEHHQDLTLLKALVRQQLPEKYKEIFFDQSKNGYAGYIDGGASQEEFYKFIKPILEKMDGTEELLVKLNREDLLRKQRTFDNGSIPHQIHLGELHAILRRQEDFYPFLKDNREKIEKILTFRIPYYVGPLARGNSRFAWMTRKSEETITPWNFEEVVDKGASAQSFIERMTNFDKNLPNEKVLPKHSLLYEYFTVYNELTKVKYVTEGMRKPAFLSGEQKKAIVDLLFKTNRKVTVKQLKEDYFKKIECFDSVEISGVEDRFNASLGTYHDLLKIIKDKDFLDNEENEDILEDIVLTLTLFEDREMIEERLKTYAHLFDDKVMKQLKRRRYTGWGRLSRKLINGIRDKQSGKTILDFLKSDGFANRNFMQLIHDDSLTFKEDIQKAQVSGQGDSLHEHIANLAGSPAIKKGILQTVKVVDELVKVMGRHKPENIVIEMARENQTTQKGQKNSRERMKRIEEGIKELGSQILKEHPVENTQLQNEKLYLYYLQNGRDMYVDQELDINRLSDYDVDHIVPQSFLKDDSIDNKVLTRSDKARGKSDNVPSEEVVKKMKNYWRQLLNAKLITQRKFDNLTKAERGGLSELDKAGFIKRQLVETRQITKHVAQILDSRMNTKYDENDKLIREVKVITLKSKLVSDFRKDFQFYKVREINNYHHAHDAYLNAVVGTALIKKYPKLESEFVYGDYKVYDVRKMIAKSEQEIGKATAKYFFYSNIMNFFKTEITLANGEIRKRPLIETNGETGEIVWDKGRDFATVRKVLSMPQVNIVKKTEVQTGGFSKESILPKRNSDKLIARKKDWDPKKYGGFDSPTVAYSVLVVAKVEKGKSKKLKSVKELLGITIMERSSFEKNPIDFLEAKGYKEVKKDLIIKLPKYSLFELENGRKRMLASAGELQKGNELALPSKYVNFLYLASHYEKLKGSPEDNEQKQLFVEQHKHYLDEIIEQISEFSKRVILADANLDKVLSAYNKHRDKPIREQAENIIHLFTLTNLGAPAAFKYFDTTIDRKRYTSTKEVLDATLIHQSITGLYETRIDLSQLGGDGGPAPAPAPGGTLNIEDEHRLHETSKEPDVSLGSTWLSDFPQAWAETGGMGLAVRQAPLIIPLKATSTPVSIKQYPMSQEARLGIKPHIQRLLDQGILVPCQSPWNTPLLPVKKPGTNDYRPVQDLREVNKRVEDIHPTVPNPYNLLSGLPPSHQWYTVLDLKDAFFCLRLHPTSQPLFAFEWRDPEMGISGQLTWTRLPQGFKNSPTLFNEALHRDLADFRIQHPDLILLQYVDDLLLAATSELDCQQGTRALLQTLGNLGYRASAKKAQICQKQVKYLGYLLKEGQRWLTEARKETVMGQPTPKTPRQLREFLGKAGFCRLFIPGFAEMAAPLYPLTKPGTLFNWGPDQQKAYQEIKQALLTAPALGLPDLTKPFELFVDEKQGYAKGVLTQKLGPWRRPVAYLSKKLDPVAAGWPPCLRMVAAIAVLTKDAGKLTMGQPLVILAPHAVEALVKQPPDRWLSNARMTHYQALLLDTDRVQFGPVVALNPATLLPLPEEGLQHNCLDILAEAHGTRPDLTDQPLPDADHTWYTDGSSLLQEGQRKAGAAVTTETEVIWAKALPAGTSAQRAELIALTQALKMAEGKKLNVYTDSRYAFATAHIHGEIYRRRGWLTSEGKEIKNKDEILALLKALFLPKRLSIIHCPGHQKGHSAEARGNRMADQAARKAAITETPDTSTLLAGKRTADGSEFEKRTADGSEFESPKKKAKVE

SEQ ID NO: 3101 - protein, 2094 aa, synthetic construct; identical to SEQ ID NO: 2846

SEQ ID NO: 3102 - protein, 2096 aa, synthetic construct; identical to SEQ ID NO: 2842

SEQ ID NO: 3103 - protein, 2096 aa, synthetic construct; identical to SEQ ID NO: 2815

SEQ ID NO: 3104 - protein, 2096 aa, synthetic construct
MPAAKRVKLDGGDKKYSIGLDIGTNSVGWAVITDEYKVPSKKFKVLGNTDRHSIKKNLIGALLFDSGETAEATRLKRTARRRYTRRKNRICYLQEIFSNEMAKVDDSFFHRLEESFLVEEDKKHERHPIFGNIVDEVAYHEKYPTIYHLRKKLVDSTDKADLRLIYLALAHMIKFRGHFLIEGDLNPDNSDVDKLFIQLVQTYNQLFEENPINASGVDAKAILSARLSKSRRLENLIAQLPGEKKNGLFGNLIALSLGLTPNFKSNFDLAEDAKLQLSKDTYDDDLDNLLAQIGDQYADLFLAAKNLSDAILLSDILRVNTEITKAPLSASMIKRYDEHHQDLTLLKALVRQQLPEKYKEIFFDQSKNGYAGYIDGGASQEEFYKFIKPILEKMDGTEELLVKLNREDLLRKQRTFDNGSIPHQIHLGELHAILRRQEDFYPFLKDNREKIEKILTFRIPYYVGPLARGNSRFAWMTRKSEETITPWNFEEVVDKGASAQSFIERMTNFDKNLPNEKVLPKHSLLYEYFTVYNELTKVKYVTEGMRKPAFLSGEQKKAIVDLLFKTNRKVTVKQLKEDYFKKIECFDSVEISGVEDRFNASLGTYHDLLKIIKDKDFLDNEENEDILEDIVLTLTLFEDREMIEERLKTYAHLFDDKVMKQLKRRRYTGWGRLSRKLINGIRDKQSGKTILDFLKSDGFANRNFMQLIHDDSLTFKEDIQKAQVSGQGDSLHEHIANLAGSPAIKKGILQTVKVVDELVKVMGRHKPENIVIEMARENQTTQKGQKNSRERMKRIEEGIKELGSQILKEHPVENTQLQNEKLYLYYLQNGRDMYVDQELDINRLSDYDVDHIVPQSFLKDDSIDNKVLTRSDKARGKSDNVPSEEVVKKMKNYWRQLLNAKLITQRKFDNLTKAERGGLSELDKAGFIKRQLVETRQITKHVAQILDSRMNTKYDENDKLIREVKVITLKSKLVSDFRKDFQFYKVREINNYHHAHDAYLNAVVGTALIKKYPKLESEFVYGDYKVYDVRKMIAKSEQEIGKATAKYFFYSNIMNFFKTEITLANGEIRKRPLIETNGETGEIVWDKGRDFATVRKVLSMPQVNIVKKTEVQTGGFSKESILPKRNSDKLIARKKDWDPKKYGGFDSPTVAYSVLVVAKVEKGKSKKLKSVKELLGITIMERSSFEKNPIDFLEAKGYKEVKKDLIIKLPKYSLFELENGRKRMLASAGELQKGNELALPSKYVNFLYLASHYEKLKGSPEDNEQKQLFVEQHKHYLDEIIEQISEFSKRVILADANLDKVLSAYNKHRDKPIREQAENIIHLFTLTNLGAPAAFKYFDTTIDRKRYTSTKEVLDATLIHQSITGLYETRIDLSQLGGDGGPAPEAAAKGSSGGTLNIEDEHRLHETSKEPDVSLGSTWLSDFPQAWAETGGMGLAVRQAPLIIPLKATSTPVSIKQYPMSQEARLGIKPHIQRLLDQGILVPCQSPWNTPLLPVKKPGTNDYRPVQDLREVNKRVEDIHPTVPNPYNLLSGLPPSHQWYTVLDLKDAFFCLRLHPTSQPLFAFEWRDPEMGISGQLTWTRLPQGFKNSPTLFNEALHRDLADFRIQHPDLILLQYVDDLLLAATSELDCQQGTRALLQTLGNLGYRASAKKAQICQKQVKYLGYLLKEGQRWLTEARKETVMGQPTPKTPRQLREFLGKAGFCRLFIPGFAEMAAPLYPLTKPGTLFNWGPDQQKAYQEIKQALLTAPALGLPDLTKPFELFVDEKQGYAKGVLTQKLGPWRRPVAYLSKKLDPVAAGWPPCLRMVAAIAVLTKDAGKLTMGQPLVILAPHAVEALVKQPPDRWLSNARMTHYQALLLDTDRVQFGPVVALNPATLLPLPEEGLQHNCLDILAEAHGTRPDLTDQPLPDADHTWYTDGSSLLQEGQRKAGAAVTTETEVIWAKALPAGTSAQRAELIALTQALKMAEGKKLNVYTDSRYAFATAHIHGEIYRRRGWLTSEGKEIKNKDEILALLKALFLPKRLSIIHCPGHQKGHSAEARGNRMADQAARKAAITETPDTSTLLAGKRTADGSEFEKRTADGSEFESPKKKAKVE

SEQ ID NO: 3105 - protein, 2096 aa, synthetic construct
MPAAKRVKLDGGDKKYSIGLDIGTNSVGWAVITDEYKVPSKKFKVLGNTDRHSIKKNLIGALLFDSGETAEATRLKRTARRRYTRRKNRICYLQEIFSNEMAKVDDSFFHRLEESFLVEEDKKHERHPIFGNIVDEVAYHEKYPTIYHLRKKLVDSTDKADLRLIYLALAHMIKFRGHFLIEGDLNPDNSDVDKLFIQLVQTYNQLFEENPINASGVDAKAILSARLSKSRRLENLIAQLPGEKKNGLFGNLIALSLGLTPNFKSNFDLAEDAKLQLSKDTYDDDLDNLLAQIGDQYADLFLAAKNLSDAILLSDILRVNTEITKAPLSASMIKRYDEHHQDLTLLKALVRQQLPEKYKEIFFDQSKNGYAGYIDGGASQEEFYKFIKPILEKMDGTEELLVKLNREDLLRKQRTFDNGSIPHQIHLGELHAILRRQEDFYPFLKDNREKIEKILTFRIPYYVGPLARGNSRFAWMTRKSEETITPWNFEEVVDKGASAQSFIERMTNFDKNLPNEKVLPKHSLLYEYFTVYNELTKVKYVTEGMRKPAFLSGEQKKAIVDLLFKTNRKVTVKQLKEDYFKKIECFDSVEISGVEDRFNASLGTYHDLLKIIKDKDFLDNEENEDILEDIVLTLTLFEDREMIEERLKTYAHLFDDKVMKQLKRRRYTGWGRLSRKLINGIRDKQSGKTILDFLKSDGFANRNFMQLIHDDSLTFKEDIQKAQVSGQGDSLHEHIANLAGSPAIKKGILQTVKVVDELVKVMGRHKPENIVIEMARENQTTQKGQKNSRERMKRIEEGIKELGSQILKEHPVENTQLQNEKLYLYYLQNGRDMYVDQELDINRLSDYDVDHIVPQSFLKDDSIDNKVLTRSDKARGKSDNVPSEEVVKKMKNYWRQLLNAKLITQRKFDNLTKAERGGLSELDKAGFIKRQLVETRQITKHVAQILDSRMNTKYDENDKLIREVKVITLKSKLVSDFRKDFQFYKVREINNYHHAHDAYLNAVVGTALIKKYPKLESEFVYGDYKVYDVRKMIAKSEQEIGKATAKYFFYSNIMNFFKTEITLANGEIRKRPLIETNGETGEIVWDKGRDFATVRKVLSMPQVNIVKKTEVQTGGFSKESILPKRNSDKLIARKKDWDPKKYGGFDSPTVAYSVLVVAKVEKGKSKKLKSVKELLGITIMERSSFEKNPIDFLEAKGYKEVKKDLIIKLPKYSLFELENGRKRMLASAGELQKGNELALPSKYVNFLYLASHYEKLKGSPEDNEQKQLFVEQHKHYLDEIIEQISEFSKRVILADANLDKVLSAYNKHRDKPIREQAENIIHLFTLTNLGAPAAFKYFDTTIDRKRYTSTKEVLDATLIHQSITGLYETRIDLSQLGGDGGGSSEAAAKPAPGGTLNIEDEHRLHETSKEPDVSLGSTWLSDFPQAWAETGGMGLAVRQAPLIIPLKATSTPVSIKQYPMSQEARLGIKPHIQRLLDQGILVPCQSPWNTPLLPVKKPGTNDYRPVQDLREVNKRVEDIHPTVPNPYNLLSGLPPSHQWYTVLDLKDAFFCLRLHPTSQPLFAFEWRDPEMGISGQLTWTRLPQGFKNSPTLFNEALHRDLADFRIQHPDLILLQYVDDLLLAATSELDCQQGTRALLQTLGNLGYRASAKKAQICQKQVKYLGYLLKEGQRWLTEARKETVMGQPTPKTPRQLREFLGKAGFCRLFIPGFAEMAAPLYPLTKPGTLFNWGPDQQKAYQEIKQALLTAPALGLPDLTKPFELFVDEKQGYAKGVLTQKLGPWRRPVAYLSKKLDPVAAGWPPCLRMVAAIAVLTKDAGKLTMGQPLVILAPHAVEALVKQPPDRWLSNARMTHYQALLLDTDRVQFGPVVALNPATLLPLPEEGLQHNCLDILAEAHGTRPDLTDQPLPDADHTWYTDGSSLLQEGQRKAGAAVTTETEVIWAKALPAGTSAQRAELIALTQALKMAEGKKLNVYTDSRYAFATAHIHGEIYRRRGWLTSEGKEIKNKDEILALLKALFLPKRLSIIHCPGHQKGHSAEARGNRMADQAARKAAITETPDTSTLLAGKRTADGSEFEKRTADGSEFESPKKKAKVE

SEQ ID NO: 3106 - protein, 2094 aa, synthetic construct
MPAAKRVKLDGGDKKYSIGLDIGTNSVGWAVITDEYKVPSKKFKVLGNTDRHSIKKNLIGALLFDSGETAEATRLKRTARRRYTRRKNRICYLQEIFSNEMAKVDDSFFHRLEESFLVEEDKKHERHPIFGNIVDEVAYHEKYPTIYHLRKKLVDSTDKADLRLIYLALAHMIKFRGHFLIEGDLNPDNSDVDKLFIQLVQTYNQLFEENPINASGVDAKAILSARLSKSRRLENLIAQLPGEKKNGLFGNLIALSLGLTPNFKSNFDLAEDAKLQLSKDTYDDDLDNLLAQIGDQYADLFLAAKNLSDAILLSDILRVNTEITKAPLSASMIKRYDEHHQDLTLLKALVRQQLPEKYKEIFFDQSKNGYAGYIDGGASQEEFYKFIKPILEKMDGTEELLVKLNREDLLRKQRTFDNGSIPHQIHLGELHAILRRQEDFYPFLKDNREKIEKILTFRIPYYVGPLARGNSRFAWMTRKSEETITPWNFEEVVDKGASAQSFIERMTNFDKNLPNEKVLPKHSLLYEYFTVYNELTKVKYVTEGMRKPAFLSGEQKKAIVDLLFKTNRKVTVKQLKEDYFKKIECFDSVEISGVEDRFNASLGTYHDLLKIIKDKDFLDNEENEDILEDIVLTLTLFEDREMIEERLKTYAHLFDDKVMKQLKRRRYTGWGRLSRKLINGIRDKQSGKTILDFLKSDGFANRNFMQLIHDDSLTFKEDIQKAQVSGQGDSLHEHIANLAGSPAIKKGILQTVKVVDELVKVMGRHKPENIVIEMARENQTTQKGQKNSRERMKRIEEGIKELGSQILKEHPVENTQLQNEKLYLYYLQNGRDMYVDQELDINRLSDYDVDHIVPQSFLKDDSIDNKVLTRSDKARGKSDNVPSEEVVKKMKNYWRQLLNAKLITQRKFDNLTKAERGGLSELDKAGFIKRQLVETRQITKHVAQILDSRMNTKYDENDKLIREVKVITLKSKLVSDFRKDFQFYKVREINNYHHAHDAYLNAVVGTALIKKYPKLESEFVYGDYKVYDVRKMIAKSEQEIGKATAKYFFYSNIMNFFKTEITLANGEIRKRPLIETNGETGEIVWDKGRDFATVRKVLSMPQVNIVKKTEVQTGGFSKESILPKRNSDKLIARKKDWDPKKYGGFDSPTVAYSVLVVAKVEKGKSKKLKSVKELLGITIMERSSFEKNPIDFLEAKGYKEVKKDLIIKLPKYSLFELENGRKRMLASAGELQKGNELALPSKYVNFLYLASHYEKLKGSPEDNEQKQLFVEQHKHYLDEIIEQISEFSKRVILADANLDKVLSAYNKHRDKPIREQAENIIHLFTLTNLGAPAAFKYFDTTIDRKRYTSTKEVLDATLIHQSITGLYETRIDLSQLGGDGGPAPGSSGGSGGTLNIEDEHRLHETSKEPDVSLGSTWLSDFPQAWAETGGMGLAVRQAPLIIPLKATSTPVSIKQYPMSQEARLGIKPHIQRLLDQGILVPCQSPWNTPLLPVKKPGTNDYRPVQDLREVNKRVEDIHPTVPNPYNLLSGLPPSHQWYTVLDLKDAFFCLRLHPTSQPLFAFEWRDPEMGISGQLTWTRLPQGFKNSPTLFNEALHRDLADFRIQHPDLILLQYVDDLLLAATSELDCQQGTRALLQTLGNLGYRASAKKAQICQKQVKYLGYLLKEGQRWLTEARKETVMGQPTPKTPRQLREFLGKAGFCRLFIPGFAEMAAPLYPLTKPGTLFNWGPDQQKAYQEIKQALLTAPALGLPDLTKPFELFVDEKQGYAKGVLTQKLGPWRRPVAYLSKKLDPVAAGWPPCLRMVAAIAVLTKDAGKLTMGQPLVILAPHAVEALVKQPPDRWLSNARMTHYQALLLDTDRVQFGPVVALNPATLLPLPEEGLQHNCLDILAEAHGTRPDLTDQPLPDADHTWYTDGSSLLQEGQRKAGAAVTTETEVIWAKALPAGTSAQRAELIALTQALKMAEGKKLNVYTDSRYAFATAHIHGEIYRRRGWLTSEGKEIKNKDEILALLKALFLPKRLSIIHCPGHQKGHSAEARGNRMADQAARKAAITETPDTSTLLAGKRTADGSEFEKRTADGSEFESPKKKAKVE

SEQ ID NO: 3107 - protein, 2091 aa, synthetic construct; identical to SEQ ID NO: 2820

SEQ ID NO: 3108 - protein, 2096 aa, synthetic construct; identical to SEQ ID NO: 2782

SEQ ID NO: 3109 - protein, 2096 aa, synthetic construct; identical to SEQ ID NO: 2860

SEQ ID NO: 3110 - protein, 2095 aa, synthetic construct
MPAAKRVKLDGGDKKYSIGLDIGTNSVGWAVITDEYKVPSKKFKVLGNTDRHSIKKNLIGALLFDSGETAEATRLKRTARRRYTRRKNRICYLQEIFSNEMAKVDDSFFHRLEESFLVEEDKKHERHPIFGNIVDEVAYHEKYPTIYHLRKKLVDSTDKADLRLIYLALAHMIKFRGHFLIEGDLNPDNSDVDKLFIQLVQTYNQLFEENPINASGVDAKAILSARLSKSRRLENLIAQLPGEKKNGLFGNLIALSLGLTPNFKSNFDLAEDAKLQLSKDTYDDDLDNLLAQIGDQYADLFLAAKNLSDAILLSDILRVNTEITKAPLSASMIKRYDEHHQDLTLLKALVRQQLPEKYKEIFFDQSKNGYAGYIDGGASQEEFYKFIKPILEKMDGTEELLVKLNREDLLRKQRTFDNGSIPHQIHLGELHAILRRQEDFYPFLKDNREKIEKILTFRIPYYVGPLARGNSRFAWMTRKSEETITPWNFEEVVDKGASAQSFIERMTNFDKNLPNEKVLPKHSLLYEYFTVYNELTKVKYVTEGMRKPAFLSGEQKKAIVDLLFKTNRKVTVKQLKEDYFKKIECFDSVEISGVEDRFNASLGTYHDLLKIIKDKDFLDNEENEDILEDIVLTLTLFEDREMIEERLKTYAHLFDDKVMKQLKRRRYTGWGRLSRKLINGIRDKQSGKTILDFLKSDGFANRNFMQLIHDDSLTFKEDIQKAQVSGQGDSLHEHIANLAGSPAIKKGILQTVKVVDELVKVMGRHKPENIVIEMARENQTTQKGQKNSRERMKRIEEGIKELGSQILKEHPVENTQLQNEKLYLYYLQNGRDMYVDQELDINRLSDYDVDHIVPQSFLKDDSIDNKVLTRSDKARGKSDNVPSEEVVKKMKNYWRQLLNAKLITQRKFDNLTKAERGGLSELDKAGFIKRQLVETRQITKHVAQILDSRMNTKYDENDKLIREVKVITLKSKLVSDFRKDFQFYKVREINNYHHAHDAYLNAVVGTALIKKYPKLESEFVYGDYKVYDVRKMIAKSEQEIGKATAKYFFYSNIMNFFKTEITLANGEIRKRPLIETNGETGEIVWDKGRDFATVRKVLSMPQVNIVKKTEVQTGGFSKESILPKRNSDKLIARKKDWDPKKYGGFDSPTVAYSVLVVAKVEKGKSKKLKSVKELLGITIMERSSFEKNPIDFLEAKGYKEVKKDLIIKLPKYSLFELENGRKRMLASAGELQKGNELALPSKYVNFLYLASHYEKLKGSPEDNEQKQLFVEQHKHYLDEIIEQISEFSKRVILADANLDKVLSAYNKHRDKPIREQAENIIHLFTLTNLGAPAAFKYFDTTIDRKRYTSTKEVLDATLIHQSITGLYETRIDLSQLGGDGGGGGGSGGGGSGGTLNIEDEHRLHETSKEPDVSLGSTWLSDFPQAWAETGGMGLAVRQAPLIIPLKATSTPVSIKQYPMSQEARLGIKPHIQRLLDQGILVPCQSPWNTPLLPVKKPGTNDYRPVQDLREVNKRVEDIHPTVPNPYNLLSGLPPSHQWYTVLDLKDAFFCLRLHPTSQPLFAFEWRDPEMGISGQLTWTRLPQGFKNSPTLFNEALHRDLADFRIQHPDLILLQYVDDLLLAATSELDCQQGTRALLQTLGNLGYRASAKKAQICQKQVKYLGYLLKEGQRWLTEARKETVMGQPTPKTPRQLREFLGKAGFCRLFIPGFAEMAAPLYPLTKPGTLFNWGPDQQKAYQEIKQALLTAPALGLPDLTKPFELFVDEKQGYAKGVLTQKLGPWRRPVAYLSKKLDPVAAGWPPCLRMVAAIAVLTKDAGKLTMGQPLVILAPHAVEALVKQPPDRWLSNARMTHYQALLLDTDRVQFGPVVALNPATLLPLPEEGLQHNCLDILAEAHGTRPDLTDQPLPDADHTWYTDGSSLLQEGQRKAGAAVTTETEVIWAKALPAGTSAQRAELIALTQALKMAEGKKLNVYTDSRYAFATAHIHGEIYRRRGWLTSEGKEIKNKDEILALLKALFLPKRLSIIHCPGHQKGHSAEARGNRMADQAARKAAITETPDTSTLLAGKRTADGSEFEKRTADGSEFESPKKKAKVE

SEQ ID NO: 3111 - protein, 2094 aa, synthetic construct; identical to SEQ ID NO: 2800

SEQ ID NO: 3112 - protein, 2096 aa, synthetic construct; identical to SEQ ID NO: 2792

SEQ ID NO: 3113 - protein, 2091 aa, synthetic construct
MPAAKRVKLDGGDKKYSIGLDIGTNSVGWAVITDEYKVPSKKFKVLGNTDRHSIKKNLIGALLFDSGETAEATRLKRTARRRYTRRKNRICYLQEIFSNEMAKVDDSFFHRLEESFLVEEDKKHERHPIFGNIVDEVAYHEKYPTIYHLRKKLVDSTDKADLRLIYLALAHMIKFRGHFLIEGDLNPDNSDVDKLFIQLVQTYNQLFEENPINASGVDAKAILSARLSKSRRLENLIAQLPGEKKNGLFGNLIALSLGLTPNFKSNFDLAEDAKLQLSKDTYDDDLDNLLAQIGDQYADLFLAAKNLSDAILLSDILRVNTEITKAPLSASMIKRYDEHHQDLTLLKALVRQQLPEKYKEIFFDQSKNGYAGYIDGGASQEEFYKFIKPILEKMDGTEELLVKLNREDLLRKQRTFDNGSIPHQIHLGELHAILRRQEDFYPFLKDNREKIEKILTFRIPYYVGPLARGNSRFAWMTRKSEETITPWNFEEVVDKGASAQSFIERMTNFDKNLPNEKVLPKHSLLYEYFTVYNELTKVKYVTEGMRKPAFLSGEQKKAIVDLLFKTNRKVTVKQLKEDYFKKIECFDSVEISGVEDRFNASLGTYHDLLKIIKDKDFLDNEENEDILEDIVLTLTLFEDREMIEERLKTYAHLFDDKVMKQLKRRRYTGWGRLSRKLINGIRDKQSGKTILDFLKSDGFANRNFMQLIHDDSLTFKEDIQKAQVSGQGDSLHEHIANLAGSPAIKKGILQTVKVVDELVKVMGRHKPENIVIEMARENQTTQKGQKNSRERMKRIEEGIKELGSQILKEHPVENTQLQNEKLYLYYLQNGRDMYVDQELDINRLSDYDVDHIVPQSFLKDDSIDNKVLTRSDKARGKSDNVPSEEVVKKMKNYWRQLLNAKLITQRKFDNLTKAERGGLSELDKAGFIKRQLVETRQITKHVAQILDSRMNTKYDENDKLIREVKVITLKSKLVSDFRKDFQFYKVREINNYHHAHDAYLNAVVGTALIKKYPKLESEFVYGDYKVYDVRKMIAKSEQEIGKATAKYFFYSNIMNFFKTEITLANGEIRKRPLIETNGETGEIVWDKGRDFATVRKVLSMPQVNIVKKTEVQTGGFSKESILPKRNSDKLIARKKDWDPKKYGGFDSPTVAYSVLVVAKVEKGKSKKLKSVKELLGITIMERSSFEKNPIDFLEAKGYKEVKKDLIIKLPKYSLFELENGRKRMLASAGELQKGNELALPSKYVNFLYLASHYEKLKGSPEDNEQKQLFVEQHKHYLDEIIEQISEFSKRVILADANLDKVLSAYNKHRDKPIREQAENIIHLFTLTNLGAPAAFKYFDTTIDRKRYTSTKEVLDATLIHQSITGLYETRIDLSQLGGDGGGGSGSSGGTLNIEDEHRLHETSKEPDVSLGSTWLSDFPQAWAETGGMGLAVRQAPLIIPLKATSTPVSIKQYPMSQEARLGIKPHIQRLLDQGILVPCQSPWNTPLLPVKKPGTNDYRPVQDLREVNKRVEDIHPTVPNPYNLLSGLPPSHQWYTVLDLKDAFFCLRLHPTSQPLFAFEWRDPEMGISGQLTWTRLPQGFKNSPTLFNEALHRDLADFRIQHPDLILLQYVDDLLLAATSELDCQQGTRALLQTLGNLGYRASAKKAQICQKQVKYLGYLLKEGQRWLTEARKETVMGQPTPKTPRQLREFLGKAGFCRLFIPGFAEMAAPLYPLTKPGTLFNWGPDQQKAYQEIKQALLTAPALGLPDLTKPFELFVDEKQGYAKGVLTQKLGPWRRPVAYLSKKLDPVAAGWPPCLRMVAAIAVLTKDAGKLTMGQPLVILAPHAVEALVKQPPDRWLSNARMTHYQALLLDTDRVQFGPVVALNPATLLPLPEEGLQHNCLDILAEAHGTRPDLTDQPLPDADHTWYTDGSSLLQEGQRKAGAAVTTETEVIWAKALPAGTSAQRAELIALTQALKMAEGKKLNVYTDSRYAFATAHIHGEIYRRRGWLTSEGKEIKNKDEILALLKALFLPKRLSIIHCPGHQKGHSAEARGNRMADQAARKAAITETPDTSTLLAGKRTADGSEFEKRTADGSEFESPKKKAKVE

SEQ ID NO: 3114 - protein, 2090 aa, synthetic construct; identical to SEQ ID NO: 2834

SEQ ID NO: 3115 - protein, 2096 aa, synthetic construct
MPAAKRVKLDGGDKKYSIGLDIGTNSVGWAVITDEYKVPSKKFKVLGNTDRHSIKKNLIGALLFDSGETAEATRLKRTARRRYTRRKNRICYLQEIFSNEMAKVDDSFFHRLEESFLVEEDKKHERHPIFGNIVDEVAYHEKYPTIYHLRKKLVDSTDKADLRLIYLALAHMIKFRGHFLIEGDLNPDNSDVDKLFIQLVQTYNQLFEENPINASGVDAKAILSARLSKSRRLENLIAQLPGEKKNGLFGNLIALSLGLTPNFKSNFDLAEDAKLQLSKDTYDDDLDNLLAQIGDQYADLFLAAKNLSDAILLSDILRVNTEITKAPLSASMIKRYDEHHQDLTLLKALVRQQLPEKYKEIFFDQSKNGYAGYIDGGASQEEFYKFIKPILEKMDGTEELLVKLNREDLLRKQRTFDNGSIPHQIHLGELHAILRRQEDFYPFLKDNREKIEKILTFRIPYYVGPLARGNSRFAWMTRKSEETITPWNFEEVVDKGASAQSFIERMTNFDKNLPNEKVLPKHSLLYEYFTVYNELTKVKYVTEGMRKPAFLSGEQKKAIVDLLFKTNRKVTVKQLKEDYFKKIECFDSVEISGVEDRFNASLGTYHDLLKIIKDKDFLDNEENEDILEDIVLTLTLFEDREMIEERLKTYAHLFDDKVMKQLKRRRYTGWGRLSRKLINGIRDKQSGKTILDFLKSDGFANRNFMQLIHDDSLTFKEDIQKAQVSGQGDSLHEHIANLAGSPAIKKGILQTVKVVDELVKVMGRHKPENIVIEMARENQTTQKGQKNSRERMKRIEEGIKELGSQILKEHPVENTQLQNEKLYLYYLQNGRDMYVDQELDINRLSDYDVDHIVPQSFLKDDSIDNKVLTRSDKARGKSDNVPSEEVVKKMKNYWRQLLNAKLITQRKFDNLTKAERGGLSELDKAGFIKRQLVETRQITKHVAQILDSRMNTKYDENDKLIREVKVITLKSKLVSDFRKDFQFYKVREINNYHHAHDAYLNAVVGTALIKKYPKLESEFVYGDYKVYDVRKMIAKSEQEIGKATAKYFFYSNIMNFFKTEITLANGEIRKRPLIETNGETGEIVWDKGRDFATVRKVLSMPQVNIVKKTEVQTGGFSKESILPKRNSDKLIARKKDWDPKKYGGFDSPTVAYSVLVVAKVEKGKSKKLKSVKELLGITIMERSSFEKNPIDFLEAKGYKEVKKDLIIKLPKYSLFELENGRKRMLASAGELQKGNELALPSKYVNFLYLASHYEKLKGSPEDNEQKQLFVEQHKHYLDEIIEQISEFSKRVILADANLDKVLSAYNKHRDKPIREQAENIIHLFTLTNLGAPAAFKYFDTTIDRKRYTSTKEVLDATLIHQSITGLYETRIDLSQLGGDGGGGGGGSEAAAKGGTLNIEDEHRLHETSKEPDVSLGSTWLSDFPQAWAETGGMGLAVRQAPLIIPLKATSTPVSIKQYPMSQEARLGIKPHIQRLLDQGILVPCQSPWNTPLLPVKKPGTNDYRPVQDLREVNKRVEDIHPTVPNPYNLLSGLPPSHQWYTVLDLKDAFFCLRLHPTSQPLFAFEWRDPEMGISGQLTWTRLPQGFKNSPTLFNEALHRDLADFRIQHPDLILLQYVDDLLLAATSELDCQQGTRALLQTLGNLGYRASAKKAQICQKQVKYLGYLLKEGQRWLTEARKETVMGQPTPKTPRQLREFLGKAGFCRLFIPGFAEMAAPLYPLTKPGTLFNWGPDQQKAYQEIKQALLTAPALGLPDLTKPFELFVDEKQGYAKGVLTQKLGPWRRPVAYLSKKLDPVAAGWPPCLRMVAAIAVLTKDAGKLTMGQPLVILAPHAVEALVKQPPDRWLSNARMTHYQALLLDTDRVQFGPVVALNPATLLPLPEEGLQHNCLDILAEAHGTRPDLTDQPLPDADHTWYTDGSSLLQEGQRKAGAAVTTETEVIWAKALPAGTSAQRAELIALTQALKMAEGKKLNVYTDSRYAFATAHIHGEIYRRRGWLTSEGKEIKNKDEILALLKALFLPKRLSIIHCPGHQKGHSAEARGNRMADQAARKAAITETPDTSTLLAGKRTADGSEFEKRTADGSEFESPKKKAKVE

SEQ ID NO: 3116 - protein, 2096 aa, synthetic construct; identical to SEQ ID NO: 2789

SEQ ID NO: 3117 - protein, 2094 aa, synthetic construct; identical to SEQ ID NO: 2848

SEQ ID NO: 3118 - protein, 2096 aa, synthetic construct; identical to SEQ ID NO: 2805

SEQ ID NO: 3119 - protein, 2091 aa, synthetic construct; identical to SEQ ID NO: 2861

SEQ ID NO: 3120 - protein, 2115 aa, synthetic construct; identical to SEQ ID NO: 2813

SEQ ID NO: 3121 - protein, 2094 aa, synthetic construct
MPAAKRVKLDGGDKKYSIGLDIGTNSVGWAVITDEYKVPSKKFKVLGNTDRHSIKKNLIGALLFDSGETAEATRLKRTARRRYTRRKNRICYLQEIFSNEMAKVDDSFFHRLEESFLVEEDKKHERHPIFGNIVDEVAYHEKYPTIYHLRKKLVDSTDKADLRLIYLALAHMIKFRGHFLIEGDLNPDNSDVDKLFIQLVQTYNQLFEENPINASGVDAKAILSARLSKSRRLENLIAQLPGEKKNGLFGNLIALSLGLTPNFKSNFDLAEDAKLQLSKDTYDDDLDNLLAQIGDQYADLFLAAKNLSDAILLSDILRVNTEITKAPLSASMIKRYDEHHQDLTLLKALVRQQLPEKYKEIFFDQSKNGYAGYIDGGASQEEFYKFIKPILEKMDGTEELLVKLNREDLLRKQRTFDNGSIPHQIHLGELHAILRRQEDFYPFLKDNREKIEKILTFRIPYYVGPLARGNSRFAWMTRKSEETITPWNFEEVVDKGASAQSFIERMTNFDKNLPNEKVLPKHSLLYEYFTVYNELTKVKYVTEGMRKPAFLSGEQKKAIVDLLFKTNRKVTVKQLKEDYFKKIECFDSVEISGVEDRFNASLGTYHDLLKIIKDKDFLDNEENEDILEDIVLTLTLFEDREMIEERLKTYAHLFDDKVMKQLKRRRYTGWGRLSRKLINGIRDKQSGKTILDFLKSDGFANRNFMQLIHDDSLTFKEDIQKAQVSGQGDSLHEHIANLAGSPAIKKGILQTVKVVDELVKVMGRHKPENIVIEMARENQTTQKGQKNSRERMKRIEEGIKELGSQILKEHPVENTQLQNEKLYLYYLQNGRDMYVDQELDINRLSDYDVDHIVPQSFLKDDSIDNKVLTRSDKARGKSDNVPSEEVVKKMKNYWRQLLNAKLITQRKFDNLTKAERGGLSELDKAGFIKRQLVETRQITKHVAQILDSRMNTKYDENDKLIREVKVITLKSKLVSDFRKDFQFYKVREINNYHHAHDAYLNAVVGTALIKKYPKLESEFVYGDYKVYDVRKMIAKSEQEIGKATAKYFFYSNIMNFFKTEITLANGEIRKRPLIETNGETGEIVWDKGRDFATVRKVLSMPQVNIVKKTEVQTGGFSKESILPKRNSDKLIARKKDWDPKKYGGFDSPTVAYSVLVVAKVEKGKSKKLKSVKELLGITIMERSSFEKNPIDFLEAKGYKEVKKDLIIKLPKYSLFELENGRKRMLASAGELQKGNELALPSKYVNFLYLASHYEKLKGSPEDNEQKQLFVEQHKHYLDEIIEQISEFSKRVILADANLDKVLSAYNKHRDKPIREQAENIIHLFTLTNLGAPAAFKYFDTTIDRKRYTSTKEVLDATLIHQSITGLYETRIDLSQLGGDGGGGSGGGGSSGGTLNIEDEHRLHETSKEPDVSLGSTWLSDFPQAWAETGGMGLAVRQAPLIIPLKATSTPVSIKQYPMSQEARLGIKPHIQRLLDQGILVPCQSPWNTPLLPVKKPGTNDYRPVQDLREVNKRVEDIHPTVPNPYNLLSGLPPSHQWYTVLDLKDAFFCLRLHPTSQPLFAFEWRDPEMGISGQLTWTRLPQGFKNSPTLFNEALHRDLADFRIQHPDLILLQYVDDLLLAATSELDCQQGTRALLQTLGNLGYRASAKKAQICQKQVKYLGYLLKEGQRWLTEARKETVMGQPTPKTPRQLREFLGKAGFCRLFIPGFAEMAAPLYPLTKPGTLFNWGPDQQKAYQEIKQALLTAPALGLPDLTKPFELFVDEKQGYAKGVLTQKLGPWRRPVAYLSKKLDPVAAGWPPCLRMVAAIAVLTKDAGKLTMGQPLVILAPHAVEALVKQPPDRWLSNARMTHYQALLLDTDRVQFGPVVALNPATLLPLPEEGLQHNCLDILAEAHGTRPDLTDQPLPDADHTWYTDGSSLLQEGQRKAGAAVTTETEVIWAKALPAGTSAQRAELIALTQALKMAEGKKLNVYTDSRYAFATAHIHGEIYRRRGWLTSEGKEIKNKDEILALLKALFLPKRLSIIHCPGHQKGHSAEARGNRMADQAARKAAITETPDTSTLLAGKRTADGSEFEKRTADGSEFESPKKKAKVE

SEQ ID NO: 3122 - protein, 2094 aa, synthetic construct
MPAAKRVKLDGGDKKYSIGLDIGTNSVGWAVITDEYKVPSKKFKVLGNTDRHSIKKNLIGALLFDSGETAEATRLKRTARRRYTRRKNRICYLQEIFSNEMAKVDDSFFHRLEESFLVEEDKKHERHPIFGNIVDEVAYHEKYPTIYHLRKKLVDSTDKADLRLIYLALAHMIKFRGHFLIEGDLNPDNSDVDKLFIQLVQTYNQLFEENPINASGVDAKAILSARLSKSRRLENLIAQLPGEKKNGLFGNLIALSLGLTPNFKSNFDLAEDAKLQLSKDTYDDDLDNLLAQIGDQYADLFLAAKNLSDAILLSDILRVNTEITKAPLSASMIKRYDEHHQDLTLLKALVRQQLPEKYKEIFFDQSKNGYAGYIDGGASQEEFYKFIKPILEKMDGTEELLVKLNREDLLRKQRTFDNGSIPHQIHLGELHAILRRQEDFYPFLKDNREKIEKILTFRIPYYVGPLARGNSRFAWMTRKSEETITPWNFEEVVDKGASAQSFIERMTNFDKNLPNEKVLPKHSLLYEYFTVYNELTKVKYVTEGMRKPAFLSGEQKKAIVDLLFKTNRKVTVKQLKEDYFKKIECFDSVEISGVEDRFNASLGTYHDLLKIIKDKDFLDNEENEDILEDIVLTLTLFEDREMIEERLKTYAHLFDDKVMKQLKRRRYTGWGRLSRKLINGIRDKQSGKTILDFLKSDGFANRNFMQLIHDDSLTFKEDIQKAQVSGQGDSLHEHIANLAGSPAIKKGILQTVKVVDELVKVMGRHKPENIVIEMARENQTTQKGQKNSRERMKRIEEGIKELGSQILKEHPVENTQLQNEKLYLYYLQNGRDMYVDQELDINRLSDYDVDHIVPQSFLKDDSIDNKVLTRSDKARGKSDNVPSEEVVKKMKNYWRQLLNAKLITQRKFDNLTKAERGGLSELDKAGFIKRQLVETRQITKHVAQILDSRMNTKYDENDKLIREVKVITLKSKLVSDFRKDFQFYKVREINNYHHAHDAYLNAVVGTALIKKYPKLESEFVYGDYKVYDVRKMIAKSEQEIGKATAKYFFYSNIMNFFKTEITLANGEIRKRPLIETNGETGEIVWDKGRDFATVRKVLSMPQVNIVKKTEVQTGGFSKESILPKRNSDKLIARKKDWDPKKYGGFDSPTVAYSVLVVAKVEKGKSKKLKSVKELLGITIMERSSFEKNPIDFLEAKGYKEVKKDLIIKLPKYSLFELENGRKRMLASAGELQKGNELALPSKYVNFLYLASHYEKLKGSPEDNEQKQLFVEQHKHYLDEIIEQISEFSKRVILADANLDKVLSAYNKHRDKPIREQAENIIHLFTLTNLGAPAAFKYFDTTIDRKRYTSTKEVLDATLIHQSITGLYETRIDLSQLGGDGGGGSGSSPAPGGTLNIEDEHRLHETSKEPDVSLGSTWLSDFPQAWAETGGMGLAVRQAPLIIPLKATSTPVSIKQYPMSQEARLGIKPHIQRLLDQGILVPCQSPWNTPLLPVKKPGTNDYRPVQDLREVNKRVEDIHPTVPNPYNLLSGLPPSHQWYTVLDLKDAFFCLRLHPTSQPLFAFEWRDPEMGISGQLTWTRLPQGFKNSPTLFNEALHRDLADFRIQHPDLILLQYVDDLLLAATSELDCQQGTRALLQTLGNLGYRASAKKAQICQKQVKYLGYLLKEGQRWLTEARKETVMGQPTPKTPRQLREFLGKAGFCRLFIPGFAEMAAPLYPLTKPGTLFNWGPDQQKAYQEIKQALLTAPALGLPDLTKPFELFVDEKQGYAKGVLTQKLGPWRRPVAYLSKKLDPVAAGWPPCLRMVAAIAVLTKDAGKLTMGQPLVILAPHAVEALVKQPPDRWLSNARMTHYQALLLDTDRVQFGPVVALNPATLLPLPEEGLQHNCLDILAEAHGTRPDLTDQPLPDADHTWYTDGSSLLQEGQRKAGAAVTTETEVIWAKALPAGTSAQRAELIALTQALKMAEGKKLNVYTDSRYAFATAHIHGEIYRRRGWLTSEGKEIKNKDEILALLKALFLPKRLSIIHCPGHQKGHSAEARGNRMADQAARKAAITETPDTSTLLAGKRTADGSEFEKRTADGSEFESPKKKAKVE

SEQ ID NO: 3123 - protein, 2090 aa, synthetic construct; identical to SEQ ID NO: 2823

SEQ ID NO: 3124 - protein, 2094 aa, synthetic construct; identical to SEQ ID NO: 2833

SEQ ID NO: 3125 - protein, 2096 aa, synthetic construct; identical to SEQ ID NO: 2794

SEQ ID NO: 3126 - protein, 2100 aa, synthetic construct; identical to SEQ ID NO: 2802

SEQ ID NO: 3127 - protein, 2096 aa, synthetic construct; identical to SEQ ID NO: 2839

SEQ ID NO: 3128 - protein, 2094 aa, synthetic construct; identical to SEQ ID NO: 2841

SEQ ID NO: 3129 - protein, 2096 aa, synthetic construct
MPAAKRVKLDGGDKKYSIGLDIGTNSVGWAVITDEYKVPSKKFKVLGNTDRHSIKKNLIGALLFDSGETAEATRLKRTARRRYTRRKNRICYLQEIFSNEMAKVDDSFFHRLEESFLVEEDKKHERHPIFGNIVDEVAYHEKYPTIYHLRKKLVDSTDKADLRLIYLALAHMIKFRGHFLIEGDLNPDNSDVDKLFIQLVQTYNQLFEENPINASGVDAKAILSARLSKSRRLENLIAQLPGEKKNGLFGNLIALSLGLTPNFKSNFDLAEDAKLQLSKDTYDDDLDNLLAQIGDQYADLFLAAKNLSDAILLSDILRVNTEITKAPLSASMIKRYDEHHQDLTLLKALVRQQLPEKYKEIFFDQSKNGYAGYIDGGASQEEFYKFIKPILEKMDGTEELLVKLNREDLLRKQRTFDNGSIPHQIHLGELHAILRRQEDFYPFLKDNREKIEKILTFRIPYYVGPLARGNSRFAWMTRKSEETITPWNFEEVVDKGASAQSFIERMTNFDKNLPNEKVLPKHSLLYEYFTVYNELTKVKYVTEGMRKPAFLSGEQKKAIVDLLFKTNRKVTVKQLKEDYFKKIECFDSVEISGVEDRFNASLGTYHDLLKIIKDKDFLDNEENEDILEDIVLTLTLFEDREMIEERLKTYAHLFDDKVMKQLKRRRYTGWGRLSRKLINGIRDKQSGKTILDFLKSDGFANRNFMQLIHDDSLTFKEDIQKAQVSGQGDSLHEHIANLAGSPAIKKGILQTVKVVDELVKVMGRHKPENIVIEMARENQTTQKGQKNSRERMKRIEEGIKELGSQILKEHPVENTQLQNEKLYLYYLQNGRDMYVDQELDINRLSDYDVDHIVPQSFLKDDSIDNKVLTRSDKARGKSDNVPSEEVVKKMKNYWRQLLNAKLITQRKFDNLTKAERGGLSELDKAGFIKRQLVETRQITKHVAQILDSRMNTKYDENDKLIREVKVITLKSKLVSDFRKDFQFYKVREINNYHHAHDAYLNAVVGTALIKKYPKLESEFVYGDYKVYDVRKMIAKSEQEIGKATAKYFFYSNIMNFFKTEITLANGEIRKRPLIETNGETGEIVWDKGRDFATVRKVLSMPQVNIVKKTEVQTGGFSKESILPKRNSDKLIARKKDWDPKKYGGFDSPTVAYSVLVVAKVEKGKSKKLKSVKELLGITIMERSSFEKNPIDFLEAKGYKEVKKDLIIKLPKYSLFELENGRKRMLASAGELQKGNELALPSKYVNFLYLASHYEKLKGSPEDNEQKQLFVEQHKHYLDEIIEQISEFSKRVILADANLDKVLSAYNKHRDKPIREQAENIIHLFTLTNLGAPAAFKYFDTTIDRKRYTSTKEVLDATLIHQSITGLYETRIDLSQLGGDGGGGSGGGEAAAKGGTLNIEDEHRLHETSKEPDVSLGSTWLSDFPQAWAETGGMGLAVRQAPLIIPLKATSTPVSIKQYPMSQEARLGIKPHIQRLLDQGILVPCQSPWNTPLLPVKKPGTNDYRPVQDLREVNKRVEDIHPTVPNPYNLLSGLPPSHQWYTVLDLKDAFFCLRLHPTSQPLFAFEWRDPEMGISGQLTWTRLPQGFKNSPTLFNEALHRDLADFRIQHPDLILLQYVDDLLLAATSELDCQQGTRALLQTLGNLGYRASAKKAQICQKQVKYLGYLLKEGQRWLTEARKETVMGQPTPKTPRQLREFLGKAGFCRLFIPGFAEMAAPLYPLTKPGTLFNWGPDQQKAYQEIKQALLTAPALGLPDLTKPFELFVDEKQGYAKGVLTQKLGPWRRPVAYLSKKLDPVAAGWPPCLRMVAAIAVLTKDAGKLTMGQPLVILAPHAVEALVKQPPDRWLSNARMTHYQALLLDTDRVQFGPVVALNPATLLPLPEEGLQHNCLDILAEAHGTRPDLTDQPLPDADHTWYTDGSSLLQEGQRKAGAAVTTETEVIWAKALPAGTSAQRAELIALTQALKMAEGKKLNVYTDSRYAFATAHIHGEIYRRRGWLTSEGKEIKNKDEILALLKALFLPKRLSIIHCPGHQKGHSAEARGNRMADQAARKAAITETPDTSTLLAGKRTADGSEFEKRTADGSEFESPKKKAKVE

SEQ ID NO: 3130 - protein, 2094 aa, synthetic construct; identical to SEQ ID NO: 2801

SEQ ID NO: 3131 - protein, 2096 aa, synthetic construct
MPAAKRVKLDGGDKKYSIGLDIGTNSVGWAVITDEYKVPSKKFKVLGNTDRHSIKKNLIGALLFDSGETAEATRLKRTARRRYTRRKNRICYLQEIFSNEMAKVDDSFFHRLEESFLVEEDKKHERHPIFGNIVDEVAYHEKYPTIYHLRKKLVDSTDKADLRLIYLALAHMIKFRGHFLIEGDLNPDNSDVDKLFIQLVQTYNQLFEENPINASGVDAKAILSARLSKSRRLENLIAQLPGEKKNGLFGNLIALSLGLTPNFKSNFDLAEDAKLQLSKDTYDDDLDNLLAQIGDQYADLFLAAKNLSDAILLSDILRVNTEITKAPLSASMIKRYDEHHQDLTLLKALVRQQLPEKYKEIFFDQSKNGYAGYIDGGASQEEFYKFIKPILEKMDGTEELLVKLNREDLLRKQRTFDNGSIPHQIHLGELHAILRRQEDFYPFLKDNREKIEKILTFRIPYYVGPLARGNSRFAWMTRKSEETITPWNFEEVVDKGASAQSFIERMTNFDKNLPNEKVLPKHSLLYEYFTVYNELTKVKYVTEGMRKPAFLSGEQKKAIVDLLFKTNRKVTVKQLKEDYFKKIECFDSVEISGVEDRFNASLGTYHDLLKIIKDKDFLDNEENEDILEDIVLTLTLFEDREMIEERLKTYAHLFDDKVMKQLKRRRYTGWGRLSRKLINGIRDKQSGKTILDFLKSDGFANRNFMQLIHDDSLTFKEDIQKAQVSGQGDSLHEHIANLAGSPAIKKGILQTVKVVDELVKVMGRHKPENIVIEMARENQTTQKGQKNSRERMKRIEEGIKELGSQILKEHPVENTQLQNEKLYLYYLQNGRDMYVDQELDINRLSDYDVDHIVPQSFLKDDSIDNKVLTRSDKARGKSDNVPSEEVVKKMKNYWRQLLNAKLITQRKFDNLTKAERGGLSELDKAGFIKRQLVETRQITKHVAQILDSRMNTKYDENDKLIREVKVITLKSKLVSDFRKDFQFYKVREINNYHHAHDAYLNAVVGTALIKKYPKLESEFVYGDYKVYDVRKMIAKSEQEIGKATAKYFFYSNIMNFFKTEITLANGEIRKRPLIETNGETGEIVWDKGRDFATVRKVLSMPQVNIVKKTEVQTGGFSKESILPKRNSDKLIARKKDWDPKKYGGFDSPTVAYSVLVVAKVEKGKSKKLKSVKELLGITIMERSSFEKNPIDFLEAKGYKEVKKDLIIKLPKYSLFELENGRKRMLASAGELQKGNELALPSKYVNFLYLASHYEKLKGSPEDNEQKQLFVEQHKHYLDEIIEQISEFSKRVILADANLDKVLSAYNKHRDKPIREQAENIIHLFTLTNLGAPAAFKYFDTTIDRKRYTSTKEVLDATLIHQSITGLYETRIDLSQLGGDGGGSSEAAAKGGSGGTLNIEDEHRLHETSKEPDVSLGSTWLSDFPQAWAETGGMGLAVRQAPLIIPLKATSTPVSIKQYPMSQEARLGIKPHIQRLLDQGILVPCQSPWNTPLLPVKKPGTNDYRPVQDLREVNKRVEDIHPTVPNPYNLLSGLPPSHQWYTVLDLKDAFFCLRLHPTSQPLFAFEWRDPEMGISGQLTWTRLPQGFKNSPTLFNEALHRDLADFRIQHPDLILLQYVDDLLLAATSELDCQQGTRALLQTLGNLGYRASAKKAQICQKQVKYLGYLLKEGQRWLTEARKETVMGQPTPKTPRQLREFLGKAGFCRLFIPGFAEMAAPLYPLTKPGTLFNWGPDQQKAYQEIKQALLTAPALGLPDLTKPFELFVDEKQGYAKGVLTQKLGPWRRPVAYLSKKLDPVAAGWPPCLRMVAAIAVLTKDAGKLTMGQPLVILAPHAVEALVKQPPDRWLSNARMTHYQALLLDTDRVQFGPVVALNPATLLPLPEEGLQHNCLDILAEAHGTRPDLTDQPLPDADHTWYTDGSSLLQEGQRKAGAAVTTETEVIWAKALPAGTSAQRAELIALTQALKMAEGKKLNVYTDSRYAFATAHIHGEIYRRRGWLTSEGKEIKNKDEILALLKALFLPKRLSIIHCPGHQKGHSAEARGNRMADQAARKAAITETPDTSTLLAGKRTADGSEFEKRTADGSEFESPKKKAKVE

SEQ ID NO: 3132 - protein, 2118 aa, synthetic construct
MPAAKRVKLDGGDKKYSIGLDIGTNSVGWAVITDEYKVPSKKFKVLGNTDRHSIKKNLIGALLFDSGETAEATRLKRTARRRYTRRKNRICYLQEIFSNEMAKVDDSFFHRLEESFLVEEDKKHERHPIFGNIVDEVAYHEKYPTIYHLRKKLVDSTDKADLRLIYLALAHMIKFRGHFLIEGDLNPDNSDVDKLFIQLVQTYNQLFEENPINASGVDAKAILSARLSKSRRLENLIAQLPGEKKNGLFGNLIALSLGLTPNFKSNFDLAEDAKLQLSKDTYDDDLDNLLAQIGDQYADLFLAAKNLSDAILLSDILRVNTEITKAPLSASMIKRYDEHHQDLTLLKALVRQQLPEKYKEIFFDQSKNGYAGYIDGGASQEEFYKFIKPILEKMDGTEELLVKLNREDLLRKQRTFDNGSIPHQIHLGELHAILRRQEDFYPFLKDNREKIEKILTFRIPYYVGPLARGNSRFAWMTRKSEETITPWNFEEVVDKGASAQSFIERMTNFDKNLPNEKVLPKHSLLYEYFTVYNELTKVKYVTEGMRKPAFLSGEQKKAIVDLLFKTNRKVTVKQLKEDYFKKIECFDSVEISGVEDRFNASLGTYHDLLKIIKDKDFLDNEENEDILEDIVLTLTLFEDREMIEERLKTYAHLFDDKVMKQLKRRRYTGWGRLSRKLINGIRDKQSGKTILDFLKSDGFANRNFMQLIHDDSLTFKEDIQKAQVSGQGDSLHEHIANLAGSPAIKKGILQTVKVVDELVKVMGRHKPENIVIEMARENQTTQKGQKNSRERMKRIEEGIKELGSQILKEHPVENTQLQNEKLYLYYLQNGRDMYVDQELDINRLSDYDVDHIVPQSFLKDDSIDNKVLTRSDKARGKSDNVPSEEVVKKMKNYWRQLLNAKLITQRKFDNLTKAERGGLSELDKAGFIKRQLVETRQITKHVAQILDSRMNTKYDENDKLIREVKVITLKSKLVSDFRKDFQFYKVREINNYHHAHDAYLNAVVGTALIKKYPKLESEFVYGDYKVYDVRKMIAKSEQEIGKATAKYFFYSNIMNFFKTEITLANGEIRKRPLIETNGETGEIVWDKGRDFATVRKVLSMPQVNIVKKTEVQTGGFSKESILPKRNSDKLIARKKDWDPKKYGGFDSPTVAYSVLVVAKVEKGKSKKLKSVKELLGITIMERSSFEKNPIDFLEAKGYKEVKKDLIIKLPKYSLFELENGRKRMLASAGELQKGNELALPSKYVNFLYLASHYEKLKGSPEDNEQKQLFVEQHKHYLDEIIEQISEFSKRVILADANLDKVLSAYNKHRDKPIREQAENIIHLFTLTNLGAPAAFKYFDTTIDRKRYTSTKEVLDATLIHQSITGLYETRIDLSQLGGDGGSGGSSGGSSGSETPGTSESATPESSGGSSGGSSGGTLNIEDEHRLHETSKEPDVSLGSTWLSDFPQAWAETGGMGLAVRQAPLIIPLKATSTPVSIKQYPMSQEARLGIKPHIQRLLDQGILVPCQSPWNTPLLPVKKPGTNDYRPVQDLREVNKRVEDIHPTVPNPYNLLSGLPPSHQWYTVLDLKDAFFCLRLHPTSQPLFAFEWRDPEMGISGQLTWTRLPQGFKNSPTLFNEALHRDLADFRIQHPDLILLQYVDDLLLAATSELDCQQGTRALLQTLGNLGYRASAKKAQICQKQVKYLGYLLKEGQRWLTEARKETVMGQPTPKTPRQLREFLGKAGFCRLFIPGFAEMAAPLYPLTKPGTLFNWGPDQQKAYQEIKQALLTAPALGLPDLTKPFELFVDEKQGYAKGVLTQKLGPWRRPVAYLSKKLDPVAAGWPPCLRMVAAIAVLTKDAGKLTMGQPLVILAPHAVEALVKQPPDRWLSNARMTHYQALLLDTDRVQFGPVVALNPATLLPLPEEGLQHNCLDILAEAHGTRPDLTDQPLPDADHTWYTDGSSLLQEGQRKAGAAVTTETEVIWAKALPAGTSAQRAELIALTQALKMAEGKKLNVYTDSRYAFATAHIHGEIYRRRGWLTSEGKEIKNKDEILALLKALFLPKRLSIIHCPGHQKGHSAEARGNRMADQAARKAAITETPDTSTLLAGKRTADGSEFEKRTADGSEFESPKKKAKVE

SEQ ID NO: 3133 - protein, 2094 aa, synthetic construct; identical to SEQ ID NO: 2859

SEQ ID NO: 3134 - protein, 2094 aa, synthetic construct; identical to SEQ ID NO: 2854

SEQ ID NO: 3135 - protein, 2091 aa, synthetic construct; identical to SEQ ID NO: 2832

SEQ ID NO: 3136 - protein, 2096 aa, synthetic construct
MPAAKRVKLDGGDKKYSIGLDIGTNSVGWAVITDEYKVPSKKFKVLGNTDRHSIKKNLIGALLFDSGETAEATRLKRTARRRYTRRKNRICYLQEIFSNEMAKVDDSFFHRLEESFLVEEDKKHERHPIFGNIVDEVAYHEKYPTIYHLRKKLVDSTDKADLRLIYLALAHMIKFRGHFLIEGDLNPDNSDVDKLFIQLVQTYNQLFEENPINASGVDAKAILSARLSKSRRLENLIAQLPGEKKNGLFGNLIALSLGLTPNFKSNFDLAEDAKLQLSKDTYDDDLDNLLAQIGDQYADLFLAAKNLSDAILLSDILRVNTEITKAPLSASMIKRYDEHHQDLTLLKALVRQQLPEKYKEIFFDQSKNGYAGYIDGGASQEEFYKFIKPILEKMDGTEELLVKLNREDLLRKQRTFDNGSIPHQIHLGELHAILRRQEDFYPFLKDNREKIEKILTFRIPYYVGPLARGNSRFAWMTRKSEETITPWNFEEVVDKGASAQSFIERMTNFDKNLPNEKVLPKHSLLYEYFTVYNELTKVKYVTEGMRKPAFLSGEQKKAIVDLLFKTNRKVTVKQLKEDYFKKIECFDSVEISGVEDRFNASLGTYHDLLKIIKDKDFLDNEENEDILEDIVLTLTLFEDREMIEERLKTYAHLFDDKVMKQLKRRRYTGWGRLSRKLINGIRDKQSGKTILDFLKSDGFANRNFMQLIHDDSLTFKEDIQKAQVSGQGDSLHEHIANLAGSPAIKKGILQTVKVVDELVKVMGRHKPENIVIEMARENQTTQKGQKNSRERMKRIEEGIKELGSQILKEHPVENTQLQNEKLYLYYLQNGRDMYVDQELDINRLSDYDVDHIVPQSFLKDDSIDNKVLTRSDKARGKSDNVPSEEVVKKMKNYWRQLLNAKLITQRKFDNLTKAERGGLSELDKAGFIKRQLVETRQITKHVAQILDSRMNTKYDENDKLIREVKVITLKSKLVSDFRKDFQFYKVREINNYHHAHDAYLNAVVGTALIKKYPKLESEFVYGDYKVYDVRKMIAKSEQEIGKATAKYFFYSNIMNFFKTEITLANGEIRKRPLIETNGETGEIVWDKGRDFATVRKVLSMPQVNIVKKTEVQTGGFSKESILPKRNSDKLIARKKDWDPKKYGGFDSPTVAYSVLVVAKVEKGKSKKLKSVKELLGITIMERSSFEKNPIDFLEAKGYKEVKKDLIIKLPKYSLFELENGRKRMLASAGELQKGNELALPSKYVNFLYLASHYEKLKGSPEDNEQKQLFVEQHKHYLDEIIEQISEFSKRVILADANLDKVLSAYNKHRDKPIREQAENIIHLFTLTNLGAPAAFKYFDTTIDRKRYTSTKEVLDATLIHQSITGLYETRIDLSQLGGDGGGGGPAPEAAAKGGTLNIEDEHRLHETSKEPDVSLGSTWLSDFPQAWAETGGMGLAVRQAPLIIPLKATSTPVSIKQYPMSQEARLGIKPHIQRLLDQGILVPCQSPWNTPLLPVKKPGTNDYRPVQDLREVNKRVEDIHPTVPNPYNLLSGLPPSHQWYTVLDLKDAFFCLRLHPTSQPLFAFEWRDPEMGISGQLTWTRLPQGFKNSPTLFNEALHRDLADFRIQHPDLILLQYVDDLLLAATSELDCQQGTRALLQTLGNLGYRASAKKAQICQKQVKYLGYLLKEGQRWLTEARKETVMGQPTPKTPRQLREFLGKAGFCRLFIPGFAEMAAPLYPLTKPGTLFNWGPDQQKAYQEIKQALLTAPALGLPDLTKPFELFVDEKQGYAKGVLTQKLGPWRRPVAYLSKKLDPVAAGWPPCLRMVAAIAVLTKDAGKLTMGQPLVILAPHAVEALVKQPPDRWLSNARMTHYQALLLDTDRVQFGPVVALNPATLLPLPEEGLQHNCLDILAEAHGTRPDLTDQPLPDADHTWYTDGSSLLQEGQRKAGAAVTTETEVIWAKALPAGTSAQRAELIALTQALKMAEGKKLNVYTDSRYAFATAHIHGEIYRRRGWLTSEGKEIKNKDEILALLKALFLPKRLSIIHCPGHQKGHSAEARGNRMADQAARKAAITETPDTSTLLAGKRTADGSEFEKRTADGSEFESPKKKAKVE

SEQ ID NO: 3137 - protein, 2091 aa, synthetic construct
MPAAKRVKLDGGDKKYSIGLDIGTNSVGWAVITDEYKVPSKKFKVLGNTDRHSIKKNLIGALLFDSGETAEATRLKRTARRRYTRRKNRICYLQEIFSNEMAKVDDSFFHRLEESFLVEEDKKHERHPIFGNIVDEVAYHEKYPTIYHLRKKLVDSTDKADLRLIYLALAHMIKFRGHFLIEGDLNPDNSDVDKLFIQLVQTYNQLFEENPINASGVDAKAILSARLSKSRRLENLIAQLPGEKKNGLFGNLIALSLGLTPNFKSNFDLAEDAKLQLSKDTYDDDLDNLLAQIGDQYADLFLAAKNLSDAILLSDILRVNTEITKAPLSASMIKRYDEHHQDLTLLKALVRQQLPEKYKEIFFDQSKNGYAGYIDGGASQEEFYKFIKPILEKMDGTEELLVKLNREDLLRKQRTFDNGSIPHQIHLGELHAILRRQEDFYPFLKDNREKIEKILTFRIPYYVGPLARGNSRFAWMTRKSEETITPWNFEEVVDKGASAQSFIERMTNFDKNLPNEKVLPKHSLLYEYFTVYNELTKVKYVTEGMRKPAFLSGEQKKAIVDLLFKTNRKVTVKQLKEDYFKKIECFDSVEISGVEDRFNASLGTYHDLLKIIKDKDFLDNEENEDILEDIVLTLTLFEDREMIEERLKTYAHLFDDKVMKQLKRRRYTGWGRLSRKLINGIRDKQSGKTILDFLKSDGFANRNFMQLIHDDSLTFKEDIQKAQVSGQGDSLHEHIANLAGSPAIKKGILQTVKVVDELVKVMGRHKPENIVIEMARENQTTQKGQKNSRERMKRIEEGIKELGSQILKEHPVENTQLQNEKLYLYYLQNGRDMYVDQELDINRLSDYDVDHIVPQSFLKDDSIDNKVLTRSDKARGKSDNVPSEEVVKKMKNYWRQLLNAKLITQRKFDNLTKAERGGLSELDKAGFIKRQLVETRQITKHVAQILDSRMNTKYDENDKLIREVKVITLKSKLVSDFRKDFQFYKVREINNYHHAHDAYLNAVVGTALIKKYPKLESEFVYGDYKVYDVRKMIAKSEQEIGKATAKYFFYSNIMNFFKTEITLANGEIRKRPLIETNGETGEIVWDKGRDFATVRKVLSMPQVNIVKKTEVQTGGFSKESILPKRNSDKLIARKKDWDPKKYGGFDSPTVAYSVLVVAKVEKGKSKKLKSVKELLGITIMERSSFEKNPIDFLEAKGYKEVKKDLIIKLPKYSLFELENGRKRMLASAGELQKGNELALPSKYVNFLYLASHYEKLKGSPEDNEQKQLFVEQHKHYLDEIIEQISEFSKRVILADANLDKVLSAYNKHRDKPIREQAENIIHLFTLTNLGAPAAFKYFDTTIDRKRYTSTKEVLDATLIHQSITGLYETRIDLSQLGGDGGPAPGGGGGTLNIEDEYRLHEISTEPDVSPGSTWLSDFPQAWAETGGMGLAVRQAPLIIPLKATSTPVSIKQYPMSQEAKLGIKPHIQRLLDQGILVPCQSPWNTPLLPVKKPGTNDYRPVQGLREVNKRVEDIHPTVPNPYNLLSGLPTSHRWYTVLDLKDAFFCLRLHPTSQPLFASEWRDPGMGISGQLTWTRLPQGFKNSPTLFDEALHRGLADFRIQHPDLILLQYVDDLLLAATSELDCQQGTRALLKTLGNLGYRASAKKAQICQKQVKYLGYLLREGQRWLTEARKETVMGQPTPKTPRQLREFLGTAGFCRLWIPRFAEMAAPLYPLTKTGTLFNWGPDQQKAYHEIKQALLTAPALGLPDLTKPFELFVDEKQGYAKGVLTQKLGPWRRPVAYLSKKLDPVAAGWPPCLRMVAAIAVLTKDAGKLTMGQPLVILAPHAVEALVKQPPDRWLSNARMTHYQAMLLDTDRVQFGPVVALNPATLLPLPEEGAPHDCLEILAETHGTEPDLTDQPIPDADHTWYTDGSSFLQEGQRKAGAAVTTETEVIWARALPAGTSAQRAELIALTQALKMAEGKRLNVYTDSRYAFATAHIHGEIYKRRGLLTSEGREIKNKSEILALLKALFLPKRLSIIHCLGHQKGDSAEARGNRLADQAAREAAIKTPPDTSTLLAGKRTADGSEFEKRTADGSEFESPKKKAKVE

SEQ ID NO: 3138 - protein, 2088 aa, synthetic construct
MPAAKRVKLDGGDKKYSIGLDIGTNSVGWAVITDEYKVPSKKFKVLGNTDRHSIKKNLIGALLFDSGETAEATRLKRTARRRYTRRKNRICYLQEIFSNEMAKVDDSFFHRLEESFLVEEDKKHERHPIFGNIVDEVAYHEKYPTIYHLRKKLVDSTDKADLRLIYLALAHMIKFRGHFLIEGDLNPDNSDVDKLFIQLVQTYNQLFEENPINASGVDAKAILSARLSKSRRLENLIAQLPGEKKNGLFGNLIALSLGLTPNFKSNFDLAEDAKLQLSKDTYDDDLDNLLAQIGDQYADLFLAAKNLSDAILLSDILRVNTEITKAPLSASMIKRYDEHHQDLTLLKALVRQQLPEKYKEIFFDQSKNGYAGYIDGGASQEEFYKFIKPILEKMDGTEELLVKLNREDLLRKQRTFDNGSIPHQIHLGELHAILRRQEDFYPFLKDNREKIEKILTFRIPYYVGPLARGNSRFAWMTRKSEETITPWNFEEVVDKGASAQSFIERMTNFDKNLPNEKVLPKHSLLYEYFTVYNELTKVKYVTEGMRKPAFLSGEQKKAIVDLLFKTNRKVTVKQLKEDYFKKIECFDSVEISGVEDRFNASLGTYHDLLKIIKDKDFLDNEENEDILEDIVLTLTLFEDREMIEERLKTYAHLFDDKVMKQLKRRRYTGWGRLSRKLINGIRDKQSGKTILDFLKSDGFANRNFMQLIHDDSLTFKEDIQKAQVSGQGDSLHEHIANLAGSPAIKKGILQTVKVVDELVKVMGRHKPENIVIEMARENQTTQKGQKNSRERMKRIEEGIKELGSQILKEHPVENTQLQNEKLYLYYLQNGRDMYVDQELDINRLSDYDVDHIVPQSFLKDDSIDNKVLTRSDKARGKSDNVPSEEVVKKMKNYWRQLLNAKLITQRKFDNLTKAERGGLSELDKAGFIKRQLVETRQITKHVAQILDSRMNTKYDENDKLIREVKVITLKSKLVSDFRKDFQFYKVREINNYHHAHDAYLNAVVGTALIKKYPKLESEFVYGDYKVYDVRKMIAKSEQEIGKATAKYFFYSNIMNFFKTEITLANGEIRKRPLIETNGETGEIVWDKGRDFATVRKVLSMPQVNIVKKTEVQTGGFSKESILPKRNSDKLIARKKDWDPKKYGGFDSPTVAYSVLVVAKVEKGKSKKLKSVKELLGITIMERSSFEKNPIDFLEAKGYKEVKKDLIIKLPKYSLFELENGRKRMLASAGELQKGNELALPSKYVNFLYLASHYEKLKGSPEDNEQKQLFVEQHKHYLDEIIEQISEFSKRVILADANLDKVLSAYNKHRDKPIREQAENIIHLFTLTNLGAPAAFKYFDTTIDRKRYTSTKEVLDATLIHQSITGLYETRIDLSQLGGDGGGGSGGTLNIEDEYRLHEISTEPDVSPGSTWLSDFPQAWAETGGMGLAVRQAPLIIPLKATSTPVSIKQYPMSQEAKLGIKPHIQRLLDQGILVPCQSPWNTPLLPVKKPGTNDYRPVQGLREVNKRVEDIHPTVPNPYNLLSGLPTSHRWYTVLDLKDAFFCLRLHPTSQPLFASEWRDPGMGISGQLTWTRLPQGFKNSPTLFNEALHRGLADFRIQHPDLILLQYVDDLLLAATSELDCQQGTRALLKTLGNLGYRASAKKAQICQKQVKYLGYLLREGQRWLTEARKETVMGQPTPKTPRQLREFLGTAGFCRLWIPRFAEMAAPLYPLTKPGTLFNWGPDQQKAYHEIKQALLTAPALGLPDLTKPFELFVDEKQGYAKGVLTQKLGPWRRPVAYLSKKLDPVAAGWPPCLRMVAAIAVLTKDAGKLTMGQPLVILAPHAVEALVKQPPDRWLSNARMTHYQAMLLDTDRVQFGPVVALNPATLLPLPEEGAPHDCLEILAETHGTEPDLTDQPIPDADHTWYTDGSSFLQEGQRKAGAAVTTETEVIWARALPAGTSAQRAELIALTQALKMAEGKRLNVYTDSRYAFATAHIHGEIYKRRGWLTSEGREIKNKSEILALLKALFLPKRLSIIHCLGHQKGDSAEARGNRLADQAAREAAIKTPPDTSTLLAGKRTADGSEFEKRTADGSEFESPKKKAKVE

SEQ ID NO: 3139 - protein, 2091 aa, synthetic construct
MPAAKRVKLDGGDKKYSIGLDIGTNSVGWAVITDEYKVPSKKFKVLGNTDRHSIKKNLIGALLFDSGETAEATRLKRTARRRYTRRKNRICYLQEIFSNEMAKVDDSFFHRLEESFLVEEDKKHERHPIFGNIVDEVAYHEKYPTIYHLRKKLVDSTDKADLRLIYLALAHMIKFRGHFLIEGDLNPDNSDVDKLFIQLVQTYNQLFEENPINASGVDAKAILSARLSKSRRLENLIAQLPGEKKNGLFGNLIALSLGLTPNFKSNFDLAEDAKLQLSKDTYDDDLDNLLAQIGDQYADLFLAAKNLSDAILLSDILRVNTEITKAPLSASMIKRYDEHHQDLTLLKALVRQQLPEKYKEIFFDQSKNGYAGYIDGGASQEEFYKFIKPILEKMDGTEELLVKLNREDLLRKQRTFDNGSIPHQIHLGELHAILRRQEDFYPFLKDNREKIEKILTFRIPYYVGPLARGNSRFAWMTRKSEETITPWNFEEVVDKGASAQSFIERMTNFDKNLPNEKVLPKHSLLYEYFTVYNELTKVKYVTEGMRKPAFLSGEQKKAIVDLLFKTNRKVTVKQLKEDYFKKIECFDSVEISGVEDRFNASLGTYHDLLKIIKDKDFLDNEENEDILEDIVLTLTLFEDREMIEERLKTYAHLFDDKVMKQLKRRRYTGWGRLSRKLINGIRDKQSGKTILDFLKSDGFANRNFMQLIHDDSLTFKEDIQKAQVSGQGDSLHEHIANLAGSPAIKKGILQTVKVVDELVKVMGRHKPENIVIEMARENQTTQKGQKNSRERMKRIEEGIKELGSQILKEHPVENTQLQNEKLYLYYLQNGRDMYVDQELDINRLSDYDVDHIVPQSFLKDDSIDNKVLTRSDKARGKSDNVPSEEVVKKMKNYWRQLLNAKLITQRKFDNLTKAERGGLSELDKAGFIKRQLVETRQITKHVAQILDSRMNTKYDENDKLIREVKVITLKSKLVSDFRKDFQFYKVREINNYHHAHDAYLNAVVGTALIKKYPKLESEFVYGDYKVYDVRKMIAKSEQEIGKATAKYFFYSNIMNFFKTEITLANGEIRKRPLIETNGETGEIVWDKGRDFATVRKVLSMPQVNIVKKTEVQTGGFSKESILPKRNSDKLIARKKDWDPKKYGGFDSPTVAYSVLVVAKVEKGKSKKLKSVKELLGITIMERSSFEKNPIDFLEAKGYKEVKKDLIIKLPKYSLFELENGRKRMLASAGELQKGNELALPSKYVNFLYLASHYEKLKGSPEDNEQKQLFVEQHKHYLDEIIEQISEFSKRVILADANLDKVLSAYNKHRDKPIREQAENIIHLFTLTNLGAPAAFKYFDTTIDRKRYTSTKEVLDATLIHQSITGLYETRIDLSQLGGDGGPAPGGSGGTLNIEDEYRLHEISTEPDVSPGSTWLSDFPQAWAETGGMGLAVRQAPLIIPLKATSTPVSIKQYPMSQEAKLGIKPHIQRLLDQGILVPCQSPWNTPLLPVKKPGTNDYRPVQGLREVNKRVEDIHPTVPNPYNLLSGLPTSHRWYTVLDLKDAFFCLRLHPTSQPLFASEWRDPGMGISGQLTWTRLPQGFKNSPTLFNEALHRGLADFRIQHPDLILLQYVDDLLLAATSELDCQQGTRALLKTLGNLGYRASAKKAQICQKQVKYLGYLLREGQRWLTEARKETVMGQPTPKTPRQLREFLGTAGFCRLWIPRFAEMAAPLYPLTKPGTLFNWGPDQQKAYHEIKQALLTAPALGLPDLTKPFELFVDEKQGYAKGVLTQKLGPWRRPVAYLSKKLDPVAAGWPPCLRMVAAIAVLTKDAGKLTMGQPLVILAPHAVEALVKQPPDRWLSNARMTHYQAMLLDTDRVQFGPVVALNPATLLPLPEEGAPHDCLEILAETHGTEPDLTDQPIPDADHTWYTDGSSFLQEGQRKAGAAVTTETEVIWARALPAGTSAQRAELIALTQALKMAEGKRLNVYTDSRYAFATAHIHGEIYKRRGWLTSEGREIKNKSEILALLKALFLPKRLSIIHCLGHQKGDSAEARGNRLADQAAREAAIKTPPDTSTLLAGKRTADGSEFEKRTADGSEFESPKKKAKVE

SEQ ID NO: 3140 - protein, 2105 aa, synthetic construct
MPAAKRVKLDGGDKKYSIGLDIGTNSVGWAVITDEYKVPSKKFKVLGNTDRHSIKKNLIGALLFDSGETAEATRLKRTARRRYTRRKNRICYLQEIFSNEMAKVDDSFFHRLEESFLVEEDKKHERHPIFGNIVDEVAYHEKYPTIYHLRKKLVDSTDKADLRLIYLALAHMIKFRGHFLIEGDLNPDNSDVDKLFIQLVQTYNQLFEENPINASGVDAKAILSARLSKSRRLENLIAQLPGEKKNGLFGNLIALSLGLTPNFKSNFDLAEDAKLQLSKDTYDDDLDNLLAQIGDQYADLFLAAKNLSDAILLSDILRVNTEITKAPLSASMIKRYDEHHQDLTLLKALVRQQLPEKYKEIFFDQSKNGYAGYIDGGASQEEFYKFIKPILEKMDGTEELLVKLNREDLLRKQRTFDNGSIPHQIHLGELHAILRRQEDFYPFLKDNREKIEKILTFRIPYYVGPLARGNSRFAWMTRKSEETITPWNFEEVVDKGASAQSFIERMTNFDKNLPNEKVLPKHSLLYEYFTVYNELTKVKYVTEGMRKPAFLSGEQKKAIVDLLFKTNRKVTVKQLKEDYFKKIECFDSVEISGVEDRFNASLGTYHDLLKIIKDKDFLDNEENEDILEDIVLTLTLFEDREMIEERLKTYAHLFDDKVMKQLKRRRYTGWGRLSRKLINGIRDKQSGKTILDFLKSDGFANRNFMQLIHDDSLTFKEDIQKAQVSGQGDSLHEHIANLAGSPAIKKGILQTVKVVDELVKVMGRHKPENIVIEMARENQTTQKGQKNSRERMKRIEEGIKELGSQILKEHPVENTQLQNEKLYLYYLQNGRDMYVDQELDINRLSDYDVDHIVPQSFLKDDSIDNKVLTRSDKARGKSDNVPSEEVVKKMKNYWRQLLNAKLITQRKFDNLTKAERGGLSELDKAGFIKRQLVETRQITKHVAQILDSRMNTKYDENDKLIREVKVITLKSKLVSDFRKDFQFYKVREINNYHHAHDAYLNAVVGTALIKKYPKLESEFVYGDYKVYDVRKMIAKSEQEIGKATAKYFFYSNIMNFFKTEITLANGEIRKRPLIETNGETGEIVWDKGRDFATVRKVLSMPQVNIVKKTEVQTGGFSKESILPKRNSDKLIARKKDWDPKKYGGFDSPTVAYSVLVVAKVEKGKSKKLKSVKELLGITIMERSSFEKNPIDFLEAKGYKEVKKDLIIKLPKYSLFELENGRKRMLASAGELQKGNELALPSKYVNFLYLASHYEKLKGSPEDNEQKQLFVEQHKHYLDEIIEQISEFSKRVILADANLDKVLSAYNKHRDKPIREQAENIIHLFTLTNLGAPAAFKYFDTTIDRKRYTSTKEVLDATLIHQSITGLYETRIDLSQLGGDGGEAAAKEAAAKEAAAKEAAAKGGTLNIEDEYRLHEISTEPDVSPGSTWLSDFPQAWAETGGMGLAVRQAPLIIPLKATSTPVSIKQYPMSQEAKLGIKPHIQRLLDQGILVPCQSPWNTPLLPVKKPGTNDYRPVQGLREVNKRVEDIHPTVPNPYNLLSGLPTSHRWYTVLDLKDAFFCLRLHPTSQPLFASEWRDPGMGISGQLTWTRLPQGFKNSPTLFNEALHRGLADFRIQHPDLILLQYVDDLLLAATSELDCQQGTRALLKTLGNLGYRASAKKAQICQKQVKYLGYLLREGQRWLTEARKETVMGQPTPKTPRQLREFLGTAGFCRLWIPRFAEMAAPLYPLTKPGTLFNWGPDQQKAYHEIKQALLTAPALGLPDLTKPFELFVDEKQGYAKGVLTQKLGPWRRPVAYLSKKLDPVAAGWPPCLRMVAAIAVLTKDAGKLTMGQPLVILAPHAVEALVKQPPDRWLSNARMTHYQAMLLDTDRVQFGPVVALNPATLLPLPEEGAPHDCLEILAETHGTEPDLTDQPIPDADHTWYTDGSSFLQEGQRKAGAAVTTETEVIWARALPAGTSAQRAELIALTQALKMAEGKRLNVYTDSRYAFATAHIHGEIYKRRGWLTSEGREIKNKSEILALLKALFLPKRLSIIHCLGHQKGDSAEARGNRLADQAAREAAIKTPPDTSTLLAGKRTADGSEFEKRTADGSEFESPKKKAKVE

SEQ ID NO: 3141 - protein, 2151 aa, synthetic construct
MPAAKRVKLDGGDKKYSIGLDIGTNSVGWAVITDEYKVPSKKFKVLGNTDRHSIKKNLIGALLFDSGETAEATRLKRTARRRYTRRKNRICYLQEIFSNEMAKVDDSFFHRLEESFLVEEDKKHERHPIFGNIVDEVAYHEKYPTIYHLRKKLVDSTDKADLRLIYLALAHMIKFRGHFLIEGDLNPDNSDVDKLFIQLVQTYNQLFEENPINASGVDAKAILSARLSKSRRLENLIAQLPGEKKNGLFGNLIALSLGLTPNFKSNFDLAEDAKLQLSKDTYDDDLDNLLAQIGDQYADLFLAAKNLSDAILLSDILRVNTEITKAPLSASMIKRYDEHHQDLTLLKALVRQQLPEKYKEIFFDQSKNGYAGYIDGGASQEEFYKFIKPILEKMDGTEELLVKLNREDLLRKQRTFDNGSIPHQIHLGELHAILRRQEDFYPFLKDNREKIEKILTFRIPYYVGPLARGNSRFAWMTRKSEETITPWNFEEVVDKGASAQSFIERMTNFDKNLPNEKVLPKHSLLYEYFTVYNELTKVKYVTEGMRKPAFLSGEQKKAIVDLLFKTNRKVTVKQLKEDYFKKIECFDSVEISGVEDRFNASLGTYHDLLKIIKDKDFLDNEENEDILEDIVLTLTLFEDREMIEERLKTYAHLFDDKVMKQLKRRRYTGWGRLSRKLINGIRDKQSGKTILDFLKSDGFANRNFMQLIHDDSLTFKEDIQKAQVSGQGDSLHEHIANLAGSPAIKKGILQTVKVVDELVKVMGRHKPENIVIEMARENQTTQKGQKNSRERMKRIEEGIKELGSQILKEHPVENTQLQNEKLYLYYLQNGRDMYVDQELDINRLSDYDVDHIVPQSFLKDDSIDNKVLTRSDKARGKSDNVPSEEVVKKMKNYWRQLLNAKLITQRKFDNLTKAERGGLSELDKAGFIKRQLVETRQITKHVAQILDSRMNTKYDENDKLIREVKVITLKSKLVSDFRKDFQFYKVREINNYHHAHDAYLNAVVGTALIKKYPKLESEFVYGDYKVYDVRKMIAKSEQEIGKATAKYFFYSNIMNFFKTEITLANGEIRKRPLIETNGETGEIVWDKGRDFATVRKVLSMPQVNIVKKTEVQTGGFSKESILPKRNSDKLIARKKDWDPKKYGGFDSPTVAYSVLVVAKVEKGKSKKLKSVKELLGITIMERSSFEKNPIDFLEAKGYKEVKKDLIIKLPKYSLFELENGRKRMLASAGELQKGNELALPSKYVNFLYLASHYEKLKGSPEDNEQKQLFVEQHKHYLDEIIEQISEFSKRVILADANLDKVLSAYNKHRDKPIREQAENIIHLFTLTNLGAPAAFKYFDTTIDRKRYTSTKEVLDATLIHQSITGLYETRIDLSQLGGDGGAEAAAKEAAAKEAAAKEAAAKALEAEAAAKEAAAKEAAAKEAAAKAGGVQEISDSRPMLHIYLNGRRFLGLLDTGADKTCIAGRDWPANWPIHQTESSLQGLGMACGVARSSQPLRWQHEDKSGIIHPFVIPTLPFTLWGRDIMKDIKVRLMTDSPDDSQDLMIGAIESNLFADQISWKSDQPVWLNQWPLKQEKLQALQQLVTEQLQLGHLEESNSPWNTPVFVIKKKSGKWRLLQDLRAVNATMHDMGALQPGLPSPVAVPKGWEIIIIDLQDCFFNIKLHPEDCKRFAFSVPSPNFKRPYQRFQWKVLPQGMKNSPTLCQKFVDKAILTVRDKYQDSYIVHYMDDILLAHPSRSIVDEILTSMIQALNKHGLVVSTEKIQKYDNLKYLGTHIQGDSVSYQKLQIRTDKLRTLNDFQKLLGNINWIRPFLKLTTGELKPLFEILNGDSNPISTRKLTPEACKALQLMNERLSTARVKRLDLSQPWSLCILKTEYTPTACLWQDGVVEWIHLPHISPKVITPYDIFCTQLIIKGRHRSKELFSKDPDYIVVPYTKVQFDLLLQEKEDWPISLLGFLGEVHFHLPKDPLLTFTLQTAIIFPHMTSTTPLEKGIVIFTDGSANGRSVTYIQGREPIIKENTQNTAQQAEIVAVITAFEEVSQPFNLYTDSKYVTGLFPEIETATLSPRTKIYTELKHLQRLIHKRQEKFYIGHIRGHTGLPGPLAQGNAYADSLTRILTAAGKRTADGSEFEKRTADGSEFESPKKKAKVE

SEQ ID NO: 3142 - protein, 2130 aa, synthetic construct
MPAAKRVKLDGGDKKYSIGLDIGTNSVGWAVITDEYKVPSKKFKVLGNTDRHSIKKNLIGALLFDSGETAEATRLKRTARRRYTRRKNRICYLQEIFSNEMAKVDDSFFHRLEESFLVEEDKKHERHPIFGNIVDEVAYHEKYPTIYHLRKKLVDSTDKADLRLIYLALAHMIKFRGHFLIEGDLNPDNSDVDKLFIQLVQTYNQLFEENPINASGVDAKAILSARLSKSRRLENLIAQLPGEKKNGLFGNLIALSLGLTPNFKSNFDLAEDAKLQLSKDTYDDDLDNLLAQIGDQYADLFLAAKNLSDAILLSDILRVNTEITKAPLSASMIKRYDEHHQDLTLLKALVRQQLPEKYKEIFFDQSKNGYAGYIDGGASQEEFYKFIKPILEKMDGTEELLVKLNREDLLRKQRTFDNGSIPHQIHLGELHAILRRQEDFYPFLKDNREKIEKILTFRIPYYVGPLARGNSRFAWMTRKSEETITPWNFEEVVDKGASAQSFIERMTNFDKNLPNEKVLPKHSLLYEYFTVYNELTKVKYVTEGMRKPAFLSGEQKKAIVDLLFKTNRKVTVKQLKEDYFKKIECFDSVEISGVEDRFNASLGTYHDLLKIIKDKDFLDNEENEDILEDIVLTLTLFEDREMIEERLKTYAHLFDDKVMKQLKRRRYTGWGRLSRKLINGIRDKQSGKTILDFLKSDGFANRNFMQLIHDDSLTFKEDIQKAQVSGQGDSLHEHIANLAGSPAIKKGILQTVKVVDELVKVMGRHKPENIVIEMARENQTTQKGQKNSRERMKRIEEGIKELGSQILKEHPVENTQLQNEKLYLYYLQNGRDMYVDQELDINRLSDYDVDHIVPQSFLKDDSIDNKVLTRSDKARGKSDNVPSEEVVKKMKNYWRQLLNAKLITQRKFDNLTKAERGGLSELDKAGFIKRQLVETRQITKHVAQILDSRMNTKYDENDKLIREVKVITLKSKLVSDFRKDFQFYKVREINNYHHAHDAYLNAVVGTALIKKYPKLESEFVYGDYKVYDVRKMIAKSEQEIGKATAKYFFYSNIMNFFKTEITLANGEIRKRPLIETNGETGEIVWDKGRDFATVRKVLSMPQVNIVKKTEVQTGGFSKESILPKRNSDKLIARKKDWDPKKYGGFDSPTVAYSVLVVAKVEKGKSKKLKSVKELLGITIMERSSFEKNPIDFLEAKGYKEVKKDLIIKLPKYSLFELENGRKRMLASAGELQKGNELALPSKYVNFLYLASHYEKLKGSPEDNEQKQLFVEQHKHYLDEIIEQISEFSKRVILADANLDKVLSAYNKHRDKPIREQAENIIHLFTLTNLGAPAAFKYFDTTIDRKRYTSTKEVLDATLIHQSITGLYETRIDLSQLGGDGGEAAAKEAAAKEAAAKEAAAKEAAAKGGVQEISDSRPMLHIYLNGRRFLGLLDTGADKTCIAGRDWPANWPIHQTESSLQGLGMACGVARSSQPLRWQHEDKSGIIHPFVIPTLPFTLWGRDIMKDIKVRLMTDSPDDSQDLMIGAIESNLFADQISWKSDQPVWLNQWPLKQEKLQALQQLVTEQLQLGHLEESNSPWNTPVFVIKKKSGKWRLLQDLRAVNATMHDMGALQPGLPSPVAVPKGWEIIIIDLQDCFFNIKLHPEDCKRFAFSVPSPNFKRPYQRFQWKVLPQGMKNSPTLCQKFVDKAILTVRDKYQDSYIVHYMDDILLAHPSRSIVDEILTSMIQALNKHGLVVSTEKIQKYDNLKYLGTHIQGDSVSYQKLQIRTDKLRTLNDFQKLLGNINWIRPFLKLTTGELKPLFEILNGDSNPISTRKLTPEACKALQLMNERLSTARVKRLDLSQPWSLCILKTEYTPTACLWQDGVVEWIHLPHISPKVITPYDIFCTQLIIKGRHRSKELFSKDPDYIVVPYTKVQFDLLLQEKEDWPISLLGFLGEVHFHLPKDPLLTFTLQTAIIFPHMTSTTPLEKGIVIFTDGSANGRSVTYIQGREPIIKENTQNTAQQAEIVAVITAFEEVSQPFNLYTDSKYVTGLFPEIETATLSPRTKIYTELKHLQRLIHKRQEKFYIGHIRGHTGLPGPLAQGNAYADSLTRILTAAGKRTADGSEFEKRTADGSEFESPKKKAKVE

SEQ ID NO: 3143 - protein, 2138 aa, synthetic construct
MPAAKRVKLDGGDKKYSIGLDIGTNSVGWAVITDEYKVPSKKFKVLGNTDRHSIKKNLIGALLFDSGETAEATRLKRTARRRYTRRKNRICYLQEIFSNEMAKVDDSFFHRLEESFLVEEDKKHERHPIFGNIVDEVAYHEKYPTIYHLRKKLVDSTDKADLRLIYLALAHMIKFRGHFLIEGDLNPDNSDVDKLFIQLVQTYNQLFEENPINASGVDAKAILSARLSKSRRLENLIAQLPGEKKNGLFGNLIALSLGLTPNFKSNFDLAEDAKLQLSKDTYDDDLDNLLAQIGDQYADLFLAAKNLSDAILLSDILRVNTEITKAPLSASMIKRYDEHHQDLTLLKALVRQQLPEKYKEIFFDQSKNGYAGYIDGGASQEEFYKFIKPILEKMDGTEELLVKLNREDLLRKQRTFDNGSIPHQIHLGELHAILRRQEDFYPFLKDNREKIEKILTFRIPYYVGPLARGNSRFAWMTRKSEETITPWNFEEVVDKGASAQSFIERMTNFDKNLPNEKVLPKHSLLYEYFTVYNELTKVKYVTEGMRKPAFLSGEQKKAIVDLLFKTNRKVTVKQLKEDYFKKIECFDSVEISGVEDRFNASLGTYHDLLKIIKDKDFLDNEENEDILEDIVLTLTLFEDREMIEERLKTYAHLFDDKVMKQLKRRRYTGWGRLSRKLINGIRDKQSGKTILDFLKSDGFANRNFMQLIHDDSLTFKEDIQKAQVSGQGDSLHEHIANLAGSPAIKKGILQTVKVVDELVKVMGRHKPENIVIEMARENQTTQKGQKNSRERMKRIEEGIKELGSQILKEHPVENTQLQNEKLYLYYLQNGRDMYVDQELDINRLSDYDVDHIVPQSFLKDDSIDNKVLTRSDKARGKSDNVPSEEVVKKMKNYWRQLLNAKLITQRKFDNLTKAERGGLSELDKAGFIKRQLVETRQITKHVAQILDSRMNTKYDENDKLIREVKVITLKSKLVSDFRKDFQFYKVREINNYHHAHDAYLNAVVGTALIKKYPKLESEFVYGDYKVYDVRKMIAKSEQEIGKATAKYFFYSNIMNFFKTEITLANGEIRKRPLIETNGETGEIVWDKGRDFATVRKVLSMPQVNIVKKTEVQTGGFSKESILPKRNSDKLIARKKDWDPKKYGGFDSPTVAYSVLVVAKVEKGKSKKLKSVKELLGITIMERSSFEKNPIDFLEAKGYKEVKKDLIIKLPKYSLFELENGRKRMLASAGELQKGNELALPSKYVNFLYLASHYEKLKGSPEDNEQKQLFVEQHKHYLDEIIEQISEFSKRVILADANLDKVLSAYNKHRDKPIREQAENIIHLFTLTNLGAPAAFKYFDTTIDRKRYTSTKEVLDATLIHQSITGLYETRIDLSQLGGDGGSGGSSGGSSGSETPGTSESATPESSGGSSGGSSGGVQEISDSRPMLHIYLNGRRFLGLLDTGADKTCIAGRDWPANWPIHQTESSLQGLGMACGVARSSQPLRWQHEDKSGIIHPFVIPTLPFTLWGRDIMKDIKVRLMTDSPDDSQDLMIGAIESNLFADQISWKSDQPVWLNQWPLKQEKLQALQQLVTEQLQLGHLEESNSPWNTPVFVIKKKSGKWRLLQDLRAVNATMHDMGALQPGLPSPVAVPKGWEIIIIDLQDCFFNIKLHPEDCKRFAFSVPSPNFKRPYQRFQWKVLPQGMKNSPTLCQKFVDKAILTVRDKYQDSYIVHYMDDILLAHPSRSIVDEILTSMIQALNKHGLVVSTEKIQKYDNLKYLGTHIQGDSVSYQKLQIRTDKLRTLNDFQKLLGNINWIRPFLKLTTGELKPLFEILNGDSNPISTRKLTPEACKALQLMNERLSTARVKRLDLSQPWSLCILKTEYTPTACLWQDGVVEWIHLPHISPKVITPYDIFCTQLIIKGRHRSKELFSKDPDYIVVPYTKVQFDLLLQEKEDWPISLLGFLGEVHFHLPKDPLLTFTLQTAIIFPHMTSTTPLEKGIVIFTDGSANGRSVTYIQGREPIIKENTQNTAQQAEIVAVITAFEEVSQPFNLYTDSKYVTGLFPEIETATLSPRTKIYTELKHLQRLIHKRQEKFYIGHIRGHTGLPGPLAQGNAYADSLTRILTAAGKRTADGSEFEKRTADGSEFESPKKKAKVE

SEQ ID NO: 3144 - protein, 2116 aa, synthetic construct
MPAAKRVKLDGGDKKYSIGLDIGTNSVGWAVITDEYKVPSKKFKVLGNTDRHSIKKNLIGALLFDSGETAEATRLKRTARRRYTRRKNRICYLQEIFSNEMAKVDDSFFHRLEESFLVEEDKKHERHPIFGNIVDEVAYHEKYPTIYHLRKKLVDSTDKADLRLIYLALAHMIKFRGHFLIEGDLNPDNSDVDKLFIQLVQTYNQLFEENPINASGVDAKAILSARLSKSRRLENLIAQLPGEKKNGLFGNLIALSLGLTPNFKSNFDLAEDAKLQLSKDTYDDDLDNLLAQIGDQYADLFLAAKNLSDAILLSDILRVNTEITKAPLSASMIKRYDEHHQDLTLLKALVRQQLPEKYKEIFFDQSKNGYAGYIDGGASQEEFYKFIKPILEKMDGTEELLVKLNREDLLRKQRTFDNGSIPHQIHLGELHAILRRQEDFYPFLKDNREKIEKILTFRIPYYVGPLARGNSRFAWMTRKSEETITPWNFEEVVDKGASAQSFIERMTNFDKNLPNEKVLPKHSLLYEYFTVYNELTKVKYVTEGMRKPAFLSGEQKKAIVDLLFKTNRKVTVKQLKEDYFKKIECFDSVEISGVEDRFNASLGTYHDLLKIIKDKDFLDNEENEDILEDIVLTLTLFEDREMIEERLKTYAHLFDDKVMKQLKRRRYTGWGRLSRKLINGIRDKQSGKTILDFLKSDGFANRNFMQLIHDDSLTFKEDIQKAQVSGQGDSLHEHIANLAGSPAIKKGILQTVKVVDELVKVMGRHKPENIVIEMARENQTTQKGQKNSRERMKRIEEGIKELGSQILKEHPVENTQLQNEKLYLYYLQNGRDMYVDQELDINRLSDYDVDHIVPQSFLKDDSIDNKVLTRSDKARGKSDNVPSEEVVKKMKNYWRQLLNAKLITQRKFDNLTKAERGGLSELDKAGFIKRQLVETRQITKHVAQILDSRMNTKYDENDKLIREVKVITLKSKLVSDFRKDFQFYKVREINNYHHAHDAYLNAVVGTALIKKYPKLESEFVYGDYKVYDVRKMIAKSEQEIGKATAKYFFYSNIMNFFKTEITLANGEIRKRPLIETNGETGEIVWDKGRDFATVRKVLSMPQVNIVKKTEVQTGGFSKESILPKRNSDKLIARKKDWDPKKYGGFDSPTVAYSVLVVAKVEKGKSKKLKSVKELLGITIMERSSFEKNPIDFLEAKGYKEVKKDLIIKLPKYSLFELENGRKRMLASAGELQKGNELALPSKYVNFLYLASHYEKLKGSPEDNEQKQLFVEQHKHYLDEIIEQISEFSKRVILADANLDKVLSAYNKHRDKPIREQAENIIHLFTLTNLGAPAAFKYFDTTIDRKRYTSTKEVLDATLIHQSITGLYETRIDLSQLGGDGGGGGEAAAKGGSGGVQEISDSRPMLHIYLNGRRFLGLLDTGADKTCIAGRDWPANWPIHQTESSLQGLGMACGVARSSQPLRWQHEDKSGIIHPFVIPTLPFTLWGRDIMKDIKVRLMTDSPDDSQDLMIGAIESNLFADQISWKSDQPVWLNQWPLKQEKLQALQQLVTEQLQLGHLEESNSPWNTPVFVIKKKSGKWRLLQDLRAVNATMHDMGALQPGLPSPVAVPKGWEIIIIDLQDCFFNIKLHPEDCKRFAFSVPSPNFKRPYQRFQWKVLPQGMKNSPTLCQKFVDKAILTVRDKYQDSYIVHYMDDILLAHPSRSIVDEILTSMIQALNKHGLVVSTEKIQKYDNLKYLGTHIQGDSVSYQKLQIRTDKLRTLNDFQKLLGNINWIRPFLKLTTGELKPLFEILNGDSNPISTRKLTPEACKALQLMNERLSTARVKRLDLSQPWSLCILKTEYTPTACLWQDGVVEWIHLPHISPKVITPYDIFCTQLIIKGRHRSKELFSKDPDYIVVPYTKVQFDLLLQEKEDWPISLLGFLGEVHFHLPKDPLLTFTLQTAIIFPHMTSTTPLEKGIVIFTDGSANGRSVTYIQGREPIIKENTQNTAQQAEIVAVITAFEEVSQPFNLYTDSKYVTGLFPEIETATLSPRTKIYTELKHLQRLIHKRQEKFYIGHIRGHTGLPGPLAQGNAYADSLTRILTAAGKRTADGSEFEKRTADGSEFESPKKKAKVE

SEQ ID NO: 3145 - protein, 2113 aa, synthetic construct
MPAAKRVKLDGGDKKYSIGLDIGTNSVGWAVITDEYKVPSKKFKVLGNTDRHSIKKNLIGALLFDSGETAEATRLKRTARRRYTRRKNRICYLQEIFSNEMAKVDDSFFHRLEESFLVEEDKKHERHPIFGNIVDEVAYHEKYPTIYHLRKKLVDSTDKADLRLIYLALAHMIKFRGHFLIEGDLNPDNSDVDKLFIQLVQTYNQLFEENPINASGVDAKAILSARLSKSRRLENLIAQLPGEKKNGLFGNLIALSLGLTPNFKSNFDLAEDAKLQLSKDTYDDDLDNLLAQIGDQYADLFLAAKNLSDAILLSDILRVNTEITKAPLSASMIKRYDEHHQDLTLLKALVRQQLPEKYKEIFFDQSKNGYAGYIDGGASQEEFYKFIKPILEKMDGTEELLVKLNREDLLRKQRTFDNGSIPHQIHLGELHAILRRQEDFYPFLKDNREKIEKILTFRIPYYVGPLARGNSRFAWMTRKSEETITPWNFEEVVDKGASAQSFIERMTNFDKNLPNEKVLPKHSLLYEYFTVYNELTKVKYVTEGMRKPAFLSGEQKKAIVDLLFKTNRKVTVKQLKEDYFKKIECFDSVEISGVEDRFNASLGTYHDLLKIIKDKDFLDNEENEDILEDIVLTLTLFEDREMIEERLKTYAHLFDDKVMKQLKRRRYTGWGRLSRKLINGIRDKQSGKTILDFLKSDGFANRNFMQLIHDDSLTFKEDIQKAQVSGQGDSLHEHIANLAGSPAIKKGILQTVKVVDELVKVMGRHKPENIVIEMARENQTTQKGQKNSRERMKRIEEGIKELGSQILKEHPVENTQLQNEKLYLYYLQNGRDMYVDQELDINRLSDYDVDHIVPQSFLKDDSIDNKVLTRSDKARGKSDNVPSEEVVKKMKNYWRQLLNAKLITQRKFDNLTKAERGGLSELDKAGFIKRQLVETRQITKHVAQILDSRMNTKYDENDKLIREVKVITLKSKLVSDFRKDFQFYKVREINNYHHAHDAYLNAVVGTALIKKYPKLESEFVYGDYKVYDVRKMIAKSEQEIGKATAKYFFYSNIMNFFKTEITLANGEIRKRPLIETNGETGEIVWDKGRDFATVRKVLSMPQVNIVKKTEVQTGGFSKESILPKRNSDKLIARKKDWDPKKYGGFDSPTVAYSVLVVAKVEKGKSKKLKSVKELLGITIMERSSFEKNPIDFLEAKGYKEVKKDLIIKLPKYSLFELENGRKRMLASAGELQKGNELALPSKYVNFLYLASHYEKLKGSPEDNEQKQLFVEQHKHYLDEIIEQISEFSKRVILADANLDKVLSAYNKHRDKPIREQAENIIHLFTLTNLGAPAAFKYFDTTIDRKRYTSTKEVLDATLIHQSITGLYETRIDLSQLGGDGGPAPEAAAKGGVQEISDSRPMLHIYLNGRRFLGLLDTGADKTCIAGRDWPANWPIHQTESSLQGLGMACGVARSSQPLRWQHEDKSGIIHPFVIPTLPFTLWGRDIMKDIKVRLMTDSPDDSQDLMIGAIESNLFADQISWKSDQPVWLNQWPLKQEKLQALQQLVTEQLQLGHLEESNSPWNTPVFVIKKKSGKWRLLQDLRAVNATMHDMGALQPGLPSPVAVPKGWEIIIIDLQDCFFNIKLHPEDCKRFAFSVPSPNFKRPYQRFQWKVLPQGMKNSPTLCQKFVDKAILTVRDKYQDSYIVHYMDDILLAHPSRSIVDEILTSMIQALNKHGLVVSTEKIQKYDNLKYLGTHIQGDSVSYQKLQIRTDKLRTLNDFQKLLGNINWIRPFLKLTTGELKPLFEILNGDSNPISTRKLTPEACKALQLMNERLSTARVKRLDLSQPWSLCILKTEYTPTACLWQDGVVEWIHLPHISPKVITPYDIFCTQLIIKGRHRSKELFSKDPDYIVVPYTKVQFDLLLQEKEDWPISLLGFLGEVHFHLPKDPLLTFTLQTAIIFPHMTSTTPLEKGIVIFTDGSANGRSVTYIQGREPIIKENTQNTAQQAEIVAVITAFEEVSQPFNLYTDSKYVTGLFPEIETATLSPRTKIYTELKHLQRLIHKRQEKFYIGHIRGHTGLPGPLAQGNAYADSLTRILTAAGKRTADGSEFEKRTADGSEFESPKKKAKVE

SEQ ID NO: 3146 - protein, 2116 aa, synthetic construct
MPAAKRVKLDGGDKKYSIGLDIGTNSVGWAVITDEYKVPSKKFKVLGNTDRHSIKKNLIGALLFDSGETAEATRLKRTARRRYTRRKNRICYLQEIFSNEMAKVDDSFFHRLEESFLVEEDKKHERHPIFGNIVDEVAYHEKYPTIYHLRKKLVDSTDKADLRLIYLALAHMIKFRGHFLIEGDLNPDNSDVDKLFIQLVQTYNQLFEENPINASGVDAKAILSARLSKSRRLENLIAQLPGEKKNGLFGNLIALSLGLTPNFKSNFDLAEDAKLQLSKDTYDDDLDNLLAQIGDQYADLFLAAKNLSDAILLSDILRVNTEITKAPLSASMIKRYDEHHQDLTLLKALVRQQLPEKYKEIFFDQSKNGYAGYIDGGASQEEFYKFIKPILEKMDGTEELLVKLNREDLLRKQRTFDNGSIPHQIHLGELHAILRRQEDFYPFLKDNREKIEKILTFRIPYYVGPLARGNSRFAWMTRKSEETITPWNFEEVVDKGASAQSFIERMTNFDKNLPNEKVLPKHSLLYEYFTVYNELTKVKYVTEGMRKPAFLSGEQKKAIVDLLFKTNRKVTVKQLKEDYFKKIECFDSVEISGVEDRFNASLGTYHDLLKIIKDKDFLDNEENEDILEDIVLTLTLFEDREMIEERLKTYAHLFDDKVMKQLKRRRYTGWGRLSRKLINGIRDKQSGKTILDFLKSDGFANRNFMQLIHDDSLTFKEDIQKAQVSGQGDSLHEHIANLAGSPAIKKGILQTVKVVDELVKVMGRHKPENIVIEMARENQTTQKGQKNSRERMKRIEEGIKELGSQILKEHPVENTQLQNEKLYLYYLQNGRDMYVDQELDINRLSDYDVDHIVPQSFLKDDSIDNKVLTRSDKARGKSDNVPSEEVVKKMKNYWRQLLNAKLITQRKFDNLTKAERGGLSELDKAGFIKRQLVETRQITKHVAQILDSRMNTKYDENDKLIREVKVITLKSKLVSDFRKDFQFYKVREINNYHHAHDAYLNAVVGTALIKKYPKLESEFVYGDYKVYDVRKMIAKSEQEIGKATAKYFFYSNIMNFFKTEITLANGEIRKRPLIETNGETGEIVWDKGRDFATVRKVLSMPQVNIVKKTEVQTGGFSKESILPKRNSDKLIARKKDWDPKKYGGFDSPTVAYSVLVVAKVEKGKSKKLKSVKELLGITIMERSSFEKNPIDFLEAKGYKEVKKDLIIKLPKYSLFELENGRKRMLASAGELQKGNELALPSKYVNFLYLASHYEKLKGSPEDNEQKQLFVEQHKHYLDEIIEQISEFSKRVILADANLDKVLSAYNKHRDKPIREQAENIIHLFTLTNLGAPAAFKYFDTTIDRKRYTSTKEVLDATLIHQSITGLYETRIDLSQLGGDGGPAPGGGEAAAKGGVQEISDSRPMLHIYLNGRRFLGLLDTGADKTCIAGRDWPANWPIHQTESSLQGLGMACGVARSSQPLRWQHEDKSGIIHPFVIPTLPFTLWGRDIMKDIKVRLMTDSPDDSQDLMIGAIESNLFADQISWKSDQPVWLNQWPLKQEKLQALQQLVTEQLQLGHLEESNSPWNTPVFVIKKKSGKWRLLQDLRAVNATMHDMGALQPGLPSPVAVPKGWEIIIIDLQDCFFNIKLHPEDCKRFAFSVPSPNFKRPYQRFQWKVLPQGMKNSPTLCQKFVDKAILTVRDKYQDSYIVHYMDDILLAHPSRSIVDEILTSMIQALNKHGLVVSTEKIQKYDNLKYLGTHIQGDSVSYQKLQIRTDKLRTLNDFQKLLGNINWIRPFLKLTTGELKPLFEILNGDSNPISTRKLTPEACKALQLMNERLSTARVKRLDLSQPWSLCILKTEYTPTACLWQDGVVEWIHLPHISPKVITPYDIFCTQLIIKGRHRSKELFSKDPDYIVVPYTKVQFDLLLQEKEDWPISLLGFLGEVHFHLPKDPLLTFTLQTAIIFPHMTSTTPLEKGIVIFTDGSANGRSVTYIQGREPIIKENTQNTAQQAEIVAVITAFEEVSQPFNLYTDSKYVTGLFPEIETATLSPRTKIYTELKHLQRLIHKRQEKFYIGHIRGHTGLPGPLAQGNAYADSLTRILTAAGKRTADGSEFEKRTADGSEFESPKKKAKVE

SEQ ID NO: 3147 - protein, 2116 aa, synthetic construct
MPAAKRVKLDGGDKKYSIGLDIGTNSVGWAVITDEYKVPSKKFKVLGNTDRHSIKKNLIGALLFDSGETAEATRLKRTARRRYTRRKNRICYLQEIFSNEMAKVDDSFFHRLEESFLVEEDKKHERHPIFGNIVDEVAYHEKYPTIYHLRKKLVDSTDKADLRLIYLALAHMIKFRGHFLIEGDLNPDNSDVDKLFIQLVQTYNQLFEENPINASGVDAKAILSARLSKSRRLENLIAQLPGEKKNGLFGNLIALSLGLTPNFKSNFDLAEDAKLQLSKDTYDDDLDNLLAQIGDQYADLFLAAKNLSDAILLSDILRVNTEITKAPLSASMIKRYDEHHQDLTLLKALVRQQLPEKYKEIFFDQSKNGYAGYIDGGASQEEFYKFIKPILEKMDGTEELLVKLNREDLLRKQRTFDNGSIPHQIHLGELHAILRRQEDFYPFLKDNREKIEKILTFRIPYYVGPLARGNSRFAWMTRKSEETITPWNFEEVVDKGASAQSFIERMTNFDKNLPNEKVLPKHSLLYEYFTVYNELTKVKYVTEGMRKPAFLSGEQKKAIVDLLFKTNRKVTVKQLKEDYFKKIECFDSVEISGVEDRFNASLGTYHDLLKIIKDKDFLDNEENEDILEDIVLTLTLFEDREMIEERLKTYAHLFDDKVMKQLKRRRYTGWGRLSRKLINGIRDKQSGKTILDFLKSDGFANRNFMQLIHDDSLTFKEDIQKAQVSGQGDSLHEHIANLAGSPAIKKGILQTVKVVDELVKVMGRHKPENIVIEMARENQTTQKGQKNSRERMKRIEEGIKELGSQILKEHPVENTQLQNEKLYLYYLQNGRDMYVDQELDINRLSDYDVDHIVPQSFLKDDSIDNKVLTRSDKARGKSDNVPSEEVVKKMKNYWRQLLNAKLITQRKFDNLTKAERGGLSELDKAGFIKRQLVETRQITKHVAQILDSRMNTKYDENDKLIREVKVITLKSKLVSDFRKDFQFYKVREINNYHHAHDAYLNAVVGTALIKKYPKLESEFVYGDYKVYDVRKMIAKSEQEIGKATAKYFFYSNIMNFFKTEITLANGEIRKRPLIETNGETGEIVWDKGRDFATVRKVLSMPQVNIVKKTEVQTGGFSKESILPKRNSDKLIARKKDWDPKKYGGFDSPTVAYSVLVVAKVEKGKSKKLKSVKELLGITIMERSSFEKNPIDFLEAKGYKEVKKDLIIKLPKYSLFELENGRKRMLASAGELQKGNELALPSKYVNFLYLASHYEKLKGSPEDNEQKQLFVEQHKHYLDEIIEQISEFSKRVILADANLDKVLSAYNKHRDKPIREQAENIIHLFTLTNLGAPAAFKYFDTTIDRKRYTSTKEVLDATLIHQSITGLYETRIDLSQLGGDGGGSSEAAAKGGGGGVQEISDSRPMLHIYLNGRRFLGLLDTGADKTCIAGRDWPANWPIHQTESSLQGLGMACGVARSSQPLRWQHEDKSGIIHPFVIPTLPFTLWGRDIMKDIKVRLMTDSPDDSQDLMIGAIESNLFADQISWKSDQPVWLNQWPLKQEKLQALQQLVTEQLQLGHLEESNSPWNTPVFVIKKKSGKWRLLQDLRAVNATMHDMGALQPGLPSPVAVPKGWEIIIIDLQDCFFNIKLHPEDCKRFAFSVPSPNFKRPYQRFQWKVLPQGMKNSPTLCQKFVDKAILTVRDKYQDSYIVHYMDDILLAHPSRSIVDEILTSMIQALNKHGLVVSTEKIQKYDNLKYLGTHIQGDSVSYQKLQIRTDKLRTLNDFQKLLGNINWIRPFLKLTTGELKPLFEILNGDSNPISTRKLTPEACKALQLMNERLSTARVKRLDLSQPWSLCILKTEYTPTACLWQDGVVEWIHLPHISPKVITPYDIFCTQLIIKGRHRSKELFSKDPDYIVVPYTKVQFDLLLQEKEDWPISLLGFLGEVHFHLPKDPLLTFTLQTAIIFPHMTSTTPLEKGIVIFTDGSANGRSVTYIQGREPIIKENTQNTAQQAEIVAVITAFEEVSQPFNLYTDSKYVTGLFPEIETATLSPRTKIYTELKHLQRLIHKRQEKFYIGHIRGHTGLPGPLAQGNAYADSLTRILTAAGKRTADGSEFEKRTADGSEFESPKKKAKVE

SEQ ID NO: 3148 - protein, 2116 aa, synthetic construct
MPAAKRVKLDGGDKKYSIGLDIGTNSVGWAVITDEYKVPSKKFKVLGNTDRHSIKKNLIGALLFDSGETAEATRLKRTARRRYTRRKNRICYLQEIFSNEMAKVDDSFFHRLEESFLVEEDKKHERHPIFGNIVDEVAYHEKYPTIYHLRKKLVDSTDKADLRLIYLALAHMIKFRGHFLIEGDLNPDNSDVDKLFIQLVQTYNQLFEENPINASGVDAKAILSARLSKSRRLENLIAQLPGEKKNGLFGNLIALSLGLTPNFKSNFDLAEDAKLQLSKDTYDDDLDNLLAQIGDQYADLFLAAKNLSDAILLSDILRVNTEITKAPLSASMIKRYDEHHQDLTLLKALVRQQLPEKYKEIFFDQSKNGYAGYIDGGASQEEFYKFIKPILEKMDGTEELLVKLNREDLLRKQRTFDNGSIPHQIHLGELHAILRRQEDFYPFLKDNREKIEKILTFRIPYYVGPLARGNSRFAWMTRKSEETITPWNFEEVVDKGASAQSFIERMTNFDKNLPNEKVLPKHSLLYEYFTVYNELTKVKYVTEGMRKPAFLSGEQKKAIVDLLFKTNRKVTVKQLKEDYFKKIECFDSVEISGVEDRFNASLGTYHDLLKIIKDKDFLDNEENEDILEDIVLTLTLFEDREMIEERLKTYAHLFDDKVMKQLKRRRYTGWGRLSRKLINGIRDKQSGKTILDFLKSDGFANRNFMQLIHDDSLTFKEDIQKAQVSGQGDSLHEHIANLAGSPAIKKGILQTVKVVDELVKVMGRHKPENIVIEMARENQTTQKGQKNSRERMKRIEEGIKELGSQILKEHPVENTQLQNEKLYLYYLQNGRDMYVDQELDINRLSDYDVDHIVPQSFLKDDSIDNKVLTRSDKARGKSDNVPSEEVVKKMKNYWRQLLNAKLITQRKFDNLTKAERGGLSELDKAGFIKRQLVETRQITKHVAQILDSRMNTKYDENDKLIREVKVITLKSKLVSDFRKDFQFYKVREINNYHHAHDAYLNAVVGTALIKKYPKLESEFVYGDYKVYDVRKMIAKSEQEIGKATAKYFFYSNIMNFFKTEITLANGEIRKRPLIETNGETGEIVWDKGRDFATVRKVLSMPQVNIVKKTEVQTGGFSKESILPKRNSDKLIARKKDWDPKKYGGFDSPTVAYSVLVVAKVEKGKSKKLKSVKELLGITIMERSSFEKNPIDFLEAKGYKEVKKDLIIKLPKYSLFELENGRKRMLASAGELQKGNELALPSKYVNFLYLASHYEKLKGSPEDNEQKQLFVEQHKHYLDEIIEQISEFSKRVILADANLDKVLSAYNKHRDKPIREQAENIIHLFTLTNLGAPAAFKYFDTTIDRKRYTSTKEVLDATLIHQSITGLYETRIDLSQLGGDGGEAAAKGGSGSSGGVQEISDSRPMLHIYLNGRRFLGLLDTGADKTCIAGRDWPANWPIHQTESSLQGLGMACGVARSSQPLRWQHEDKSGIIHPFVIPTLPFTLWGRDIMKDIKVRLMTDSPDDSQDLMIGAIESNLFADQISWKSDQPVWLNQWPLKQEKLQALQQLVTEQLQLGHLEESNSPWNTPVFVIKKKSGKWRLLQDLRAVNATMHDMGALQPGLPSPVAVPKGWEIIIIDLQDCFFNIKLHPEDCKRFAFSVPSPNFKRPYQRFQWKVLPQGMKNSPTLCQKFVDKAILTVRDKYQDSYIVHYMDDILLAHPSRSIVDEILTSMIQALNKHGLVVSTEKIQKYDNLKYLGTHIQGDSVSYQKLQIRTDKLRTLNDFQKLLGNINWIRPFLKLTTGELKPLFEILNGDSNPISTRKLTPEACKALQLMNERLSTARVKRLDLSQPWSLCILKTEYTPTACLWQDGVVEWIHLPHISPKVITPYDIFCTQLIIKGRHRSKELFSKDPDYIVVPYTKVQFDLLLQEKEDWPISLLGFLGEVHFHLPKDPLLTFTLQTAIIFPHMTSTTPLEKGIVIFTDGSANGRSVTYIQGREPIIKENTQNTAQQAEIVAVITAFEEVSQPFNLYTDSKYVTGLFPEIETATLSPRTKIYTELKHLQRLIHKRQEKFYIGHIRGHTGLPGPLAQGNAYADSLTRILTAAGKRTADGSEFEKRTADGSEFESPKKKAKVE

SEQ ID NO: 3149 - protein, 2116 aa, synthetic construct
MPAAKRVKLDGGDKKYSIGLDIGTNSVGWAVITDEYKVPSKKFKVLGNTDRHSIKKNLIGALLFDSGETAEATRLKRTARRRYTRRKNRICYLQEIFSNEMAKVDDSFFHRLEESFLVEEDKKHERHPIFGNIVDEVAYHEKYPTIYHLRKKLVDSTDKADLRLIYLALAHMIKFRGHFLIEGDLNPDNSDVDKLFIQLVQTYNQLFEENPINASGVDAKAILSARLSKSRRLENLIAQLPGEKKNGLFGNLIALSLGLTPNFKSNFDLAEDAKLQLSKDTYDDDLDNLLAQIGDQYADLFLAAKNLSDAILLSDILRVNTEITKAPLSASMIKRYDEHHQDLTLLKALVRQQLPEKYKEIFFDQSKNGYAGYIDGGASQEEFYKFIKPILEKMDGTEELLVKLNREDLLRKQRTFDNGSIPHQIHLGELHAILRRQEDFYPFLKDNREKIEKILTFRIPYYVGPLARGNSRFAWMTRKSEETITPWNFEEVVDKGASAQSFIERMTNFDKNLPNEKVLPKHSLLYEYFTVYNELTKVKYVTEGMRKPAFLSGEQKKAIVDLLFKTNRKVTVKQLKEDYFKKIECFDSVEISGVEDRFNASLGTYHDLLKIIKDKDFLDNEENEDILEDIVLTLTLFEDREMIEERLKTYAHLFDDKVMKQLKRRRYTGWGRLSRKLINGIRDKQSGKTILDFLKSDGFANRNFMQLIHDDSLTFKEDIQKAQVSGQGDSLHEHIANLAGSPAIKKGILQTVKVVDELVKVMGRHKPENIVIEMARENQTTQKGQKNSRERMKRIEEGIKELGSQILKEHPVENTQLQNEKLYLYYLQNGRDMYVDQELDINRLSDYDVDHIVPQSFLKDDSIDNKVLTRSDKARGKSDNVPSEEVVKKMKNYWRQLLNAKLITQRKFDNLTKAERGGLSELDKAGFIKRQLVETRQITKHVAQILDSRMNTKYDENDKLIREVKVITLKSKLVSDFRKDFQFYKVREINNYHHAHDAYLNAVVGTALIKKYPKLESEFVYGDYKVYDVRKMIAKSEQEIGKATAKYFFYSNIMNFFKTEITLANGEIRKRPLIETNGETGEIVWDKGRDFATVRKVLSMPQVNIVKKTEVQTGGFSKESILPKRNSDKLIARKKDWDPKKYGGFDSPTVAYSVLVVAKVEKGKSKKLKSVKELLGITIMERSSFEKNPIDFLEAKGYKEVKKDLIIKLPKYSLFELENGRKRMLASAGELQKGNELALPSKYVNFLYLASHYEKLKGSPEDNEQKQLFVEQHKHYLDEIIEQISEFSKRVILADANLDKVLSAYNKHRDKPIREQAENIIHLFTLTNLGAPAAFKYFDTTIDRKRYTSTKEVLDATLIHQSITGLYETRIDLSQLGGDGGGSSPAPEAAAKGGVQEISDSRPMLHIYLNGRRFLGLLDTGADKTCIAGRDWPANWPIHQTESSLQGLGMACGVARSSQPLRWQHEDKSGIIHPFVIPTLPFTLWGRDIMKDIKVRLMTDSPDDSQDLMIGAIESNLFADQISWKSDQPVWLNQWPLKQEKLQALQQLVTEQLQLGHLEESNSPWNTPVFVIKKKSGKWRLLQDLRAVNATMHDMGALQPGLPSPVAVPKGWEIIIIDLQDCFFNIKLHPEDCKRFAFSVPSPNFKRPYQRFQWKVLPQGMKNSPTLCQKFVDKAILTVRDKYQDSYIVHYMDDILLAHPSRSIVDEILTSMIQALNKHGLVVSTEKIQKYDNLKYLGTHIQGDSVSYQKLQIRTDKLRTLNDFQKLLGNINWIRPFLKLTTGELKPLFEILNGDSNPISTRKLTPEACKALQLMNERLSTARVKRLDLSQPWSLCILKTEYTPTACLWQDGVVEWIHLPHISPKVITPYDIFCTQLIIKGRHRSKELFSKDPDYIVVPYTKVQFDLLLQEKEDWPISLLGFLGEVHFHLPKDPLLTFTLQTAIIFPHMTSTTPLEKGIVIFTDGSANGRSVTYIQGREPIIKENTQNTAQQAEIVAVITAFEEVSQPFNLYTDSKYVTGLFPEIETATLSPRTKIYTELKHLQRLIHKRQEKFYIGHIRGHTGLPGPLAQGNAYADSLTRILTAAGKRTADGSEFEKRTADGSEFESPKKKAKVE

SEQ ID NO: 3150 - protein, 2114 aa, synthetic construct
MPAAKRVKLDGGDKKYSIGLDIGTNSVGWAVITDEYKVPSKKFKVLGNTDRHSIKKNLIGALLFDSGETAEATRLKRTARRRYTRRKNRICYLQEIFSNEMAKVDDSFFHRLEESFLVEEDKKHERHPIFGNIVDEVAYHEKYPTIYHLRKKLVDSTDKADLRLIYLALAHMIKFRGHFLIEGDLNPDNSDVDKLFIQLVQTYNQLFEENPINASGVDAKAILSARLSKSRRLENLIAQLPGEKKNGLFGNLIALSLGLTPNFKSNFDLAEDAKLQLSKDTYDDDLDNLLAQIGDQYADLFLAAKNLSDAILLSDILRVNTEITKAPLSASMIKRYDEHHQDLTLLKALVRQQLPEKYKEIFFDQSKNGYAGYIDGGASQEEFYKFIKPILEKMDGTEELLVKLNREDLLRKQRTFDNGSIPHQIHLGELHAILRRQEDFYPFLKDNREKIEKILTFRIPYYVGPLARGNSRFAWMTRKSEETITPWNFEEVVDKGASAQSFIERMTNFDKNLPNEKVLPKHSLLYEYFTVYNELTKVKYVTEGMRKPAFLSGEQKKAIVDLLFKTNRKVTVKQLKEDYFKKIECFDSVEISGVEDRFNASLGTYHDLLKIIKDKDFLDNEENEDILEDIVLTLTLFEDREMIEERLKTYAHLFDDKVMKQLKRRRYTGWGRLSRKLINGIRDKQSGKTILDFLKSDGFANRNFMQLIHDDSLTFKEDIQKAQVSGQGDSLHEHIANLAGSPAIKKGILQTVKVVDELVKVMGRHKPENIVIEMARENQTTQKGQKNSRERMKRIEEGIKELGSQILKEHPVENTQLQNEKLYLYYLQNGRDMYVDQELDINRLSDYDVDHIVPQSFLKDDSIDNKVLTRSDKARGKSDNVPSEEVVKKMKNYWRQLLNAKLITQRKFDNLTKAERGGLSELDKAGFIKRQLVETRQITKHVAQILDSRMNTKYDENDKLIREVKVITLKSKLVSDFRKDFQFYKVREINNYHHAHDAYLNAVVGTALIKKYPKLESEFVYGDYKVYDVRKMIAKSEQEIGKATAKYFFYSNIMNFFKTEITLANGEIRKRPLIETNGETGEIVWDKGRDFATVRKVLSMPQVNIVKKTEVQTGGFSKESILPKRNSDKLIARKKDWDPKKYGGFDSPTVAYSVLVVAKVEKGKSKKLKSVKELLGITIMERSSFEKNPIDFLEAKGYKEVKKDLIIKLPKYSLFELENGRKRMLASAGELQKGNELALPSKYVNFLYLASHYEKLKGSPEDNEQKQLFVEQHKHYLDEIIEQISEFSKRVILADANLDKVLSAYNKHRDKPIREQAENIIHLFTLTNLGAPAAFKYFDTTIDRKRYTSTKEVLDATLIHQSITGLYETRIDLSQLGGDGGGGSGSSPAPGGVQEISDSRPMLHIYLNGRRFLGLLDTGADKTCIAGRDWPANWPIHQTESSLQGLGMACGVARSSQPLRWQHEDKSGIIHPFVIPTLPFTLWGRDIMKDIKVRLMTDSPDDSQDLMIGAIESNLFADQISWKSDQPVWLNQWPLKQEKLQALQQLVTEQLQLGHLEESNSPWNTPVFVIKKKSGKWRLLQDLRAVNATMHDMGALQPGLPSPVAVPKGWEIIIIDLQDCFFNIKLHPEDCKRFAFSVPSPNFKRPYQRFQWKVLPQGMKNSPTLCQKFVDKAILTVRDKYQDSYIVHYMDDILLAHPSRSIVDEILTSMIQALNKHGLVVSTEKIQKYDNLKYLGTHIQGDSVSYQKLQIRTDKLRTLNDFQKLLGNINWIRPFLKLTTGELKPLFEILNGDSNPISTRKLTPEACKALQLMNERLSTARVKRLDLSQPWSLCILKTEYTPTACLWQDGVVEWIHLPHISPKVITPYDIFCTQLIIKGRHRSKELFSKDPDYIVVPYTKVQFDLLLQEKEDWPISLLGFLGEVHFHLPKDPLLTFTLQTAIIFPHMTSTTPLEKGIVIFTDGSANGRSVTYIQGREPIIKENTQNTAQQAEIVAVITAFEEVSQPFNLYTDSKYVTGLFPEIETATLSPRTKIYTELKHLQRLIHKRQEKFYIGHIRGHTGLPGPLAQGNAYADSLTRILTAAGKRTADGSEFEKRTADGSEFESPKKKAKVE

SEQ ID NO: 3151 - protein, 2120 aa, synthetic construct
MPAAKRVKLDGGDKKYSIGLDIGTNSVGWAVITDEYKVPSKKFKVLGNTDRHSIKKNLIGALLFDSGETAEATRLKRTARRRYTRRKNRICYLQEIFSNEMAKVDDSFFHRLEESFLVEEDKKHERHPIFGNIVDEVAYHEKYPTIYHLRKKLVDSTDKADLRLIYLALAHMIKFRGHFLIEGDLNPDNSDVDKLFIQLVQTYNQLFEENPINASGVDAKAILSARLSKSRRLENLIAQLPGEKKNGLFGNLIALSLGLTPNFKSNFDLAEDAKLQLSKDTYDDDLDNLLAQIGDQYADLFLAAKNLSDAILLSDILRVNTEITKAPLSASMIKRYDEHHQDLTLLKALVRQQLPEKYKEIFFDQSKNGYAGYIDGGASQEEFYKFIKPILEKMDGTEELLVKLNREDLLRKQRTFDNGSIPHQIHLGELHAILRRQEDFYPFLKDNREKIEKILTFRIPYYVGPLARGNSRFAWMTRKSEETITPWNFEEVVDKGASAQSFIERMTNFDKNLPNEKVLPKHSLLYEYFTVYNELTKVKYVTEGMRKPAFLSGEQKKAIVDLLFKTNRKVTVKQLKEDYFKKIECFDSVEISGVEDRFNASLGTYHDLLKIIKDKDFLDNEENEDILEDIVLTLTLFEDREMIEERLKTYAHLFDDKVMKQLKRRRYTGWGRLSRKLINGIRDKQSGKTILDFLKSDGFANRNFMQLIHDDSLTFKEDIQKAQVSGQGDSLHEHIANLAGSPAIKKGILQTVKVVDELVKVMGRHKPENIVIEMARENQTTQKGQKNSRERMKRIEEGIKELGSQILKEHPVENTQLQNEKLYLYYLQNGRDMYVDQELDINRLSDYDVDHIVPQSFLKDDSIDNKVLTRSDKARGKSDNVPSEEVVKKMKNYWRQLLNAKLITQRKFDNLTKAERGGLSELDKAGFIKRQLVETRQITKHVAQILDSRMNTKYDENDKLIREVKVITLKSKLVSDFRKDFQFYKVREINNYHHAHDAYLNAVVGTALIKKYPKLESEFVYGDYKVYDVRKMIAKSEQEIGKATAKYFFYSNIMNFFKTEITLANGEIRKRPLIETNGETGEIVWDKGRDFATVRKVLSMPQVNIVKKTEVQTGGFSKESILPKRNSDKLIARKKDWDPKKYGGFDSPTVAYSVLVVAKVEKGKSKKLKSVKELLGITIMERSSFEKNPIDFLEAKGYKEVKKDLIIKLPKYSLFELENGRKRMLASAGELQKGNELALPSKYVNFLYLASHYEKLKGSPEDNEQKQLFVEQHKHYLDEIIEQISEFSKRVILADANLDKVLSAYNKHRDKPIREQAENIIHLFTLTNLGAPAAFKYFDTTIDRKRYTSTKEVLDATLIHQSITGLYETRIDLSQLGGDGGEAAAKGGGGSEAAAKGGVQEISDSRPMLHIYLNGRRFLGLLDTGADKTCIAGRDWPANWPIHQTESSLQGLGMACGVARSSQPLRWQHEDKSGIIHPFVIPTLPFTLWGRDIMKDIKVRLMTDSPDDSQDLMIGAIESNLFADQISWKSDQPVWLNQWPLKQEKLQALQQLVTEQLQLGHLEESNSPWNTPVFVIKKKSGKWRLLQDLRAVNATMHDMGALQPGLPSPVAVPKGWEIIIIDLQDCFFNIKLHPEDCKRFAFSVPSPNFKRPYQRFQWKVLPQGMKNSPTLCQKFVDKAILTVRDKYQDSYIVHYMDDILLAHPSRSIVDEILTSMIQALNKHGLVVSTEKIQKYDNLKYLGTHIQGDSVSYQKLQIRTDKLRTLNDFQKLLGNINWIRPFLKLTTGELKPLFEILNGDSNPISTRKLTPEACKALQLMNERLSTARVKRLDLSQPWSLCILKTEYTPTACLWQDGVVEWIHLPHISPKVITPYDIFCTQLIIKGRHRSKELFSKDPDYIVVPYTKVQFDLLLQEKEDWPISLLGFLGEVHFHLPKDPLLTFTLQTAIIFPHMTSTTPLEKGIVIFTDGSANGRSVTYIQGREPIIKENTQNTAQQAEIVAVITAFEEVSQPFNLYTDSKYVTGLFPEIETATLSPRTKIYTELKHLQRLIHKRQEKFYIGHIRGHTGLPGPLAQGNAYADSLTRILTAAGKRTADGSEFEKRTADGSEFESPKKKAKVE

SEQ ID NO: 3152 - protein, 2116 aa, synthetic construct
MPAAKRVKLDGGDKKYSIGLDIGTNSVGWAVITDEYKVPSKKFKVLGNTDRHSIKKNLIGALLFDSGETAEATRLKRTARRRYTRRKNRICYLQEIFSNEMAKVDDSFFHRLEESFLVEEDKKHERHPIFGNIVDEVAYHEKYPTIYHLRKKLVDSTDKADLRLIYLALAHMIKFRGHFLIEGDLNPDNSDVDKLFIQLVQTYNQLFEENPINASGVDAKAILSARLSKSRRLENLIAQLPGEKKNGLFGNLIALSLGLTPNFKSNFDLAEDAKLQLSKDTYDDDLDNLLAQIGDQYADLFLAAKNLSDAILLSDILRVNTEITKAPLSASMIKRYDEHHQDLTLLKALVRQQLPEKYKEIFFDQSKNGYAGYIDGGASQEEFYKFIKPILEKMDGTEELLVKLNREDLLRKQRTFDNGSIPHQIHLGELHAILRRQEDFYPFLKDNREKIEKILTFRIPYYVGPLARGNSRFAWMTRKSEETITPWNFEEVVDKGASAQSFIERMTNFDKNLPNEKVLPKHSLLYEYFTVYNELTKVKYVTEGMRKPAFLSGEQKKAIVDLLFKTNRKVTVKQLKEDYFKKIECFDSVEISGVEDRFNASLGTYHDLLKIIKDKDFLDNEENEDILEDIVLTLTLFEDREMIEERLKTYAHLFDDKVMKQLKRRRYTGWGRLSRKLINGIRDKQSGKTILDFLKSDGFANRNFMQLIHDDSLTFKEDIQKAQVSGQGDSLHEHIANLAGSPAIKKGILQTVKVVDELVKVMGRHKPENIVIEMARENQTTQKGQKNSRERMKRIEEGIKELGSQILKEHPVENTQLQNEKLYLYYLQNGRDMYVDQELDINRLSDYDVDHIVPQSFLKDDSIDNKVLTRSDKARGKSDNVPSEEVVKKMKNYWRQLLNAKLITQRKFDNLTKAERGGLSELDKAGFIKRQLVETRQITKHVAQILDSRMNTKYDENDKLIREVKVITLKSKLVSDFRKDFQFYKVREINNYHHAHDAYLNAVVGTALIKKYPKLESEFVYGDYKVYDVRKMIAKSEQEIGKATAKYFFYSNIMNFFKTEITLANGEIRKRPLIETNGETGEIVWDKGRDFATVRKVLSMPQVNIVKKTEVQTGGFSKESILPKRNSDKLIARKKDWDPKKYGGFDSPTVAYSVLVVAKVEKGKSKKLKSVKELLGITIMERSSFEKNPIDFLEAKGYKEVKKDLIIKLPKYSLFELENGRKRMLASAGELQKGNELALPSKYVNFLYLASHYEKLKGSPEDNEQKQLFVEQHKHYLDEIIEQISEFSKRVILADANLDKVLSAYNKHRDKPIREQAENIIHLFTLTNLGAPAAFKYFDTTIDRKRYTSTKEVLDATLIHQSITGLYETRIDLSQLGGDGGPAPEAAAKGSSGGVQEISDSRPMLHIYLNGRRFLGLLDTGADKTCIAGRDWPANWPIHQTESSLQGLGMACGVARSSQPLRWQHEDKSGIIHPFVIPTLPFTLWGRDIMKDIKVRLMTDSPDDSQDLMIGAIESNLFADQISWKSDQPVWLNQWPLKQEKLQALQQLVTEQLQLGHLEESNSPWNTPVFVIKKKSGKWRLLQDLRAVNATMHDMGALQPGLPSPVAVPKGWEIIIIDLQDCFFNIKLHPEDCKRFAFSVPSPNFKRPYQRFQWKVLPQGMKNSPTLCQKFVDKAILTVRDKYQDSYIVHYMDDILLAHPSRSIVDEILTSMIQALNKHGLVVSTEKIQKYDNLKYLGTHIQGDSVSYQKLQIRTDKLRTLNDFQKLLGNINWIRPFLKLTTGELKPLFEILNGDSNPISTRKLTPEACKALQLMNERLSTARVKRLDLSQPWSLCILKTEYTPTACLWQDGVVEWIHLPHISPKVITPYDIFCTQLIIKGRHRSKELFSKDPDYIVVPYTKVQFDLLLQEKEDWPISLLGFLGEVHFHLPKDPLLTFTLQTAIIFPHMTSTTPLEKGIVIFTDGSANGRSVTYIQGREPIIKENTQNTAQQAEIVAVITAFEEVSQPFNLYTDSKYVTGLFPEIETATLSPRTKIYTELKHLQRLIHKRQEKFYIGHIRGHTGLPGPLAQGNAYADSLTRILTAAGKRTADGSEFEKRTADGSEFESPKKKAKVE

SEQ ID NO: 3153 - protein, 2121 aa, synthetic construct
MPAAKRVKLDGGDKKYSIGLDIGTNSVGWAVITDEYKVPSKKFKVLGNTDRHSIKKNLIGALLFDSGETAEATRLKRTARRRYTRRKNRICYLQEIFSNEMAKVDDSFFHRLEESFLVEEDKKHERHPIFGNIVDEVAYHEKYPTIYHLRKKLVDSTDKADLRLIYLALAHMIKFRGHFLIEGDLNPDNSDVDKLFIQLVQTYNQLFEENPINASGVDAKAILSARLSKSRRLENLIAQLPGEKKNGLFGNLIALSLGLTPNFKSNFDLAEDAKLQLSKDTYDDDLDNLLAQIGDQYADLFLAAKNLSDAILLSDILRVNTEITKAPLSASMIKRYDEHHQDLTLLKALVRQQLPEKYKEIFFDQSKNGYAGYIDGGASQEEFYKFIKPILEKMDGTEELLVKLNREDLLRKQRTFDNGSIPHQIHLGELHAILRRQEDFYPFLKDNREKIEKILTFRIPYYVGPLARGNSRFAWMTRKSEETITPWNFEEVVDKGASAQSFIERMTNFDKNLPNEKVLPKHSLLYEYFTVYNELTKVKYVTEGMRKPAFLSGEQKKAIVDLLFKTNRKVTVKQLKEDYFKKIECFDSVEISGVEDRFNASLGTYHDLLKIIKDKDFLDNEENEDILEDIVLTLTLFEDREMIEERLKTYAHLFDDKVMKQLKRRRYTGWGRLSRKLINGIRDKQSGKTILDFLKSDGFANRNFMQLIHDDSLTFKEDIQKAQVSGQGDSLHEHIANLAGSPAIKKGILQTVKVVDELVKVMGRHKPENIVIEMARENQTTQKGQKNSRERMKRIEEGIKELGSQILKEHPVENTQLQNEKLYLYYLQNGRDMYVDQELDINRLSDYDVDHIVPQSFLKDDSIDNKVLTRSDKARGKSDNVPSEEVVKKMKNYWRQLLNAKLITQRKFDNLTKAERGGLSELDKAGFIKRQLVETRQITKHVAQILDSRMNTKYDENDKLIREVKVITLKSKLVSDFRKDFQFYKVREINNYHHAHDAYLNAVVGTALIKKYPKLESEFVYGDYKVYDVRKMIAKSEQEIGKATAKYFFYSNIMNFFKTEITLANGEIRKRPLIETNGETGEIVWDKGRDFATVRKVLSMPQVNIVKKTEVQTGGFSKESILPKRNSDKLIARKKDWDPKKYGGFDSPTVAYSVLVVAKVEKGKSKKLKSVKELLGITIMERSSFEKNPIDFLEAKGYKEVKKDLIIKLPKYSLFELENGRKRMLASAGELQKGNELALPSKYVNFLYLASHYEKLKGSPEDNEQKQLFVEQHKHYLDEIIEQISEFSKRVILADANLDKVLSAYNKHRDKPIREQAENIIHLFTLTNLGAPAAFKYFDTTIDRKRYTSTKEVLDATLIHQSITGLYETRIDLSQLGGDGGSGSETPGTSESATPESGGVQEISDSRPMLHIYLNGRRFLGLLDTGADKTCIAGRDWPANWPIHQTESSLQGLGMACGVARSSQPLRWQHEDKSGIIHPFVIPTLPFTLWGRDIMKDIKVRLMTDSPDDSQDLMIGAIESNLFADQISWKSDQPVWLNQWPLKQEKLQALQQLVTEQLQLGHLEESNSPWNTPVFVIKKKSGKWRLLQDLRAVNATMHDMGALQPGLPSPVAVPKGWEIIIIDLQDCFFNIKLHPEDCKRFAFSVPSPNFKRPYQRFQWKVLPQGMKNSPTLCQKFVDKAILTVRDKYQDSYIVHYMDDILLAHPSRSIVDEILTSMIQALNKHGLVVSTEKIQKYDNLKYLGTHIQGDSVSYQKLQIRTDKLRTLNDFQKLLGNINWIRPFLKLTTGELKPLFEILNGDSNPISTRKLTPEACKALQLMNERLSTARVKRLDLSQPWSLCILKTEYTPTACLWQDGVVEWIHLPHISPKVITPYDIFCTQLIIKGRHRSKELFSKDPDYIVVPYTKVQFDLLLQEKEDWPISLLGFLGEVHFHLPKDPLLTFTLQTAIIFPHMTSTTPLEKGIVIFTDGSANGRSVTYIQGREPIIKENTQNTAQQAEIVAVITAFEEVSQPFNLYTDSKYVTGLFPEIETATLSPRTKIYTELKHLQRLIHKRQEKFYIGHIRGHTGLPGPLAQGNAYADSLTRILTAAGKRTADGSEFEKRTADGSEFESPKKKAKVE

SEQ ID NO: 3154 - protein, 2116 aa, synthetic construct
MPAAKRVKLDGGDKKYSIGLDIGTNSVGWAVITDEYKVPSKKFKVLGNTDRHSIKKNLIGALLFDSGETAEATRLKRTARRRYTRRKNRICYLQEIFSNEMAKVDDSFFHRLEESFLVEEDKKHERHPIFGNIVDEVAYHEKYPTIYHLRKKLVDSTDKADLRLIYLALAHMIKFRGHFLIEGDLNPDNSDVDKLFIQLVQTYNQLFEENPINASGVDAKAILSARLSKSRRLENLIAQLPGEKKNGLFGNLIALSLGLTPNFKSNFDLAEDAKLQLSKDTYDDDLDNLLAQIGDQYADLFLAAKNLSDAILLSDILRVNTEITKAPLSASMIKRYDEHHQDLTLLKALVRQQLPEKYKEIFFDQSKNGYAGYIDGGASQEEFYKFIKPILEKMDGTEELLVKLNREDLLRKQRTFDNGSIPHQIHLGELHAILRRQEDFYPFLKDNREKIEKILTFRIPYYVGPLARGNSRFAWMTRKSEETITPWNFEEVVDKGASAQSFIERMTNFDKNLPNEKVLPKHSLLYEYFTVYNELTKVKYVTEGMRKPAFLSGEQKKAIVDLLFKTNRKVTVKQLKEDYFKKIECFDSVEISGVEDRFNASLGTYHDLLKIIKDKDFLDNEENEDILEDIVLTLTLFEDREMIEERLKTYAHLFDDKVMKQLKRRRYTGWGRLSRKLINGIRDKQSGKTILDFLKSDGFANRNFMQLIHDDSLTFKEDIQKAQVSGQGDSLHEHIANLAGSPAIKKGILQTVKVVDELVKVMGRHKPENIVIEMARENQTTQKGQKNSRERMKRIEEGIKELGSQILKEHPVENTQLQNEKLYLYYLQNGRDMYVDQELDINRLSDYDVDHIVPQSFLKDDSIDNKVLTRSDKARGKSDNVPSEEVVKKMKNYWRQLLNAKLITQRKFDNLTKAERGGLSELDKAGFIKRQLVETRQITKHVAQILDSRMNTKYDENDKLIREVKVITLKSKLVSDFRKDFQFYKVREINNYHHAHDAYLNAVVGTALIKKYPKLESEFVYGDYKVYDVRKMIAKSEQEIGKATAKYFFYSNIMNFFKTEITLANGEIRKRPLIETNGETGEIVWDKGRDFATVRKVLSMPQVNIVKKTEVQTGGFSKESILPKRNSDKLIARKKDWDPKKYGGFDSPTVAYSVLVVAKVEKGKSKKLKSVKELLGITIMERSSFEKNPIDFLEAKGYKEVKKDLIIKLPKYSLFELENGRKRMLASAGELQKGNELALPSKYVNFLYLASHYEKLKGSPEDNEQKQLFVEQHKHYLDEIIEQISEFSKRVILADANLDKVLSAYNKHRDKPIREQAENIIHLFTLTNLGAPAAFKYFDTTIDRKRYTSTKEVLDATLIHQSITGLYETRIDLSQLGGDGGGGSEAAAKGGGGGVQEISDSRPMLHIYLNGRRFLGLLDTGADKTCIAGRDWPANWPIHQTESSLQGLGMACGVARSSQPLRWQHEDKSGIIHPFVIPTLPFTLWGRDIMKDIKVRLMTDSPDDSQDLMIGAIESNLFADQISWKSDQPVWLNQWPLKQEKLQALQQLVTEQLQLGHLEESNSPWNTPVFVIKKKSGKWRLLQDLRAVNATMHDMGALQPGLPSPVAVPKGWEIIIIDLQDCFFNIKLHPEDCKRFAFSVPSPNFKRPYQRFQWKVLPQGMKNSPTLCQKFVDKAILTVRDKYQDSYIVHYMDDILLAHPSRSIVDEILTSMIQALNKHGLVVSTEKIQKYDNLKYLGTHIQGDSVSYQKLQIRTDKLRTLNDFQKLLGNINWIRPFLKLTTGELKPLFEILNGDSNPISTRKLTPEACKALQLMNERLSTARVKRLDLSQPWSLCILKTEYTPTACLWQDGVVEWIHLPHISPKVITPYDIFCTQLIIKGRHRSKELFSKDPDYIVVPYTKVQFDLLLQEKEDWPISLLGFLGEVHFHLPKDPLLTFTLQTAIIFPHMTSTTPLEKGIVIFTDGSANGRSVTYIQGREPIIKENTQNTAQQAEIVAVITAFEEVSQPFNLYTDSKYVTGLFPEIETATLSPRTKIYTELKHLQRLIHKRQEKFYIGHIRGHTGLPGPLAQGNAYADSLTRILTAAGKRTADGSEFEKRTADGSEFESPKKKAKVE

SEQ ID NO: 3155 - protein, 2114 aa, synthetic construct
MPAAKRVKLDGGDKKYSIGLDIGTNSVGWAVITDEYKVPSKKFKVLGNTDRHSIKKNLIGALLFDSGETAEATRLKRTARRRYTRRKNRICYLQEIFSNEMAKVDDSFFHRLEESFLVEEDKKHERHPIFGNIVDEVAYHEKYPTIYHLRKKLVDSTDKADLRLIYLALAHMIKFRGHFLIEGDLNPDNSDVDKLFIQLVQTYNQLFEENPINASGVDAKAILSARLSKSRRLENLIAQLPGEKKNGLFGNLIALSLGLTPNFKSNFDLAEDAKLQLSKDTYDDDLDNLLAQIGDQYADLFLAAKNLSDAILLSDILRVNTEITKAPLSASMIKRYDEHHQDLTLLKALVRQQLPEKYKEIFFDQSKNGYAGYIDGGASQEEFYKFIKPILEKMDGTEELLVKLNREDLLRKQRTFDNGSIPHQIHLGELHAILRRQEDFYPFLKDNREKIEKILTFRIPYYVGPLARGNSRFAWMTRKSEETITPWNFEEVVDKGASAQSFIERMTNFDKNLPNEKVLPKHSLLYEYFTVYNELTKVKYVTEGMRKPAFLSGEQKKAIVDLLFKTNRKVTVKQLKEDYFKKIECFDSVEISGVEDRFNASLGTYHDLLKIIKDKDFLDNEENEDILEDIVLTLTLFEDREMIEERLKTYAHLFDDKVMKQLKRRRYTGWGRLSRKLINGIRDKQSGKTILDFLKSDGFANRNFMQLIHDDSLTFKEDIQKAQVSGQGDSLHEHIANLAGSPAIKKGILQTVKVVDELVKVMGRHKPENIVIEMARENQTTQKGQKNSRERMKRIEEGIKELGSQILKEHPVENTQLQNEKLYLYYLQNGRDMYVDQELDINRLSDYDVDHIVPQSFLKDDSIDNKVLTRSDKARGKSDNVPSEEVVKKMKNYWRQLLNAKLITQRKFDNLTKAERGGLSELDKAGFIKRQLVETRQITKHVAQILDSRMNTKYDENDKLIREVKVITLKSKLVSDFRKDFQFYKVREINNYHHAHDAYLNAVVGTALIKKYPKLESEFVYGDYKVYDVRKMIAKSEQEIGKATAKYFFYSNIMNFFKTEITLANGEIRKRPLIETNGETGEIVWDKGRDFATVRKVLSMPQVNIVKKTEVQTGGFSKESILPKRNSDKLIARKKDWDPKKYGGFDSPTVAYSVLVVAKVEKGKSKKLKSVKELLGITIMERSSFEKNPIDFLEAKGYKEVKKDLIIKLPKYSLFELENGRKRMLASAGELQKGNELALPSKYVNFLYLASHYEKLKGSPEDNEQKQLFVEQHKHYLDEIIEQISEFSKRVILADANLDKVLSAYNKHRDKPIREQAENIIHLFTLTNLGAPAAFKYFDTTIDRKRYTSTKEVLDATLIHQSITGLYETRIDLSQLGGDGGPAPGGSGSSGGVQEISDSRPMLHIYLNGRRFLGLLDTGADKTCIAGRDWPANWPIHQTESSLQGLGMACGVARSSQPLRWQHEDKSGIIHPFVIPTLPFTLWGRDIMKDIKVRLMTDSPDDSQDLMIGAIESNLFADQISWKSDQPVWLNQWPLKQEKLQALQQLVTEQLQLGHLEESNSPWNTPVFVIKKKSGKWRLLQDLRAVNATMHDMGALQPGLPSPVAVPKGWEIIIIDLQDCFFNIKLHPEDCKRFAFSVPSPNFKRPYQRFQWKVLPQGMKNSPTLCQKFVDKAILTVRDKYQDSYIVHYMDDILLAHPSRSIVDEILTSMIQALNKHGLVVSTEKIQKYDNLKYLGTHIQGDSVSYQKLQIRTDKLRTLNDFQKLLGNINWIRPFLKLTTGELKPLFEILNGDSNPISTRKLTPEACKALQLMNERLSTARVKRLDLSQPWSLCILKTEYTPTACLWQDGVVEWIHLPHISPKVITPYDIFCTQLIIKGRHRSKELFSKDPDYIVVPYTKVQFDLLLQEKEDWPISLLGFLGEVHFHLPKDPLLTFTLQTAIIFPHMTSTTPLEKGIVIFTDGSANGRSVTYIQGREPIIKENTQNTAQQAEIVAVITAFEEVSQPFNLYTDSKYVTGLFPEIETATLSPRTKIYTELKHLQRLIHKRQEKFYIGHIRGHTGLPGPLAQGNAYADSLTRILTAAGKRTADGSEFEKRTADGSEFESPKKKAKVE

SEQ ID NO: 3156 - protein, 2116 aa, synthetic construct
MPAAKRVKLDGGDKKYSIGLDIGTNSVGWAVITDEYKVPSKKFKVLGNTDRHSIKKNLIGALLFDSGETAEATRLKRTARRRYTRRKNRICYLQEIFSNEMAKVDDSFFHRLEESFLVEEDKKHERHPIFGNIVDEVAYHEKYPTIYHLRKKLVDSTDKADLRLIYLALAHMIKFRGHFLIEGDLNPDNSDVDKLFIQLVQTYNQLFEENPINASGVDAKAILSARLSKSRRLENLIAQLPGEKKNGLFGNLIALSLGLTPNFKSNFDLAEDAKLQLSKDTYDDDLDNLLAQIGDQYADLFLAAKNLSDAILLSDILRVNTEITKAPLSASMIKRYDEHHQDLTLLKALVRQQLPEKYKEIFFDQSKNGYAGYIDGGASQEEFYKFIKPILEKMDGTEELLVKLNREDLLRKQRTFDNGSIPHQIHLGELHAILRRQEDFYPFLKDNREKIEKILTFRIPYYVGPLARGNSRFAWMTRKSEETITPWNFEEVVDKGASAQSFIERMTNFDKNLPNEKVLPKHSLLYEYFTVYNELTKVKYVTEGMRKPAFLSGEQKKAIVDLLFKTNRKVTVKQLKEDYFKKIECFDSVEISGVEDRFNASLGTYHDLLKIIKDKDFLDNEENEDILEDIVLTLTLFEDREMIEERLKTYAHLFDDKVMKQLKRRRYTGWGRLSRKLINGIRDKQSGKTILDFLKSDGFANRNFMQLIHDDSLTFKEDIQKAQVSGQGDSLHEHIANLAGSPAIKKGILQTVKVVDELVKVMGRHKPENIVIEMARENQTTQKGQKNSRERMKRIEEGIKELGSQILKEHPVENTQLQNEKLYLYYLQNGRDMYVDQELDINRLSDYDVDHIVPQSFLKDDSIDNKVLTRSDKARGKSDNVPSEEVVKKMKNYWRQLLNAKLITQRKFDNLTKAERGGLSELDKAGFIKRQLVETRQITKHVAQILDSRMNTKYDENDKLIREVKVITLKSKLVSDFRKDFQFYKVREINNYHHAHDAYLNAVVGTALIKKYPKLESEFVYGDYKVYDVRKMIAKSEQEIGKATAKYFFYSNIMNFFKTEITLANGEIRKRPLIETNGETGEIVWDKGRDFATVRKVLSMPQVNIVKKTEVQTGGFSKESILPKRNSDKLIARKKDWDPKKYGGFDSPTVAYSVLVVAKVEKGKSKKLKSVKELLGITIMERSSFEKNPIDFLEAKGYKEVKKDLIIKLPKYSLFELENGRKRMLASAGELQKGNELALPSKYVNFLYLASHYEKLKGSPEDNEQKQLFVEQHKHYLDEIIEQISEFSKRVILADANLDKVLSAYNKHRDKPIREQAENIIHLFTLTNLGAPAAFKYFDTTIDRKRYTSTKEVLDATLIHQSITGLYETRIDLSQLGGDGGEAAAKGGGGGSGGVQEISDSRPMLHIYLNGRRFLGLLDTGADKTCIAGRDWPANWPIHQTESSLQGLGMACGVARSSQPLRWQHEDKSGIIHPFVIPTLPFTLWGRDIMKDIKVRLMTDSPDDSQDLMIGAIESNLFADQISWKSDQPVWLNQWPLKQEKLQALQQLVTEQLQLGHLEESNSPWNTPVFVIKKKSGKWRLLQDLRAVNATMHDMGALQPGLPSPVAVPKGWEIIIIDLQDCFFNIKLHPEDCKRFAFSVPSPNFKRPYQRFQWKVLPQGMKNSPTLCQKFVDKAILTVRDKYQDSYIVHYMDDILLAHPSRSIVDEILTSMIQALNKHGLVVSTEKIQKYDNLKYLGTHIQGDSVSYQKLQIRTDKLRTLNDFQKLLGNINWIRPFLKLTTGELKPLFEILNGDSNPISTRKLTPEACKALQLMNERLSTARVKRLDLSQPWSLCILKTEYTPTACLWQDGVVEWIHLPHISPKVITPYDIFCTQLIIKGRHRSKELFSKDPDYIVVPYTKVQFDLLLQEKEDWPISLLGFLGEVHFHLPKDPLLTFTLQTAIIFPHMTSTTPLEKGIVIFTDGSANGRSVTYIQGREPIIKENTQNTAQQAEIVAVITAFEEVSQPFNLYTDSKYVTGLFPEIETATLSPRTKIYTELKHLQRLIHKRQEKFYIGHIRGHTGLPGPLAQGNAYADSLTRILTAAGKRTADGSEFEKRTADGSEFESPKKKAKVE

SEQ ID NO: 3157 - protein, 2125 aa, synthetic construct
MPAAKRVKLDGGDKKYSIGLDIGTNSVGWAVITDEYKVPSKKFKVLGNTDRHSIKKNLIGALLFDSGETAEATRLKRTARRRYTRRKNRICYLQEIFSNEMAKVDDSFFHRLEESFLVEEDKKHERHPIFGNIVDEVAYHEKYPTIYHLRKKLVDSTDKADLRLIYLALAHMIKFRGHFLIEGDLNPDNSDVDKLFIQLVQTYNQLFEENPINASGVDAKAILSARLSKSRRLENLIAQLPGEKKNGLFGNLIALSLGLTPNFKSNFDLAEDAKLQLSKDTYDDDLDNLLAQIGDQYADLFLAAKNLSDAILLSDILRVNTEITKAPLSASMIKRYDEHHQDLTLLKALVRQQLPEKYKEIFFDQSKNGYAGYIDGGASQEEFYKFIKPILEKMDGTEELLVKLNREDLLRKQRTFDNGSIPHQIHLGELHAILRRQEDFYPFLKDNREKIEKILTFRIPYYVGPLARGNSRFAWMTRKSEETITPWNFEEVVDKGASAQSFIERMTNFDKNLPNEKVLPKHSLLYEYFTVYNELTKVKYVTEGMRKPAFLSGEQKKAIVDLLFKTNRKVTVKQLKEDYFKKIECFDSVEISGVEDRFNASLGTYHDLLKIIKDKDFLDNEENEDILEDIVLTLTLFEDREMIEERLKTYAHLFDDKVMKQLKRRRYTGWGRLSRKLINGIRDKQSGKTILDFLKSDGFANRNFMQLIHDDSLTFKEDIQKAQVSGQGDSLHEHIANLAGSPAIKKGILQTVKVVDELVKVMGRHKPENIVIEMARENQTTQKGQKNSRERMKRIEEGIKELGSQILKEHPVENTQLQNEKLYLYYLQNGRDMYVDQELDINRLSDYDVDHIVPQSFLKDDSIDNKVLTRSDKARGKSDNVPSEEVVKKMKNYWRQLLNAKLITQRKFDNLTKAERGGLSELDKAGFIKRQLVETRQITKHVAQILDSRMNTKYDENDKLIREVKVITLKSKLVSDFRKDFQFYKVREINNYHHAHDAYLNAVVGTALIKKYPKLESEFVYGDYKVYDVRKMIAKSEQEIGKATAKYFFYSNIMNFFKTEITLANGEIRKRPLIETNGETGEIVWDKGRDFATVRKVLSMPQVNIVKKTEVQTGGFSKESILPKRNSDKLIARKKDWDPKKYGGFDSPTVAYSVLVVAKVEKGKSKKLKSVKELLGITIMERSSFEKNPIDFLEAKGYKEVKKDLIIKLPKYSLFELENGRKRMLASAGELQKGNELALPSKYVNFLYLASHYEKLKGSPEDNEQKQLFVEQHKHYLDEIIEQISEFSKRVILADANLDKVLSAYNKHRDKPIREQAENIIHLFTLTNLGAPAAFKYFDTTIDRKRYTSTKEVLDATLIHQSITGLYETRIDLSQLGGDGGEAAAKEAAAKEAAAKEAAAKGGVQEISDSRPMLHIYLNGRRFLGLLDTGADKTCIAGRDWPANWPIHQTESSLQGLGMACGVARSSQPLRWQHEDKSGIIHPFVIPTLPFTLWGRDIMKDIKVRLMTDSPDDSQDLMIGAIESNLFADQISWKSDQPVWLNQWPLKQEKLQALQQLVTEQLQLGHLEESNSPWNTPVFVIKKKSGKWRLLQDLRAVNATMHDMGALQPGLPSPVAVPKGWEIIIIDLQDCFFNIKLHPEDCKRFAFSVPSPNFKRPYQRFQWKVLPQGMKNSPTLCQKFVDKAILTVRDKYQDSYIVHYMDDILLAHPSRSIVDEILTSMIQALNKHGLVVSTEKIQKYDNLKYLGTHIQGDSVSYQKLQIRTDKLRTLNDFQKLLGNINWIRPFLKLTTGELKPLFEILNGDSNPISTRKLTPEACKALQLMNERLSTARVKRLDLSQPWSLCILKTEYTPTACLWQDGVVEWIHLPHISPKVITPYDIFCTQLIIKGRHRSKELFSKDPDYIVVPYTKVQFDLLLQEKEDWPISLLGFLGEVHFHLPKDPLLTFTLQTAIIFPHMTSTTPLEKGIVIFTDGSANGRSVTYIQGREPIIKENTQNTAQQAEIVAVITAFEEVSQPFNLYTDSKYVTGLFPEIETATLSPRTKIYTELKHLQRLIHKRQEKFYIGHIRGHTGLPGPLAQGNAYADSLTRILTAAGKRTADGSEFEKRTADGSEFESPKKKAKVE

SEQ ID NO: 3158 - protein, 2116 aa, synthetic construct
MPAAKRVKLDGGDKKYSIGLDIGTNSVGWAVITDEYKVPSKKFKVLGNTDRHSIKKNLIGALLFDSGETAEATRLKRTARRRYTRRKNRICYLQEIFSNEMAKVDDSFFHRLEESFLVEEDKKHERHPIFGNIVDEVAYHEKYPTIYHLRKKLVDSTDKADLRLIYLALAHMIKFRGHFLIEGDLNPDNSDVDKLFIQLVQTYNQLFEENPINASGVDAKAILSARLSKSRRLENLIAQLPGEKKNGLFGNLIALSLGLTPNFKSNFDLAEDAKLQLSKDTYDDDLDNLLAQIGDQYADLFLAAKNLSDAILLSDILRVNTEITKAPLSASMIKRYDEHHQDLTLLKALVRQQLPEKYKEIFFDQSKNGYAGYIDGGASQEEFYKFIKPILEKMDGTEELLVKLNREDLLRKQRTFDNGSIPHQIHLGELHAILRRQEDFYPFLKDNREKIEKILTFRIPYYVGPLARGNSRFAWMTRKSEETITPWNFEEVVDKGASAQSFIERMTNFDKNLPNEKVLPKHSLLYEYFTVYNELTKVKYVTEGMRKPAFLSGEQKKAIVDLLFKTNRKVTVKQLKEDYFKKIECFDSVEISGVEDRFNASLGTYHDLLKIIKDKDFLDNEENEDILEDIVLTLTLFEDREMIEERLKTYAHLFDDKVMKQLKRRRYTGWGRLSRKLINGIRDKQSGKTILDFLKSDGFANRNFMQLIHDDSLTFKEDIQKAQVSGQGDSLHEHIANLAGSPAIKKGILQTVKVVDELVKVMGRHKPENIVIEMARENQTTQKGQKNSRERMKRIEEGIKELGSQILKEHPVENTQLQNEKLYLYYLQNGRDMYVDQELDINRLSDYDVDHIVPQSFLKDDSIDNKVLTRSDKARGKSDNVPSEEVVKKMKNYWRQLLNAKLITQRKFDNLTKAERGGLSELDKAGFIKRQLVETRQITKHVAQILDSRMNTKYDENDKLIREVKVITLKSKLVSDFRKDFQFYKVREINNYHHAHDAYLNAVVGTALIKKYPKLESEFVYGDYKVYDVRKMIAKSEQEIGKATAKYFFYSNIMNFFKTEITLANGEIRKRPLIETNGETGEIVWDKGRDFATVRKVLSMPQVNIVKKTEVQTGGFSKESILPKRNSDKLIARKKDWDPKKYGGFDSPTVAYSVLVVAKVEKGKSKKLKSVKELLGITIMERSSFEKNPIDFLEAKGYKEVKKDLIIKLPKYSLFELENGRKRMLASAGELQKGNELALPSKYVNFLYLASHYEKLKGSPEDNEQKQLFVEQHKHYLDEIIEQISEFSKRVILADANLDKVLSAYNKHRDKPIREQAENIIHLFTLTNLGAPAAFKYFDTTIDRKRYTSTKEVLDATLIHQSITGLYETRIDLSQLGGDGGGGSEAAAKGSSGGVQEISDSRPMLHIYLNGRRFLGLLDTGADKTCIAGRDWPANWPIHQTESSLQGLGMACGVARSSQPLRWQHEDKSGIIHPFVIPTLPFTLWGRDIMKDIKVRLMTDSPDDSQDLMIGAIESNLFADQISWKSDQPVWLNQWPLKQEKLQALQQLVTEQLQLGHLEESNSPWNTPVFVIKKKSGKWRLLQDLRAVNATMHDMGALQPGLPSPVAVPKGWEIIIIDLQDCFFNIKLHPEDCKRFAFSVPSPNFKRPYQRFQWKVLPQGMKNSPTLCQKFVDKAILTVRDKYQDSYIVHYMDDILLAHPSRSIVDEILTSMIQALNKHGLVVSTEKIQKYDNLKYLGTHIQGDSVSYQKLQIRTDKLRTLNDFQKLLGNINWIRPFLKLTTGELKPLFEILNGDSNPISTRKLTPEACKALQLMNERLSTARVKRLDLSQPWSLCILKTEYTPTACLWQDGVVEWIHLPHISPKVITPYDIFCTQLIIKGRHRSKELFSKDPDYIVVPYTKVQFDLLLQEKEDWPISLLGFLGEVHFHLPKDPLLTFTLQTAIIFPHMTSTTPLEKGIVIFTDGSANGRSVTYIQGREPIIKENTQNTAQQAEIVAVITAFEEVSQPFNLYTDSKYVTGLFPEIETATLSPRTKIYTELKHLQRLIHKRQEKFYIGHIRGHTGLPGPLAQGNAYADSLTRILTAAGKRTADGSEFEKRTADGSEFESPKKKAKVE

SEQ ID NO: 3159 - protein, 2114 aa, synthetic construct
MPAAKRVKLDGGDKKYSIGLDIGTNSVGWAVITDEYKVPSKKFKVLGNTDRHSIKKNLIGALLFDSGETAEATRLKRTARRRYTRRKNRICYLQEIFSNEMAKVDDSFFHRLEESFLVEEDKKHERHPIFGNIVDEVAYHEKYPTIYHLRKKLVDSTDKADLRLIYLALAHMIKFRGHFLIEGDLNPDNSDVDKLFIQLVQTYNQLFEENPINASGVDAKAILSARLSKSRRLENLIAQLPGEKKNGLFGNLIALSLGLTPNFKSNFDLAEDAKLQLSKDTYDDDLDNLLAQIGDQYADLFLAAKNLSDAILLSDILRVNTEITKAPLSASMIKRYDEHHQDLTLLKALVRQQLPEKYKEIFFDQSKNGYAGYIDGGASQEEFYKFIKPILEKMDGTEELLVKLNREDLLRKQRTFDNGSIPHQIHLGELHAILRRQEDFYPFLKDNREKIEKILTFRIPYYVGPLARGNSRFAWMTRKSEETITPWNFEEVVDKGASAQSFIERMTNFDKNLPNEKVLPKHSLLYEYFTVYNELTKVKYVTEGMRKPAFLSGEQKKAIVDLLFKTNRKVTVKQLKEDYFKKIECFDSVEISGVEDRFNASLGTYHDLLKIIKDKDFLDNEENEDILEDIVLTLTLFEDREMIEERLKTYAHLFDDKVMKQLKRRRYTGWGRLSRKLINGIRDKQSGKTILDFLKSDGFANRNFMQLIHDDSLTFKEDIQKAQVSGQGDSLHEHIANLAGSPAIKKGILQTVKVVDELVKVMGRHKPENIVIEMARENQTTQKGQKNSRERMKRIEEGIKELGSQILKEHPVENTQLQNEKLYLYYLQNGRDMYVDQELDINRLSDYDVDHIVPQSFLKDDSIDNKVLTRSDKARGKSDNVPSEEVVKKMKNYWRQLLNAKLITQRKFDNLTKAERGGLSELDKAGFIKRQLVETRQITKHVAQILDSRMNTKYDENDKLIREVKVITLKSKLVSDFRKDFQFYKVREINNYHHAHDAYLNAVVGTALIKKYPKLESEFVYGDYKVYDVRKMIAKSEQEIGKATAKYFFYSNIMNFFKTEITLANGEIRKRPLIETNGETGEIVWDKGRDFATVRKVLSMPQVNIVKKTEVQTGGFSKESILPKRNSDKLIARKKDWDPKKYGGFDSPTVAYSVLVVAKVEKGKSKKLKSVKELLGITIMERSSFEKNPIDFLEAKGYKEVKKDLIIKLPKYSLFELENGRKRMLASAGELQKGNELALPSKYVNFLYLASHYEKLKGSPEDNEQKQLFVEQHKHYLDEIIEQISEFSKRVILADANLDKVLSAYNKHRDKPIREQAENIIHLFTLTNLGAPAAFKYFDTTIDRKRYTSTKEVLDATLIHQSITGLYETRIDLSQLGGDGGGGGGSSGGSGGVQEISDSRPMLHIYLNGRRFLGLLDTGADKTCIAGRDWPANWPIHQTESSLQGLGMACGVARSSQPLRWQHEDKSGIIHPFVIPTLPFTLWGRDIMKDIKVRLMTDSPDDSQDLMIGAIESNLFADQISWKSDQPVWLNQWPLKQEKLQALQQLVTEQLQLGHLEESNSPWNTPVFVIKKKSGKWRLLQDLRAVNATMHDMGALQPGLPSPVAVPKGWEIIIIDLQDCFFNIKLHPEDCKRFAFSVPSPNFKRPYQRFQWKVLPQGMKNSPTLCQKFVDKAILTVRDKYQDSYIVHYMDDILLAHPSRSIVDEILTSMIQALNKHGLVVSTEKIQKYDNLKYLGTHIQGDSVSYQKLQIRTDKLRTLNDFQKLLGNINWIRPFLKLTTGELKPLFEILNGDSNPISTRKLTPEACKALQLMNERLSTARVKRLDLSQPWSLCILKTEYTPTACLWQDGVVEWIHLPHISPKVITPYDIFCTQLIIKGRHRSKELFSKDPDYIVVPYTKVQFDLLLQEKEDWPISLLGFLGEVHFHLPKDPLLTFTLQTAIIFPHMTSTTPLEKGIVIFTDGSANGRSVTYIQGREPIIKENTQNTAQQAEIVAVITAFEEVSQPFNLYTDSKYVTGLFPEIETATLSPRTKIYTELKHLQRLIHKRQEKFYIGHIRGHTGLPGPLAQGNAYADSLTRILTAAGKRTADGSEFEKRTADGSEFESPKKKAKVE

SEQ ID NO: 3160 - protein, 2111 aa, synthetic construct
MPAAKRVKLDGGDKKYSIGLDIGTNSVGWAVITDEYKVPSKKFKVLGNTDRHSIKKNLIGALLFDSGETAEATRLKRTARRRYTRRKNRICYLQEIFSNEMAKVDDSFFHRLEESFLVEEDKKHERHPIFGNIVDEVAYHEKYPTIYHLRKKLVDSTDKADLRLIYLALAHMIKFRGHFLIEGDLNPDNSDVDKLFIQLVQTYNQLFEENPINASGVDAKAILSARLSKSRRLENLIAQLPGEKKNGLFGNLIALSLGLTPNFKSNFDLAEDAKLQLSKDTYDDDLDNLLAQIGDQYADLFLAAKNLSDAILLSDILRVNTEITKAPLSASMIKRYDEHHQDLTLLKALVRQQLPEKYKEIFFDQSKNGYAGYIDGGASQEEFYKFIKPILEKMDGTEELLVKLNREDLLRKQRTFDNGSIPHQIHLGELHAILRRQEDFYPFLKDNREKIEKILTFRIPYYVGPLARGNSRFAWMTRKSEETITPWNFEEVVDKGASAQSFIERMTNFDKNLPNEKVLPKHSLLYEYFTVYNELTKVKYVTEGMRKPAFLSGEQKKAIVDLLFKTNRKVTVKQLKEDYFKKIECFDSVEISGVEDRFNASLGTYHDLLKIIKDKDFLDNEENEDILEDIVLTLTLFEDREMIEERLKTYAHLFDDKVMKQLKRRRYTGWGRLSRKLINGIRDKQSGKTILDFLKSDGFANRNFMQLIHDDSLTFKEDIQKAQVSGQGDSLHEHIANLAGSPAIKKGILQTVKVVDELVKVMGRHKPENIVIEMARENQTTQKGQKNSRERMKRIEEGIKELGSQILKEHPVENTQLQNEKLYLYYLQNGRDMYVDQELDINRLSDYDVDHIVPQSFLKDDSIDNKVLTRSDKARGKSDNVPSEEVVKKMKNYWRQLLNAKLITQRKFDNLTKAERGGLSELDKAGFIKRQLVETRQITKHVAQILDSRMNTKYDENDKLIREVKVITLKSKLVSDFRKDFQFYKVREINNYHHAHDAYLNAVVGTALIKKYPKLESEFVYGDYKVYDVRKMIAKSEQEIGKATAKYFFYSNIMNFFKTEITLANGEIRKRPLIETNGETGEIVWDKGRDFATVRKVLSMPQVNIVKKTEVQTGGFSKESILPKRNSDKLIARKKDWDPKKYGGFDSPTVAYSVLVVAKVEKGKSKKLKSVKELLGITIMERSSFEKNPIDFLEAKGYKEVKKDLIIKLPKYSLFELENGRKRMLASAGELQKGNELALPSKYVNFLYLASHYEKLKGSPEDNEQKQLFVEQHKHYLDEIIEQISEFSKRVILADANLDKVLSAYNKHRDKPIREQAENIIHLFTLTNLGAPAAFKYFDTTIDRKRYTSTKEVLDATLIHQSITGLYETRIDLSQLGGDGGGGSPAPGGVQEISDSRPMLHIYLNGRRFLGLLDTGADKTCIAGRDWPANWPIHQTESSLQGLGMACGVARSSQPLRWQHEDKSGIIHPFVIPTLPFTLWGRDIMKDIKVRLMTDSPDDSQDLMIGAIESNLFADQISWKSDQPVWLNQWPLKQEKLQALQQLVTEQLQLGHLEESNSPWNTPVFVIKKKSGKWRLLQDLRAVNATMHDMGALQPGLPSPVAVPKGWEIIIIDLQDCFFNIKLHPEDCKRFAFSVPSPNFKRPYQRFQWKVLPQGMKNSPTLCQKFVDKAILTVRDKYQDSYIVHYMDDILLAHPSRSIVDEILTSMIQALNKHGLVVSTEKIQKYDNLKYLGTHIQGDSVSYQKLQIRTDKLRTLNDFQKLLGNINWIRPFLKLTTGELKPLFEILNGDSNPISTRKLTPEACKALQLMNERLSTARVKRLDLSQPWSLCILKTEYTPTACLWQDGVVEWIHLPHISPKVITPYDIFCTQLIIKGRHRSKELFSKDPDYIVVPYTKVQFDLLLQEKEDWPISLLGFLGEVHFHLPKDPLLTFTLQTAIIFPHMTSTTPLEKGIVIFTDGSANGRSVTYIQGREPIIKENTQNTAQQAEIVAVITAFEEVSQPFNLYTDSKYVTGLFPEIETATLSPRTKIYTELKHLQRLIHKRQEKFYIGHIRGHTGLPGPLAQGNAYADSLTRILTAAGKRTADGSEFEKRTADGSEFESPKKKAKVE

SEQ ID NO: 3161 - protein, 2114 aa, synthetic construct
MPAAKRVKLDGGDKKYSIGLDIGTNSVGWAVITDEYKVPSKKFKVLGNTDRHSIKKNLIGALLFDSGETAEATRLKRTARRRYTRRKNRICYLQEIFSNEMAKVDDSFFHRLEESFLVEEDKKHERHPIFGNIVDEVAYHEKYPTIYHLRKKLVDSTDKADLRLIYLALAHMIKFRGHFLIEGDLNPDNSDVDKLFIQLVQTYNQLFEENPINASGVDAKAILSARLSKSRRLENLIAQLPGEKKNGLFGNLIALSLGLTPNFKSNFDLAEDAKLQLSKDTYDDDLDNLLAQIGDQYADLFLAAKNLSDAILLSDILRVNTEITKAPLSASMIKRYDEHHQDLTLLKALVRQQLPEKYKEIFFDQSKNGYAGYIDGGASQEEFYKFIKPILEKMDGTEELLVKLNREDLLRKQRTFDNGSIPHQIHLGELHAILRRQEDFYPFLKDNREKIEKILTFRIPYYVGPLARGNSRFAWMTRKSEETITPWNFEEVVDKGASAQSFIERMTNFDKNLPNEKVLPKHSLLYEYFTVYNELTKVKYVTEGMRKPAFLSGEQKKAIVDLLFKTNRKVTVKQLKEDYFKKIECFDSVEISGVEDRFNASLGTYHDLLKIIKDKDFLDNEENEDILEDIVLTLTLFEDREMIEERLKTYAHLFDDKVMKQLKRRRYTGWGRLSRKLINGIRDKQSGKTILDFLKSDGFANRNFMQLIHDDSLTFKEDIQKAQVSGQGDSLHEHIANLAGSPAIKKGILQTVKVVDELVKVMGRHKPENIVIEMARENQTTQKGQKNSRERMKRIEEGIKELGSQILKEHPVENTQLQNEKLYLYYLQNGRDMYVDQELDINRLSDYDVDHIVPQSFLKDDSIDNKVLTRSDKARGKSDNVPSEEVVKKMKNYWRQLLNAKLITQRKFDNLTKAERGGLSELDKAGFIKRQLVETRQITKHVAQILDSRMNTKYDENDKLIREVKVITLKSKLVSDFRKDFQFYKVREINNYHHAHDAYLNAVVGTALIKKYPKLESEFVYGDYKVYDVRKMIAKSEQEIGKATAKYFFYSNIMNFFKTEITLANGEIRKRPLIETNGETGEIVWDKGRDFATVRKVLSMPQVNIVKKTEVQTGGFSKESILPKRNSDKLIARKKDWDPKKYGGFDSPTVAYSVLVVAKVEKGKSKKLKSVKELLGITIMERSSFEKNPIDFLEAKGYKEVKKDLIIKLPKYSLFELENGRKRMLASAGELQKGNELALPSKYVNFLYLASHYEKLKGSPEDNEQKQLFVEQHKHYLDEIIEQISEFSKRVILADANLDKVLSAYNKHRDKPIREQAENIIHLFTLTNLGAPAAFKYFDTTIDRKRYTSTKEVLDATLIHQSITGLYETRIDLSQLGGDGGPAPGSSGGSGGVQEISDSRPMLHIYLNGRRFLGLLDTGADKTCIAGRDWPANWPIHQTESSLQGLGMACGVARSSQPLRWQHEDKSGIIHPFVIPTLPFTLWGRDIMKDIKVRLMTDSPDDSQDLMIGAIESNLFADQISWKSDQPVWLNQWPLKQEKLQALQQLVTEQLQLGHLEESNSPWNTPVFVIKKKSGKWRLLQDLRAVNATMHDMGALQPGLPSPVAVPKGWEIIIIDLQDCFFNIKLHPEDCKRFAFSVPSPNFKRPYQRFQWKVLPQGMKNSPTLCQKFVDKAILTVRDKYQDSYIVHYMDDILLAHPSRSIVDEILTSMIQALNKHGLVVSTEKIQKYDNLKYLGTHIQGDSVSYQKLQIRTDKLRTLNDFQKLLGNINWIRPFLKLTTGELKPLFEILNGDSNPISTRKLTPEACKALQLMNERLSTARVKRLDLSQPWSLCILKTEYTPTACLWQDGVVEWIHLPHISPKVITPYDIFCTQLIIKGRHRSKELFSKDPDYIVVPYTKVQFDLLLQEKEDWPISLLGFLGEVHFHLPKDPLLTFTLQTAIIFPHMTSTTPLEKGIVIFTDGSANGRSVTYIQGREPIIKENTQNTAQQAEIVAVITAFEEVSQPFNLYTDSKYVTGLFPEIETATLSPRTKIYTELKHLQRLIHKRQEKFYIGHIRGHTGLPGPLAQGNAYADSLTRILTAAGKRTADGSEFEKRTADGSEFESPKKKAKVE

SEQ ID NO: 3162 - protein, 2116 aa, synthetic construct
MPAAKRVKLDGGDKKYSIGLDIGTNSVGWAVITDEYKVPSKKFKVLGNTDRHSIKKNLIGALLFDSGETAEATRLKRTARRRYTRRKNRICYLQEIFSNEMAKVDDSFFHRLEESFLVEEDKKHERHPIFGNIVDEVAYHEKYPTIYHLRKKLVDSTDKADLRLIYLALAHMIKFRGHFLIEGDLNPDNSDVDKLFIQLVQTYNQLFEENPINASGVDAKAILSARLSKSRRLENLIAQLPGEKKNGLFGNLIALSLGLTPNFKSNFDLAEDAKLQLSKDTYDDDLDNLLAQIGDQYADLFLAAKNLSDAILLSDILRVNTEITKAPLSASMIKRYDEHHQDLTLLKALVRQQLPEKYKEIFFDQSKNGYAGYIDGGASQEEFYKFIKPILEKMDGTEELLVKLNREDLLRKQRTFDNGSIPHQIHLGELHAILRRQEDFYPFLKDNREKIEKILTFRIPYYVGPLARGNSRFAWMTRKSEETITPWNFEEVVDKGASAQSFIERMTNFDKNLPNEKVLPKHSLLYEYFTVYNELTKVKYVTEGMRKPAFLSGEQKKAIVDLLFKTNRKVTVKQLKEDYFKKIECFDSVEISGVEDRFNASLGTYHDLLKIIKDKDFLDNEENEDILEDIVLTLTLFEDREMIEERLKTYAHLFDDKVMKQLKRRRYTGWGRLSRKLINGIRDKQSGKTILDFLKSDGFANRNFMQLIHDDSLTFKEDIQKAQVSGQGDSLHEHIANLAGSPAIKKGILQTVKVVDELVKVMGRHKPENIVIEMARENQTTQKGQKNSRERMKRIEEGIKELGSQILKEHPVENTQLQNEKLYLYYLQNGRDMYVDQELDINRLSDYDVDHIVPQSFLKDDSIDNKVLTRSDKARGKSDNVPSEEVVKKMKNYWRQLLNAKLITQRKFDNLTKAERGGLSELDKAGFIKRQLVETRQITKHVAQILDSRMNTKYDENDKLIREVKVITLKSKLVSDFRKDFQFYKVREINNYHHAHDAYLNAVVGTALIKKYPKLESEFVYGDYKVYDVRKMIAKSEQEIGKATAKYFFYSNIMNFFKTEITLANGEIRKRPLIETNGETGEIVWDKGRDFATVRKVLSMPQVNIVKKTEVQTGGFSKESILPKRNSDKLIARKKDWDPKKYGGFDSPTVAYSVLVVAKVEKGKSKKLKSVKELLGITIMERSSFEKNPIDFLEAKGYKEVKKDLIIKLPKYSLFELENGRKRMLASAGELQKGNELALPSKYVNFLYLASHYEKLKGSPEDNEQKQLFVEQHKHYLDEIIEQISEFSKRVILADANLDKVLSAYNKHRDKPIREQAENIIHLFTLTNLGAPAAFKYFDTTIDRKRYTSTKEVLDATLIHQSITGLYETRIDLSQLGGDGGGGSGGGEAAAKGGVQEISDSRPMLHIYLNGRRFLGLLDTGADKTCIAGRDWPANWPIHQTESSLQGLGMACGVARSSQPLRWQHEDKSGIIHPFVIPTLPFTLWGRDIMKDIKVRLMTDSPDDSQDLMIGAIESNLFADQISWKSDQPVWLNQWPLKQEKLQALQQLVTEQLQLGHLEESNSPWNTPVFVIKKKSGKWRLLQDLRAVNATMHDMGALQPGLPSPVAVPKGWEIIIIDLQDCFFNIKLHPEDCKRFAFSVPSPNFKRPYQRFQWKVLPQGMKNSPTLCQKFVDKAILTVRDKYQDSYIVHYMDDILLAHPSRSIVDEILTSMIQALNKHGLVVSTEKIQKYDNLKYLGTHIQGDSVSYQKLQIRTDKLRTLNDFQKLLGNINWIRPFLKLTTGELKPLFEILNGDSNPISTRKLTPEACKALQLMNERLSTARVKRLDLSQPWSLCILKTEYTPTACLWQDGVVEWIHLPHISPKVITPYDIFCTQLIIKGRHRSKELFSKDPDYIVVPYTKVQFDLLLQEKEDWPISLLGFLGEVHFHLPKDPLLTFTLQTAIIFPHMTSTTPLEKGIVIFTDGSANGRSVTYIQGREPIIKENTQNTAQQAEIVAVITAFEEVSQPFNLYTDSKYVTGLFPEIETATLSPRTKIYTELKHLQRLIHKRQEKFYIGHIRGHTGLPGPLAQGNAYADSLTRILTAAGKRTADGSEFEKRTADGSEFESPKKKAKVE

SEQ ID NO: 3163 - protein, 2116 aa, synthetic construct
MPAAKRVKLDGGDKKYSIGLDIGTNSVGWAVITDEYKVPSKKFKVLGNTDRHSIKKNLIGALLFDSGETAEATRLKRTARRRYTRRKNRICYLQEIFSNEMAKVDDSFFHRLEESFLVEEDKKHERHPIFGNIVDEVAYHEKYPTIYHLRKKLVDSTDKADLRLIYLALAHMIKFRGHFLIEGDLNPDNSDVDKLFIQLVQTYNQLFEENPINASGVDAKAILSARLSKSRRLENLIAQLPGEKKNGLFGNLIALSLGLTPNFKSNFDLAEDAKLQLSKDTYDDDLDNLLAQIGDQYADLFLAAKNLSDAILLSDILRVNTEITKAPLSASMIKRYDEHHQDLTLLKALVRQQLPEKYKEIFFDQSKNGYAGYIDGGASQEEFYKFIKPILEKMDGTEELLVKLNREDLLRKQRTFDNGSIPHQIHLGELHAILRRQEDFYPFLKDNREKIEKILTFRIPYYVGPLARGNSRFAWMTRKSEETITPWNFEEVVDKGASAQSFIERMTNFDKNLPNEKVLPKHSLLYEYFTVYNELTKVKYVTEGMRKPAFLSGEQKKAIVDLLFKTNRKVTVKQLKEDYFKKIECFDSVEISGVEDRFNASLGTYHDLLKIIKDKDFLDNEENEDILEDIVLTLTLFEDREMIEERLKTYAHLFDDKVMKQLKRRRYTGWGRLSRKLINGIRDKQSGKTILDFLKSDGFANRNFMQLIHDDSLTFKEDIQKAQVSGQGDSLHEHIANLAGSPAIKKGILQTVKVVDELVKVMGRHKPENIVIEMARENQTTQKGQKNSRERMKRIEEGIKELGSQILKEHPVENTQLQNEKLYLYYLQNGRDMYVDQELDINRLSDYDVDHIVPQSFLKDDSIDNKVLTRSDKARGKSDNVPSEEVVKKMKNYWRQLLNAKLITQRKFDNLTKAERGGLSELDKAGFIKRQLVETRQITKHVAQILDSRMNTKYDENDKLIREVKVITLKSKLVSDFRKDFQFYKVREINNYHHAHDAYLNAVVGTALIKKYPKLESEFVYGDYKVYDVRKMIAKSEQEIGKATAKYFFYSNIMNFFKTEITLANGEIRKRPLIETNGETGEIVWDKGRDFATVRKVLSMPQVNIVKKTEVQTGGFSKESILPKRNSDKLIARKKDWDPKKYGGFDSPTVAYSVLVVAKVEKGKSKKLKSVKELLGITIMERSSFEKNPIDFLEAKGYKEVKKDLIIKLPKYSLFELENGRKRMLASAGELQKGNELALPSKYVNFLYLASHYEKLKGSPEDNEQKQLFVEQHKHYLDEIIEQISEFSKRVILADANLDKVLSAYNKHRDKPIREQAENIIHLFTLTNLGAPAAFKYFDTTIDRKRYTSTKEVLDATLIHQSITGLYETRIDLSQLGGDGGGGGGSSEAAAKGGVQEISDSRPMLHIYLNGRRFLGLLDTGADKTCIAGRDWPANWPIHQTESSLQGLGMACGVARSSQPLRWQHEDKSGIIHPFVIPTLPFTLWGRDIMKDIKVRLMTDSPDDSQDLMIGAIESNLFADQISWKSDQPVWLNQWPLKQEKLQALQQLVTEQLQLGHLEESNSPWNTPVFVIKKKSGKWRLLQDLRAVNATMHDMGALQPGLPSPVAVPKGWEIIIIDLQDCFFNIKLHPEDCKRFAFSVPSPNFKRPYQRFQWKVLPQGMKNSPTLCQKFVDKAILTVRDKYQDSYIVHYMDDILLAHPSRSIVDEILTSMIQALNKHGLVVSTEKIQKYDNLKYLGTHIQGDSVSYQKLQIRTDKLRTLNDFQKLLGNINWIRPFLKLTTGELKPLFEILNGDSNPISTRKLTPEACKALQLMNERLSTARVKRLDLSQPWSLCILKTEYTPTACLWQDGVVEWIHLPHISPKVITPYDIFCTQLIIKGRHRSKELFSKDPDYIVVPYTKVQFDLLLQEKEDWPISLLGFLGEVHFHLPKDPLLTFTLQTAIIFPHMTSTTPLEKGIVIFTDGSANGRSVTYIQGREPIIKENTQNTAQQAEIVAVITAFEEVSQPFNLYTDSKYVTGLFPEIETATLSPRTKIYTELKHLQRLIHKRQEKFYIGHIRGHTGLPGPLAQGNAYADSLTRILTAAGKRTADGSEFEKRTADGSEFESPKKKAKVE

SEQ ID NO: 3164 - protein, 2116 aa, synthetic construct
MPAAKRVKLDGGDKKYSIGLDIGTNSVGWAVITDEYKVPSKKFKVLGNTDRHSIKKNLIGALLFDSGETAEATRLKRTARRRYTRRKNRICYLQEIFSNEMAKVDDSFFHRLEESFLVEEDKKHERHPIFGNIVDEVAYHEKYPTIYHLRKKLVDSTDKADLRLIYLALAHMIKFRGHFLIEGDLNPDNSDVDKLFIQLVQTYNQLFEENPINASGVDAKAILSARLSKSRRLENLIAQLPGEKKNGLFGNLIALSLGLTPNFKSNFDLAEDAKLQLSKDTYDDDLDNLLAQIGDQYADLFLAAKNLSDAILLSDILRVNTEITKAPLSASMIKRYDEHHQDLTLLKALVRQQLPEKYKEIFFDQSKNGYAGYIDGGASQEEFYKFIKPILEKMDGTEELLVKLNREDLLRKQRTFDNGSIPHQIHLGELHAILRRQEDFYPFLKDNREKIEKILTFRIPYYVGPLARGNSRFAWMTRKSEETITPWNFEEVVDKGASAQSFIERMTNFDKNLPNEKVLPKHSLLYEYFTVYNELTKVKYVTEGMRKPAFLSGEQKKAIVDLLFKTNRKVTVKQLKEDYFKKIECFDSVEISGVEDRFNASLGTYHDLLKIIKDKDFLDNEENEDILEDIVLTLTLFEDREMIEERLKTYAHLFDDKVMKQLKRRRYTGWGRLSRKLINGIRDKQSGKTILDFLKSDGFANRNFMQLIHDDSLTFKEDIQKAQVSGQGDSLHEHIANLAGSPAIKKGILQTVKVVDELVKVMGRHKPENIVIEMARENQTTQKGQKNSRERMKRIEEGIKELGSQILKEHPVENTQLQNEKLYLYYLQNGRDMYVDQELDINRLSDYDVDHIVPQSFLKDDSIDNKVLTRSDKARGKSDNVPSEEVVKKMKNYWRQLLNAKLITQRKFDNLTKAERGGLSELDKAGFIKRQLVETRQITKHVAQILDSRMNTKYDENDKLIREVKVITLKSKLVSDFRKDFQFYKVREINNYHHAHDAYLNAVVGTALIKKYPKLESEFVYGDYKVYDVRKMIAKSEQEIGKATAKYFFYSNIMNFFKTEITLANGEIRKRPLIETNGETGEIVWDKGRDFATVRKVLSMPQVNIVKKTEVQTGGFSKESILPKRNSDKLIARKKDWDPKKYGGFDSPTVAYSVLVVAKVEKGKSKKLKSVKELLGITIMERSSFEKNPIDFLEAKGYKEVKKDLIIKLPKYSLFELENGRKRMLASAGELQKGNELALPSKYVNFLYLASHYEKLKGSPEDNEQKQLFVEQHKHYLDEIIEQISEFSKRVILADANLDKVLSAYNKHRDKPIREQAENIIHLFTLTNLGAPAAFKYFDTTIDRKRYTSTKEVLDATLIHQSITGLYETRIDLSQLGGDGGGGSPAPEAAAKGGVQEISDSRPMLHIYLNGRRFLGLLDTGADKTCIAGRDWPANWPIHQTESSLQGLGMACGVARSSQPLRWQHEDKSGIIHPFVIPTLPFTLWGRDIMKDIKVRLMTDSPDDSQDLMIGAIESNLFADQISWKSDQPVWLNQWPLKQEKLQALQQLVTEQLQLGHLEESNSPWNTPVFVIKKKSGKWRLLQDLRAVNATMHDMGALQPGLPSPVAVPKGWEIIIIDLQDCFFNIKLHPEDCKRFAFSVPSPNFKRPYQRFQWKVLPQGMKNSPTLCQKFVDKAILTVRDKYQDSYIVHYMDDILLAHPSRSIVDEILTSMIQALNKHGLVVSTEKIQKYDNLKYLGTHIQGDSVSYQKLQIRTDKLRTLNDFQKLLGNINWIRPFLKLTTGELKPLFEILNGDSNPISTRKLTPEACKALQLMNERLSTARVKRLDLSQPWSLCILKTEYTPTACLWQDGVVEWIHLPHISPKVITPYDIFCTQLIIKGRHRSKELFSKDPDYIVVPYTKVQFDLLLQEKEDWPISLLGFLGEVHFHLPKDPLLTFTLQTAIIFPHMTSTTPLEKGIVIFTDGSANGRSVTYIQGREPIIKENTQNTAQQAEIVAVITAFEEVSQPFNLYTDSKYVTGLFPEIETATLSPRTKIYTELKHLQRLIHKRQEKFYIGHIRGHTGLPGPLAQGNAYADSLTRILTAAGKRTADGSEFEKRTADGSEFESPKKKAKVE

SEQ ID NO: 3165 - protein, 2117 aa, synthetic construct
MPAAKRVKLDGGDKKYSIGLDIGTNSVGWAVITDEYKVPSKKFKVLGNTDRHSIKKNLIGALLFDSGETAEATRLKRTARRRYTRRKNRICYLQEIFSNEMAKVDDSFFHRLEESFLVEEDKKHERHPIFGNIVDEVAYHEKYPTIYHLRKKLVDSTDKADLRLIYLALAHMIKFRGHFLIEGDLNPDNSDVDKLFIQLVQTYNQLFEENPINASGVDAKAILSARLSKSRRLENLIAQLPGEKKNGLFGNLIALSLGLTPNFKSNFDLAEDAKLQLSKDTYDDDLDNLLAQIGDQYADLFLAAKNLSDAILLSDILRVNTEITKAPLSASMIKRYDEHHQDLTLLKALVRQQLPEKYKEIFFDQSKNGYAGYIDGGASQEEFYKFIKPILEKMDGTEELLVKLNREDLLRKQRTFDNGSIPHQIHLGELHAILRRQEDFYPFLKDNREKIEKILTFRIPYYVGPLARGNSRFAWMTRKSEETITPWNFEEVVDKGASAQSFIERMTNFDKNLPNEKVLPKHSLLYEYFTVYNELTKVKYVTEGMRKPAFLSGEQKKAIVDLLFKTNRKVTVKQLKEDYFKKIECFDSVEISGVEDRFNASLGTYHDLLKIIKDKDFLDNEENEDILEDIVLTLTLFEDREMIEERLKTYAHLFDDKVMKQLKRRRYTGWGRLSRKLINGIRDKQSGKTILDFLKSDGFANRNFMQLIHDDSLTFKEDIQKAQVSGQGDSLHEHIANLAGSPAIKKGILQTVKVVDELVKVMGRHKPENIVIEMARENQTTQKGQKNSRERMKRIEEGIKELGSQILKEHPVENTQLQNEKLYLYYLQNGRDMYVDQELDINRLSDYDVDHIVPQSFLKDDSIDNKVLTRSDKARGKSDNVPSEEVVKKMKNYWRQLLNAKLITQRKFDNLTKAERGGLSELDKAGFIKRQLVETRQITKHVAQILDSRMNTKYDENDKLIREVKVITLKSKLVSDFRKDFQFYKVREINNYHHAHDAYLNAVVGTALIKKYPKLESEFVYGDYKVYDVRKMIAKSEQEIGKATAKYFFYSNIMNFFKTEITLANGEIRKRPLIETNGETGEIVWDKGRDFATVRKVLSMPQVNIVKKTEVQTGGFSKESILPKRNSDKLIARKKDWDPKKYGGFDSPTVAYSVLVVAKVEKGKSKKLKSVKELLGITIMERSSFEKNPIDFLEAKGYKEVKKDLIIKLPKYSLFELENGRKRMLASAGELQKGNELALPSKYVNFLYLASHYEKLKGSPEDNEQKQLFVEQHKHYLDEIIEQISEFSKRVILADANLDKVLSAYNKHRDKPIREQAENIIHLFTLTNLGAPAAFKYFDTTIDRKRYTSTKEVLDATLIHQSITGLYETRIDLSQLGGDGGGSAGSAAGSGEFGGVQEISDSRPMLHIYLNGRRFLGLLDTGADKTCIAGRDWPANWPIHQTESSLQGLGMACGVARSSQPLRWQHEDKSGIIHPFVIPTLPFTLWGRDIMKDIKVRLMTDSPDDSQDLMIGAIESNLFADQISWKSDQPVWLNQWPLKQEKLQALQQLVTEQLQLGHLEESNSPWNTPVFVIKKKSGKWRLLQDLRAVNATMHDMGALQPGLPSPVAVPKGWEIIIIDLQDCFFNIKLHPEDCKRFAFSVPSPNFKRPYQRFQWKVLPQGMKNSPTLCQKFVDKAILTVRDKYQDSYIVHYMDDILLAHPSRSIVDEILTSMIQALNKHGLVVSTEKIQKYDNLKYLGTHIQGDSVSYQKLQIRTDKLRTLNDFQKLLGNINWIRPFLKLTTGELKPLFEILNGDSNPISTRKLTPEACKALQLMNERLSTARVKRLDLSQPWSLCILKTEYTPTACLWQDGVVEWIHLPHISPKVITPYDIFCTQLIIKGRHRSKELFSKDPDYIVVPYTKVQFDLLLQEKEDWPISLLGFLGEVHFHLPKDPLLTFTLQTAIIFPHMTSTTPLEKGIVIFTDGSANGRSVTYIQGREPIIKENTQNTAQQAEIVAVITAFEEVSQPFNLYTDSKYVTGLFPEIETATLSPRTKIYTELKHLQRLIHKRQEKFYIGHIRGHTGLPGPLAQGNAYADSLTRILTAAGKRTADGSEFEKRTADGSEFESPKKKAKVE

SEQ ID NO: 3166 - protein, 2111 aa, synthetic construct
MPAAKRVKLDGGDKKYSIGLDIGTNSVGWAVITDEYKVPSKKFKVLGNTDRHSIKKNLIGALLFDSGETAEATRLKRTARRRYTRRKNRICYLQEIFSNEMAKVDDSFFHRLEESFLVEEDKKHERHPIFGNIVDEVAYHEKYPTIYHLRKKLVDSTDKADLRLIYLALAHMIKFRGHFLIEGDLNPDNSDVDKLFIQLVQTYNQLFEENPINASGVDAKAILSARLSKSRRLENLIAQLPGEKKNGLFGNLIALSLGLTPNFKSNFDLAEDAKLQLSKDTYDDDLDNLLAQIGDQYADLFLAAKNLSDAILLSDILRVNTEITKAPLSASMIKRYDEHHQDLTLLKALVRQQLPEKYKEIFFDQSKNGYAGYIDGGASQEEFYKFIKPILEKMDGTEELLVKLNREDLLRKQRTFDNGSIPHQIHLGELHAILRRQEDFYPFLKDNREKIEKILTFRIPYYVGPLARGNSRFAWMTRKSEETITPWNFEEVVDKGASAQSFIERMTNFDKNLPNEKVLPKHSLLYEYFTVYNELTKVKYVTEGMRKPAFLSGEQKKAIVDLLFKTNRKVTVKQLKEDYFKKIECFDSVEISGVEDRFNASLGTYHDLLKIIKDKDFLDNEENEDILEDIVLTLTLFEDREMIEERLKTYAHLFDDKVMKQLKRRRYTGWGRLSRKLINGIRDKQSGKTILDFLKSDGFANRNFMQLIHDDSLTFKEDIQKAQVSGQGDSLHEHIANLAGSPAIKKGILQTVKVVDELVKVMGRHKPENIVIEMARENQTTQKGQKNSRERMKRIEEGIKELGSQILKEHPVENTQLQNEKLYLYYLQNGRDMYVDQELDINRLSDYDVDHIVPQSFLKDDSIDNKVLTRSDKARGKSDNVPSEEVVKKMKNYWRQLLNAKLITQRKFDNLTKAERGGLSELDKAGFIKRQLVETRQITKHVAQILDSRMNTKYDENDKLIREVKVITLKSKLVSDFRKDFQFYKVREINNYHHAHDAYLNAVVGTALIKKYPKLESEFVYGDYKVYDVRKMIAKSEQEIGKATAKYFFYSNIMNFFKTEITLANGEIRKRPLIETNGETGEIVWDKGRDFATVRKVLSMPQVNIVKKTEVQTGGFSKESILPKRNSDKLIARKKDWDPKKYGGFDSPTVAYSVLVVAKVEKGKSKKLKSVKELLGITIMERSSFEKNPIDFLEAKGYKEVKKDLIIKLPKYSLFELENGRKRMLASAGELQKGNELALPSKYVNFLYLASHYEKLKGSPEDNEQKQLFVEQHKHYLDEIIEQISEFSKRVILADANLDKVLSAYNKHRDKPIREQAENIIHLFTLTNLGAPAAFKYFDTTIDRKRYTSTKEVLDATLIHQSITGLYETRIDLSQLGGDGGGGGGGSGGVQEISDSRPMLHIYLNGRRFLGLLDTGADKTCIAGRDWPANWPIHQTESSLQGLGMACGVARSSQPLRWQHEDKSGIIHPFVIPTLPFTLWGRDIMKDIKVRLMTDSPDDSQDLMIGAIESNLFADQISWKSDQPVWLNQWPLKQEKLQALQQLVTEQLQLGHLEESNSPWNTPVFVIKKKSGKWRLLQDLRAVNATMHDMGALQPGLPSPVAVPKGWEIIIIDLQDCFFNIKLHPEDCKRFAFSVPSPNFKRPYQRFQWKVLPQGMKNSPTLCQKFVDKAILTVRDKYQDSYIVHYMDDILLAHPSRSIVDEILTSMIQALNKHGLVVSTEKIQKYDNLKYLGTHIQGDSVSYQKLQIRTDKLRTLNDFQKLLGNINWIRPFLKLTTGELKPLFEILNGDSNPISTRKLTPEACKALQLMNERLSTARVKRLDLSQPWSLCILKTEYTPTACLWQDGVVEWIHLPHISPKVITPYDIFCTQLIIKGRHRSKELFSKDPDYIVVPYTKVQFDLLLQEKEDWPISLLGFLGEVHFHLPKDPLLTFTLQTAIIFPHMTSTTPLEKGIVIFTDGSANGRSVTYIQGREPIIKENTQNTAQQAEIVAVITAFEEVSQPFNLYTDSKYVTGLFPEIETATLSPRTKIYTELKHLQRLIHKRQEKFYIGHIRGHTGLPGPLAQGNAYADSLTRILTAAGKRTADGSEFEKRTADGSEFESPKKKAKVE

SEQ ID NO: 3167 - protein, 2113 aa, synthetic construct
MPAAKRVKLDGGDKKYSIGLDIGTNSVGWAVITDEYKVPSKKFKVLGNTDRHSIKKNLIGALLFDSGETAEATRLKRTARRRYTRRKNRICYLQEIFSNEMAKVDDSFFHRLEESFLVEEDKKHERHPIFGNIVDEVAYHEKYPTIYHLRKKLVDSTDKADLRLIYLALAHMIKFRGHFLIEGDLNPDNSDVDKLFIQLVQTYNQLFEENPINASGVDAKAILSARLSKSRRLENLIAQLPGEKKNGLFGNLIALSLGLTPNFKSNFDLAEDAKLQLSKDTYDDDLDNLLAQIGDQYADLFLAAKNLSDAILLSDILRVNTEITKAPLSASMIKRYDEHHQDLTLLKALVRQQLPEKYKEIFFDQSKNGYAGYIDGGASQEEFYKFIKPILEKMDGTEELLVKLNREDLLRKQRTFDNGSIPHQIHLGELHAILRRQEDFYPFLKDNREKIEKILTFRIPYYVGPLARGNSRFAWMTRKSEETITPWNFEEVVDKGASAQSFIERMTNFDKNLPNEKVLPKHSLLYEYFTVYNELTKVKYVTEGMRKPAFLSGEQKKAIVDLLFKTNRKVTVKQLKEDYFKKIECFDSVEISGVEDRFNASLGTYHDLLKIIKDKDFLDNEENEDILEDIVLTLTLFEDREMIEERLKTYAHLFDDKVMKQLKRRRYTGWGRLSRKLINGIRDKQSGKTILDFLKSDGFANRNFMQLIHDDSLTFKEDIQKAQVSGQGDSLHEHIANLAGSPAIKKGILQTVKVVDELVKVMGRHKPENIVIEMARENQTTQKGQKNSRERMKRIEEGIKELGSQILKEHPVENTQLQNEKLYLYYLQNGRDMYVDQELDINRLSDYDVDHIVPQSFLKDDSIDNKVLTRSDKARGKSDNVPSEEVVKKMKNYWRQLLNAKLITQRKFDNLTKAERGGLSELDKAGFIKRQLVETRQITKHVAQILDSRMNTKYDENDKLIREVKVITLKSKLVSDFRKDFQFYKVREINNYHHAHDAYLNAVVGTALIKKYPKLESEFVYGDYKVYDVRKMIAKSEQEIGKATAKYFFYSNIMNFFKTEITLANGEIRKRPLIETNGETGEIVWDKGRDFATVRKVLSMPQVNIVKKTEVQTGGFSKESILPKRNSDKLIARKKDWDPKKYGGFDSPTVAYSVLVVAKVEKGKSKKLKSVKELLGITIMERSSFEKNPIDFLEAKGYKEVKKDLIIKLPKYSLFELENGRKRMLASAGELQKGNELALPSKYVNFLYLASHYEKLKGSPEDNEQKQLFVEQHKHYLDEIIEQISEFSKRVILADANLDKVLSAYNKHRDKPIREQAENIIHLFTLTNLGAPAAFKYFDTTIDRKRYTSTKEVLDATLIHQSITGLYETRIDLSQLGGDGGGGGEAAAKGGVQEISDSRPMLHIYLNGRRFLGLLDTGADKTCIAGRDWPANWPIHQTESSLQGLGMACGVARSSQPLRWQHEDKSGIIHPFVIPTLPFTLWGRDIMKDIKVRLMTDSPDDSQDLMIGAIESNLFADQISWKSDQPVWLNQWPLKQEKLQALQQLVTEQLQLGHLEESNSPWNTPVFVIKKKSGKWRLLQDLRAVNATMHDMGALQPGLPSPVAVPKGWEIIIIDLQDCFFNIKLHPEDCKRFAFSVPSPNFKRPYQRFQWKVLPQGMKNSPTLCQKFVDKAILTVRDKYQDSYIVHYMDDILLAHPSRSIVDEILTSMIQALNKHGLVVSTEKIQKYDNLKYLGTHIQGDSVSYQKLQIRTDKLRTLNDFQKLLGNINWIRPFLKLTTGELKPLFEILNGDSNPISTRKLTPEACKALQLMNERLSTARVKRLDLSQPWSLCILKTEYTPTACLWQDGVVEWIHLPHISPKVITPYDIFCTQLIIKGRHRSKELFSKDPDYIVVPYTKVQFDLLLQEKEDWPISLLGFLGEVHFHLPKDPLLTFTLQTAIIFPHMTSTTPLEKGIVIFTDGSANGRSVTYIQGREPIIKENTQNTAQQAEIVAVITAFEEVSQPFNLYTDSKYVTGLFPEIETATLSPRTKIYTELKHLQRLIHKRQEKFYIGHIRGHTGLPGPLAQGNAYADSLTRILTAAGKRTADGSEFEKRTADGSEFESPKKKAKVE

SEQ ID NO: 3168 - protein, 2111 aa, synthetic construct
MPAAKRVKLDGGDKKYSIGLDIGTNSVGWAVITDEYKVPSKKFKVLGNTDRHSIKKNLIGALLFDSGETAEATRLKRTARRRYTRRKNRICYLQEIFSNEMAKVDDSFFHRLEESFLVEEDKKHERHPIFGNIVDEVAYHEKYPTIYHLRKKLVDSTDKADLRLIYLALAHMIKFRGHFLIEGDLNPDNSDVDKLFIQLVQTYNQLFEENPINASGVDAKAILSARLSKSRRLENLIAQLPGEKKNGLFGNLIALSLGLTPNFKSNFDLAEDAKLQLSKDTYDDDLDNLLAQIGDQYADLFLAAKNLSDAILLSDILRVNTEITKAPLSASMIKRYDEHHQDLTLLKALVRQQLPEKYKEIFFDQSKNGYAGYIDGGASQEEFYKFIKPILEKMDGTEELLVKLNREDLLRKQRTFDNGSIPHQIHLGELHAILRRQEDFYPFLKDNREKIEKILTFRIPYYVGPLARGNSRFAWMTRKSEETITPWNFEEVVDKGASAQSFIERMTNFDKNLPNEKVLPKHSLLYEYFTVYNELTKVKYVTEGMRKPAFLSGEQKKAIVDLLFKTNRKVTVKQLKEDYFKKIECFDSVEISGVEDRFNASLGTYHDLLKIIKDKDFLDNEENEDILEDIVLTLTLFEDREMIEERLKTYAHLFDDKVMKQLKRRRYTGWGRLSRKLINGIRDKQSGKTILDFLKSDGFANRNFMQLIHDDSLTFKEDIQKAQVSGQGDSLHEHIANLAGSPAIKKGILQTVKVVDELVKVMGRHKPENIVIEMARENQTTQKGQKNSRERMKRIEEGIKELGSQILKEHPVENTQLQNEKLYLYYLQNGRDMYVDQELDINRLSDYDVDHIVPQSFLKDDSIDNKVLTRSDKARGKSDNVPSEEVVKKMKNYWRQLLNAKLITQRKFDNLTKAERGGLSELDKAGFIKRQLVETRQITKHVAQILDSRMNTKYDENDKLIREVKVITLKSKLVSDFRKDFQFYKVREINNYHHAHDAYLNAVVGTALIKKYPKLESEFVYGDYKVYDVRKMIAKSEQEIGKATAKYFFYSNIMNFFKTEITLANGEIRKRPLIETNGETGEIVWDKGRDFATVRKVLSMPQVNIVKKTEVQTGGFSKESILPKRNSDKLIARKKDWDPKKYGGFDSPTVAYSVLVVAKVEKGKSKKLKSVKELLGITIMERSSFEKNPIDFLEAKGYKEVKKDLIIKLPKYSLFELENGRKRMLASAGELQKGNELALPSKYVNFLYLASHYEKLKGSPEDNEQKQLFVEQHKHYLDEIIEQISEFSKRVILADANLDKVLSAYNKHRDKPIREQAENIIHLFTLTNLGAPAAFKYFDTTIDRKRYTSTKEVLDATLIHQSITGLYETRIDLSQLGGDGGGGSGGSGGVQEISDSRPMLHIYLNGRRFLGLLDTGADKTCIAGRDWPANWPIHQTESSLQGLGMACGVARSSQPLRWQHEDKSGIIHPFVIPTLPFTLWGRDIMKDIKVRLMTDSPDDSQDLMIGAIESNLFADQISWKSDQPVWLNQWPLKQEKLQALQQLVTEQLQLGHLEESNSPWNTPVFVIKKKSGKWRLLQDLRAVNATMHDMGALQPGLPSPVAVPKGWEIIIIDLQDCFFNIKLHPEDCKRFAFSVPSPNFKRPYQRFQWKVLPQGMKNSPTLCQKFVDKAILTVRDKYQDSYIVHYMDDILLAHPSRSIVDEILTSMIQALNKHGLVVSTEKIQKYDNLKYLGTHIQGDSVSYQKLQIRTDKLRTLNDFQKLLGNINWIRPFLKLTTGELKPLFEILNGDSNPISTRKLTPEACKALQLMNERLSTARVKRLDLSQPWSLCILKTEYTPTACLWQDGVVEWIHLPHISPKVITPYDIFCTQLIIKGRHRSKELFSKDPDYIVVPYTKVQFDLLLQEKEDWPISLLGFLGEVHFHLPKDPLLTFTLQTAIIFPHMTSTTPLEKGIVIFTDGSANGRSVTYIQGREPIIKENTQNTAQQAEIVAVITAFEEVSQPFNLYTDSKYVTGLFPEIETATLSPRTKIYTELKHLQRLIHKRQEKFYIGHIRGHTGLPGPLAQGNAYADSLTRILTAAGKRTADGSEFEKRTADGSEFESPKKKAKVE

SEQ ID NO: 3169 - protein, 2116 aa, synthetic construct
MPAAKRVKLDGGDKKYSIGLDIGTNSVGWAVITDEYKVPSKKFKVLGNTDRHSIKKNLIGALLFDSGETAEATRLKRTARRRYTRRKNRICYLQEIFSNEMAKVDDSFFHRLEESFLVEEDKKHERHPIFGNIVDEVAYHEKYPTIYHLRKKLVDSTDKADLRLIYLALAHMIKFRGHFLIEGDLNPDNSDVDKLFIQLVQTYNQLFEENPINASGVDAKAILSARLSKSRRLENLIAQLPGEKKNGLFGNLIALSLGLTPNFKSNFDLAEDAKLQLSKDTYDDDLDNLLAQIGDQYADLFLAAKNLSDAILLSDILRVNTEITKAPLSASMIKRYDEHHQDLTLLKALVRQQLPEKYKEIFFDQSKNGYAGYIDGGASQEEFYKFIKPILEKMDGTEELLVKLNREDLLRKQRTFDNGSIPHQIHLGELHAILRRQEDFYPFLKDNREKIEKILTFRIPYYVGPLARGNSRFAWMTRKSEETITPWNFEEVVDKGASAQSFIERMTNFDKNLPNEKVLPKHSLLYEYFTVYNELTKVKYVTEGMRKPAFLSGEQKKAIVDLLFKTNRKVTVKQLKEDYFKKIECFDSVEISGVEDRFNASLGTYHDLLKIIKDKDFLDNEENEDILEDIVLTLTLFEDREMIEERLKTYAHLFDDKVMKQLKRRRYTGWGRLSRKLINGIRDKQSGKTILDFLKSDGFANRNFMQLIHDDSLTFKEDIQKAQVSGQGDSLHEHIANLAGSPAIKKGILQTVKVVDELVKVMGRHKPENIVIEMARENQTTQKGQKNSRERMKRIEEGIKELGSQILKEHPVENTQLQNEKLYLYYLQNGRDMYVDQELDINRLSDYDVDHIVPQSFLKDDSIDNKVLTRSDKARGKSDNVPSEEVVKKMKNYWRQLLNAKLITQRKFDNLTKAERGGLSELDKAGFIKRQLVETRQITKHVAQILDSRMNTKYDENDKLIREVKVITLKSKLVSDFRKDFQFYKVREINNYHHAHDAYLNAVVGTALIKKYPKLESEFVYGDYKVYDVRKMIAKSEQEIGKATAKYFFYSNIMNFFKTEITLANGEIRKRPLIETNGETGEIVWDKGRDFATVRKVLSMPQVNIVKKTEVQTGGFSKESILPKRNSDKLIARKKDWDPKKYGGFDSPTVAYSVLVVAKVEKGKSKKLKSVKELLGITIMERSSFEKNPIDFLEAKGYKEVKKDLIIKLPKYSLFELENGRKRMLASAGELQKGNELALPSKYVNFLYLASHYEKLKGSPEDNEQKQLFVEQHKHYLDEIIEQISEFSKRVILADANLDKVLSAYNKHRDKPIREQAENIIHLFTLTNLGAPAAFKYFDTTIDRKRYTSTKEVLDATLIHQSITGLYETRIDLSQLGGDGGPAPAPAPAPAPGGVQEISDSRPMLHIYLNGRRFLGLLDTGADKTCIAGRDWPANWPIHQTESSLQGLGMACGVARSSQPLRWQHEDKSGIIHPFVIPTLPFTLWGRDIMKDIKVRLMTDSPDDSQDLMIGAIESNLFADQISWKSDQPVWLNQWPLKQEKLQALQQLVTEQLQLGHLEESNSPWNTPVFVIKKKSGKWRLLQDLRAVNATMHDMGALQPGLPSPVAVPKGWEIIIIDLQDCFFNIKLHPEDCKRFAFSVPSPNFKRPYQRFQWKVLPQGMKNSPTLCQKFVDKAILTVRDKYQDSYIVHYMDDILLAHPSRSIVDEILTSMIQALNKHGLVVSTEKIQKYDNLKYLGTHIQGDSVSYQKLQIRTDKLRTLNDFQKLLGNINWIRPFLKLTTGELKPLFEILNGDSNPISTRKLTPEACKALQLMNERLSTARVKRLDLSQPWSLCILKTEYTPTACLWQDGVVEWIHLPHISPKVITPYDIFCTQLIIKGRHRSKELFSKDPDYIVVPYTKVQFDLLLQEKEDWPISLLGFLGEVHFHLPKDPLLTFTLQTAIIFPHMTSTTPLEKGIVIFTDGSANGRSVTYIQGREPIIKENTQNTAQQAEIVAVITAFEEVSQPFNLYTDSKYVTGLFPEIETATLSPRTKIYTELKHLQRLIHKRQEKFYIGHIRGHTGLPGPLAQGNAYADSLTRILTAAGKRTADGSEFEKRTADGSEFESPKKKAKVE

SEQ ID NO: 3170 - protein, 2116 aa, synthetic construct
MPAAKRVKLDGGDKKYSIGLDIGTNSVGWAVITDEYKVPSKKFKVLGNTDRHSIKKNLIGALLFDSGETAEATRLKRTARRRYTRRKNRICYLQEIFSNEMAKVDDSFFHRLEESFLVEEDKKHERHPIFGNIVDEVAYHEKYPTIYHLRKKLVDSTDKADLRLIYLALAHMIKFRGHFLIEGDLNPDNSDVDKLFIQLVQTYNQLFEENPINASGVDAKAILSARLSKSRRLENLIAQLPGEKKNGLFGNLIALSLGLTPNFKSNFDLAEDAKLQLSKDTYDDDLDNLLAQIGDQYADLFLAAKNLSDAILLSDILRVNTEITKAPLSASMIKRYDEHHQDLTLLKALVRQQLPEKYKEIFFDQSKNGYAGYIDGGASQEEFYKFIKPILEKMDGTEELLVKLNREDLLRKQRTFDNGSIPHQIHLGELHAILRRQEDFYPFLKDNREKIEKILTFRIPYYVGPLARGNSRFAWMTRKSEETITPWNFEEVVDKGASAQSFIERMTNFDKNLPNEKVLPKHSLLYEYFTVYNELTKVKYVTEGMRKPAFLSGEQKKAIVDLLFKTNRKVTVKQLKEDYFKKIECFDSVEISGVEDRFNASLGTYHDLLKIIKDKDFLDNEENEDILEDIVLTLTLFEDREMIEERLKTYAHLFDDKVMKQLKRRRYTGWGRLSRKLINGIRDKQSGKTILDFLKSDGFANRNFMQLIHDDSLTFKEDIQKAQVSGQGDSLHEHIANLAGSPAIKKGILQTVKVVDELVKVMGRHKPENIVIEMARENQTTQKGQKNSRERMKRIEEGIKELGSQILKEHPVENTQLQNEKLYLYYLQNGRDMYVDQELDINRLSDYDVDHIVPQSFLKDDSIDNKVLTRSDKARGKSDNVPSEEVVKKMKNYWRQLLNAKLITQRKFDNLTKAERGGLSELDKAGFIKRQLVETRQITKHVAQILDSRMNTKYDENDKLIREVKVITLKSKLVSDFRKDFQFYKVREINNYHHAHDAYLNAVVGTALIKKYPKLESEFVYGDYKVYDVRKMIAKSEQEIGKATAKYFFYSNIMNFFKTEITLANGEIRKRPLIETNGETGEIVWDKGRDFATVRKVLSMPQVNIVKKTEVQTGGFSKESILPKRNSDKLIARKKDWDPKKYGGFDSPTVAYSVLVVAKVEKGKSKKLKSVKELLGITIMERSSFEKNPIDFLEAKGYKEVKKDLIIKLPKYSLFELENGRKRMLASAGELQKGNELALPSKYVNFLYLASHYEKLKGSPEDNEQKQLFVEQHKHYLDEIIEQISEFSKRVILADANLDKVLSAYNKHRDKPIREQAENIIHLFTLTNLGAPAAFKYFDTTIDRKRYTSTKEVLDATLIHQSITGLYETRIDLSQLGGDGGGGSEAAAKPAPGGVQEISDSRPMLHIYLNGRRFLGLLDTGADKTCIAGRDWPANWPIHQTESSLQGLGMACGVARSSQPLRWQHEDKSGIIHPFVIPTLPFTLWGRDIMKDIKVRLMTDSPDDSQDLMIGAIESNLFADQISWKSDQPVWLNQWPLKQEKLQALQQLVTEQLQLGHLEESNSPWNTPVFVIKKKSGKWRLLQDLRAVNATMHDMGALQPGLPSPVAVPKGWEIIIIDLQDCFFNIKLHPEDCKRFAFSVPSPNFKRPYQRFQWKVLPQGMKNSPTLCQKFVDKAILTVRDKYQDSYIVHYMDDILLAHPSRSIVDEILTSMIQALNKHGLVVSTEKIQKYDNLKYLGTHIQGDSVSYQKLQIRTDKLRTLNDFQKLLGNINWIRPFLKLTTGELKPLFEILNGDSNPISTRKLTPEACKALQLMNERLSTARVKRLDLSQPWSLCILKTEYTPTACLWQDGVVEWIHLPHISPKVITPYDIFCTQLIIKGRHRSKELFSKDPDYIVVPYTKVQFDLLLQEKEDWPISLLGFLGEVHFHLPKDPLLTFTLQTAIIFPHMTSTTPLEKGIVIFTDGSANGRSVTYIQGREPIIKENTQNTAQQAEIVAVITAFEEVSQPFNLYTDSKYVTGLFPEIETATLSPRTKIYTELKHLQRLIHKRQEKFYIGHIRGHTGLPGPLAQGNAYADSLTRILTAAGKRTADGSEFEKRTADGSEFESPKKKAKVE

SEQ ID NO: 3171 - protein, 2116 aa, synthetic construct
MPAAKRVKLDGGDKKYSIGLDIGTNSVGWAVITDEYKVPSKKFKVLGNTDRHSIKKNLIGALLFDSGETAEATRLKRTARRRYTRRKNRICYLQEIFSNEMAKVDDSFFHRLEESFLVEEDKKHERHPIFGNIVDEVAYHEKYPTIYHLRKKLVDSTDKADLRLIYLALAHMIKFRGHFLIEGDLNPDNSDVDKLFIQLVQTYNQLFEENPINASGVDAKAILSARLSKSRRLENLIAQLPGEKKNGLFGNLIALSLGLTPNFKSNFDLAEDAKLQLSKDTYDDDLDNLLAQIGDQYADLFLAAKNLSDAILLSDILRVNTEITKAPLSASMIKRYDEHHQDLTLLKALVRQQLPEKYKEIFFDQSKNGYAGYIDGGASQEEFYKFIKPILEKMDGTEELLVKLNREDLLRKQRTFDNGSIPHQIHLGELHAILRRQEDFYPFLKDNREKIEKILTFRIPYYVGPLARGNSRFAWMTRKSEETITPWNFEEVVDKGASAQSFIERMTNFDKNLPNEKVLPKHSLLYEYFTVYNELTKVKYVTEGMRKPAFLSGEQKKAIVDLLFKTNRKVTVKQLKEDYFKKIECFDSVEISGVEDRFNASLGTYHDLLKIIKDKDFLDNEENEDILEDIVLTLTLFEDREMIEERLKTYAHLFDDKVMKQLKRRRYTGWGRLSRKLINGIRDKQSGKTILDFLKSDGFANRNFMQLIHDDSLTFKEDIQKAQVSGQGDSLHEHIANLAGSPAIKKGILQTVKVVDELVKVMGRHKPENIVIEMARENQTTQKGQKNSRERMKRIEEGIKELGSQILKEHPVENTQLQNEKLYLYYLQNGRDMYVDQELDINRLSDYDVDHIVPQSFLKDDSIDNKVLTRSDKARGKSDNVPSEEVVKKMKNYWRQLLNAKLITQRKFDNLTKAERGGLSELDKAGFIKRQLVETRQITKHVAQILDSRMNTKYDENDKLIREVKVITLKSKLVSDFRKDFQFYKVREINNYHHAHDAYLNAVVGTALIKKYPKLESEFVYGDYKVYDVRKMIAKSEQEIGKATAKYFFYSNIMNFFKTEITLANGEIRKRPLIETNGETGEIVWDKGRDFATVRKVLSMPQVNIVKKTEVQTGGFSKESILPKRNSDKLIARKKDWDPKKYGGFDSPTVAYSVLVVAKVEKGKSKKLKSVKELLGITIMERSSFEKNPIDFLEAKGYKEVKKDLIIKLPKYSLFELENGRKRMLASAGELQKGNELALPSKYVNFLYLASHYEKLKGSPEDNEQKQLFVEQHKHYLDEIIEQISEFSKRVILADANLDKVLSAYNKHRDKPIREQAENIIHLFTLTNLGAPAAFKYFDTTIDRKRYTSTKEVLDATLIHQSITGLYETRIDLSQLGGDGGEAAAKGSSGGSGGWVQEISDSRPMLHIYLNGRRFLGLLNTGADKTCIAGRDWPANWPIHQTESSLQGLGMACGVARSSQPLRWQHEDKSGIIHPFVIPTLPFTLWGRDIMKDIKVRLMTDSPDDSQDLMIGAIESNLFADQISWKSDQPVWLNQWPLKQEKLQALQQLVTEQLQLGHLEESNSPWNTPVFVIKKKSGKWRLLQDLRAVNATMHDMGALQPGLPSPVAVPKGWEIIIIDLQDCFFNIKLHPEDCKRFAFSVPSPNFKRPYQRFQWKVLPQGMKNSPTLCQKFVDKAILTVRDKYQDSYIVHYMDDILLAHPSRSIVDEILTSMIQALNKHGLVVSTEKIQKYDNLKYLGTHIQGDSVSYQKLQIRTDKLRTLNDFQKLLGNINWIRPFLKLTTGELKPLFEILNGDSNPISTRKLTPEACKALQLMNERLSTARVKRLDLSQPWSLCILKTEYTPTACLWQDGVVEWIHLPHISPKVITPYDIFCTQLIIKGRHRSKELFSKDPDYIVVPYTKVQFDLLLQEKEDWPISLLGFLGEVHFHLPKDPLLTFTLQTAIIFPHMTSTTPLEKGIVIFTDGSANGRSVTYIQGREPIIKENTQNTAQQAEIVAVITAFEEVSQPFNLYTDSKYVTGLFPEIETATLSPRTKIYTELKHLQRLIHKRQEKFYIGHIRGHTGLPGPLAQGNAYADSLTRILTAGKRTADGSEFEKRTADGSEFESPKKKAKVE

SEQ ID NO: 3172 - protein, 2135 aa, synthetic construct
MPAAKRVKLDGGDKKYSIGLDIGTNSVGWAVITDEYKVPSKKFKVLGNTDRHSIKKNLIGALLFDSGETAEATRLKRTARRRYTRRKNRICYLQEIFSNEMAKVDDSFFHRLEESFLVEEDKKHERHPIFGNIVDEVAYHEKYPTIYHLRKKLVDSTDKADLRLIYLALAHMIKFRGHFLIEGDLNPDNSDVDKLFIQLVQTYNQLFEENPINASGVDAKAILSARLSKSRRLENLIAQLPGEKKNGLFGNLIALSLGLTPNFKSNFDLAEDAKLQLSKDTYDDDLDNLLAQIGDQYADLFLAAKNLSDAILLSDILRVNTEITKAPLSASMIKRYDEHHQDLTLLKALVRQQLPEKYKEIFFDQSKNGYAGYIDGGASQEEFYKFIKPILEKMDGTEELLVKLNREDLLRKQRTFDNGSIPHQIHLGELHAILRRQEDFYPFLKDNREKIEKILTFRIPYYVGPLARGNSRFAWMTRKSEETITPWNFEEVVDKGASAQSFIERMTNFDKNLPNEKVLPKHSLLYEYFTVYNELTKVKYVTEGMRKPAFLSGEQKKAIVDLLFKTNRKVTVKQLKEDYFKKIECFDSVEISGVEDRFNASLGTYHDLLKIIKDKDFLDNEENEDILEDIVLTLTLFEDREMIEERLKTYAHLFDDKVMKQLKRRRYTGWGRLSRKLINGIRDKQSGKTILDFLKSDGFANRNFMQLIHDDSLTFKEDIQKAQVSGQGDSLHEHIANLAGSPAIKKGILQTVKVVDELVKVMGRHKPENIVIEMARENQTTQKGQKNSRERMKRIEEGIKELGSQILKEHPVENTQLQNEKLYLYYLQNGRDMYVDQELDINRLSDYDVDHIVPQSFLKDDSIDNKVLTRSDKARGKSDNVPSEEVVKKMKNYWRQLLNAKLITQRKFDNLTKAERGGLSELDKAGFIKRQLVETRQITKHVAQILDSRMNTKYDENDKLIREVKVITLKSKLVSDFRKDFQFYKVREINNYHHAHDAYLNAVVGTALIKKYPKLESEFVYGDYKVYDVRKMIAKSEQEIGKATAKYFFYSNIMNFFKTEITLANGEIRKRPLIETNGETGEIVWDKGRDFATVRKVLSMPQVNIVKKTEVQTGGFSKESILPKRNSDKLIARKKDWDPKKYGGFDSPTVAYSVLVVAKVEKGKSKKLKSVKELLGITIMERSSFEKNPIDFLEAKGYKEVKKDLIIKLPKYSLFELENGRKRMLASAGELQKGNELALPSKYVNFLYLASHYEKLKGSPEDNEQKQLFVEQHKHYLDEIIEQISEFSKRVILADANLDKVLSAYNKHRDKPIREQAENIIHLFTLTNLGAPAAFKYFDTTIDRKRYTSTKEVLDATLIHQSITGLYETRIDLSQLGGDGGEAAAKEAAAKEAAAKEAAAKEAAAKEAAAKGGWVQEISDSRPMLHIYLNGRRFLGLLNTGADKTCIAGRDWPANWPIHQTESSLQGLGMACGVARSSQPLRWQHEDKSGIIHPFVIPTLPFTLWGRDIMKDIKVRLMTDSPDDSQDLMIGAIESNLFADQISWKSDQPVWLNQWPLKQEKLQALQQLVTEQLQLGHLEESNSPWNTPVFVIKKKSGKWRLLQDLRAVNATMHDMGALQPGLPSPVAVPKGWEIIIIDLQDCFFNIKLHPEDCKRFAFSVPSPNFKRPYQRFQWKVLPQGMKNSPTLCQKFVDKAILTVRDKYQDSYIVHYMDDILLAHPSRSIVDEILTSMIQALNKHGLVVSTEKIQKYDNLKYLGTHIQGDSVSYQKLQIRTDKLRTLNDFQKLLGNINWIRPFLKLTTGELKPLFEILNGDSNPISTRKLTPEACKALQLMNERLSTARVKRLDLSQPWSLCILKTEYTPTACLWQDGVVEWIHLPHISPKVITPYDIFCTQLIIKGRHRSKELFSKDPDYIVVPYTKVQFDLLLQEKEDWPISLLGFLGEVHFHLPKDPLLTFTLQTAIIFPHMTSTTPLEKGIVIFTDGSANGRSVTYIQGREPIIKENTQNTAQQAEIVAVITAFEEVSQPFNLYTDSKYVTGLFPEIETATLSPRTKIYTELKHLQRLIHKRQEKFYIGHIRGHTGLPGPLAQGNAYADSLTRILTAGKRTADGSEFEKRTADGSEFESPKKKAKVE

SEQ ID NO: 3173 - protein, 2135 aa, synthetic construct
MPAAKRVKLDGGDKKYSIGLDIGTNSVGWAVITDEYKVPSKKFKVLGNTDRHSIKKNLIGALLFDSGETAEATRLKRTARRRYTRRKNRICYLQEIFSNEMAKVDDSFFHRLEESFLVEEDKKHERHPIFGNIVDEVAYHEKYPTIYHLRKKLVDSTDKADLRLIYLALAHMIKFRGHFLIEGDLNPDNSDVDKLFIQLVQTYNQLFEENPINASGVDAKAILSARLSKSRRLENLIAQLPGEKKNGLFGNLIALSLGLTPNFKSNFDLAEDAKLQLSKDTYDDDLDNLLAQIGDQYADLFLAAKNLSDAILLSDILRVNTEITKAPLSASMIKRYDEHHQDLTLLKALVRQQLPEKYKEIFFDQSKNGYAGYIDGGASQEEFYKFIKPILEKMDGTEELLVKLNREDLLRKQRTFDNGSIPHQIHLGELHAILRRQEDFYPFLKDNREKIEKILTFRIPYYVGPLARGNSRFAWMTRKSEETITPWNFEEVVDKGASAQSFIERMTNFDKNLPNEKVLPKHSLLYEYFTVYNELTKVKYVTEGMRKPAFLSGEQKKAIVDLLFKTNRKVTVKQLKEDYFKKIECFDSVEISGVEDRFNASLGTYHDLLKIIKDKDFLDNEENEDILEDIVLTLTLFEDREMIEERLKTYAHLFDDKVMKQLKRRRYTGWGRLSRKLINGIRDKQSGKTILDFLKSDGFANRNFMQLIHDDSLTFKEDIQKAQVSGQGDSLHEHIANLAGSPAIKKGILQTVKVVDELVKVMGRHKPENIVIEMARENQTTQKGQKNSRERMKRIEEGIKELGSQILKEHPVENTQLQNEKLYLYYLQNGRDMYVDQELDINRLSDYDVDHIVPQSFLKDDSIDNKVLTRSDKARGKSDNVPSEEVVKKMKNYWRQLLNAKLITQRKFDNLTKAERGGLSELDKAGFIKRQLVETRQITKHVAQILDSRMNTKYDENDKLIREVKVITLKSKLVSDFRKDFQFYKVREINNYHHAHDAYLNAVVGTALIKKYPKLESEFVYGDYKVYDVRKMIAKSEQEIGKATAKYFFYSNIMNFFKTEITLANGEIRKRPLIETNGETGEIVWDKGRDFATVRKVLSMPQVNIVKKTEVQTGGFSKESILPKRNSDKLIARKKDWDPKKYGGFDSPTVAYSVLVVAKVEKGKSKKLKSVKELLGITIMERSSFEKNPIDFLEAKGYKEVKKDLIIKLPKYSLFELENGRKRMLASAGELQKGNELALPSKYVNFLYLASHYEKLKGSPEDNEQKQLFVEQHKHYLDEIIEQISEFSKRVILADANLDKVLSAYNKHRDKPIREQAENIIHLFTLTNLGAPAAFKYFDTTIDRKRYTSTKEVLDATLIHQSITGLYETRIDLSQLGGDGGGGGGSGGGGSGGGGSGGGGSGGGGSGGGGSGGWVQEISDSRPMLHIYLNGRRFLGLLNTGADKTCIAGRDWPANWPIHQTESSLQGLGMACGVARSSQPLRWQHEDKSGIIHPFVIPTLPFTLWGRDIMKDIKVRLMTDSPDDSQDLMIGAIESNLFADQISWKSDQPVWLNQWPLKQEKLQALQQLVTEQLQLGHLEESNSPWNTPVFVIKKKSGKWRLLQDLRAVNATMHDMGALQPGLPSPVAVPKGWEIIIIDLQDCFFNIKLHPEDCKRFAFSVPSPNFKRPYQRFQWKVLPQGMKNSPTLCQKFVDKAILTVRDKYQDSYIVHYMDDILLAHPSRSIVDEILTSMIQALNKHGLVVSTEKIQKYDNLKYLGTHIQGDSVSYQKLQIRTDKLRTLNDFQKLLGNINWIRPFLKLTTGELKPLFEILNGDSNPISTRKLTPEACKALQLMNERLSTARVKRLDLSQPWSLCILKTEYTPTACLWQDGVVEWIHLPHISPKVITPYDIFCTQLIIKGRHRSKELFSKDPDYIVVPYTKVQFDLLLQEKEDWPISLLGFLGEVHFHLPKDPLLTFTLQTAIIFPHMTSTTPLEKGIVIFTDGSANGRSVTYIQGREPIIKENTQNTAQQAEIVAVITAFEEVSQPFNLYTDSKYVTGLFPEIETATLSPRTKIYTELKHLQRLIHKRQEKFYIGHIRGHTGLPGPLAQGNAYADSLTRILTAGKRTADGSEFEKRTADGSEFESPKKKAKVE

SEQ ID NO: 3174 - protein, 2130 aa, synthetic construct
MPAAKRVKLDGGDKKYSIGLDIGTNSVGWAVITDEYKVPSKKFKVLGNTDRHSIKKNLIGALLFDSGETAEATRLKRTARRRYTRRKNRICYLQEIFSNEMAKVDDSFFHRLEESFLVEEDKKHERHPIFGNIVDEVAYHEKYPTIYHLRKKLVDSTDKADLRLIYLALAHMIKFRGHFLIEGDLNPDNSDVDKLFIQLVQTYNQLFEENPINASGVDAKAILSARLSKSRRLENLIAQLPGEKKNGLFGNLIALSLGLTPNFKSNFDLAEDAKLQLSKDTYDDDLDNLLAQIGDQYADLFLAAKNLSDAILLSDILRVNTEITKAPLSASMIKRYDEHHQDLTLLKALVRQQLPEKYKEIFFDQSKNGYAGYIDGGASQEEFYKFIKPILEKMDGTEELLVKLNREDLLRKQRTFDNGSIPHQIHLGELHAILRRQEDFYPFLKDNREKIEKILTFRIPYYVGPLARGNSRFAWMTRKSEETITPWNFEEVVDKGASAQSFIERMTNFDKNLPNEKVLPKHSLLYEYFTVYNELTKVKYVTEGMRKPAFLSGEQKKAIVDLLFKTNRKVTVKQLKEDYFKKIECFDSVEISGVEDRFNASLGTYHDLLKIIKDKDFLDNEENEDILEDIVLTLTLFEDREMIEERLKTYAHLFDDKVMKQLKRRRYTGWGRLSRKLINGIRDKQSGKTILDFLKSDGFANRNFMQLIHDDSLTFKEDIQKAQVSGQGDSLHEHIANLAGSPAIKKGILQTVKVVDELVKVMGRHKPENIVIEMARENQTTQKGQKNSRERMKRIEEGIKELGSQILKEHPVENTQLQNEKLYLYYLQNGRDMYVDQELDINRLSDYDVDHIVPQSFLKDDSIDNKVLTRSDKARGKSDNVPSEEVVKKMKNYWRQLLNAKLITQRKFDNLTKAERGGLSELDKAGFIKRQLVETRQITKHVAQILDSRMNTKYDENDKLIREVKVITLKSKLVSDFRKDFQFYKVREINNYHHAHDAYLNAVVGTALIKKYPKLESEFVYGDYKVYDVRKMIAKSEQEIGKATAKYFFYSNIMNFFKTEITLANGEIRKRPLIETNGETGEIVWDKGRDFATVRKVLSMPQVNIVKKTEVQTGGFSKESILPKRNSDKLIARKKDWDPKKYGGFDSPTVAYSVLVVAKVEKGKSKKLKSVKELLGITIMERSSFEKNPIDFLEAKGYKEVKKDLIIKLPKYSLFELENGRKRMLASAGELQKGNELALPSKYVNFLYLASHYEKLKGSPEDNEQKQLFVEQHKHYLDEIIEQISEFSKRVILADANLDKVLSAYNKHRDKPIREQAENIIHLFTLTNLGAPAAFKYFDTTIDRKRYTSTKEVLDATLIHQSITGLYETRIDLSQLGGDGGEAAAKEAAAKEAAAKEAAAKEAAAKGGWVQEISDSRPMLHIYLNGRRFLGLLNTGADKTCIAGRDWPANWPIHQTESSLQGLGMACGVARSSQPLRWQHEDKSGIIHPFVIPTLPFTLWGRDIMKDIKVRLMTDSPDDSQDLMIGAIESNLFADQISWKSDQPVWLNQWPLKQEKLQALQQLVTEQLQLGHLEESNSPWNTPVFVIKKKSGKWRLLQDLRAVNATMHDMGALQPGLPSPVAVPKGWEIIIIDLQDCFFNIKLHPEDCKRFAFSVPSPNFKRPYQRFQWKVLPQGMKNSPTLCQKFVDKAILTVRDKYQDSYIVHYMDDILLAHPSRSIVDEILTSMIQALNKHGLVVSTEKIQKYDNLKYLGTHIQGDSVSYQKLQIRTDKLRTLNDFQKLLGNINWIRPFLKLTTGELKPLFEILNGDSNPISTRKLTPEACKALQLMNERLSTARVKRLDLSQPWSLCILKTEYTPTACLWQDGVVEWIHLPHISPKVITPYDIFCTQLIIKGRHRSKELFSKDPDYIVVPYTKVQFDLLLQEKEDWPISLLGFLGEVHFHLPKDPLLTFTLQTAIIFPHMTSTTPLEKGIVIFTDGSANGRSVTYIQGREPIIKENTQNTAQQAEIVAVITAFEEVSQPFNLYTDSKYVTGLFPEIETATLSPRTKIYTELKHLQRLIHKRQEKFYIGHIRGHTGLPGPLAQGNAYADSLTRILTAGKRTADGSEFEKRTADGSEFESPKKKAKVE

SEQ ID NO: 3175 - protein, 2116 aa, synthetic construct
MPAAKRVKLDGGDKKYSIGLDIGTNSVGWAVITDEYKVPSKKFKVLGNTDRHSIKKNLIGALLFDSGETAEATRLKRTARRRYTRRKNRICYLQEIFSNEMAKVDDSFFHRLEESFLVEEDKKHERHPIFGNIVDEVAYHEKYPTIYHLRKKLVDSTDKADLRLIYLALAHMIKFRGHFLIEGDLNPDNSDVDKLFIQLVQTYNQLFEENPINASGVDAKAILSARLSKSRRLENLIAQLPGEKKNGLFGNLIALSLGLTPNFKSNFDLAEDAKLQLSKDTYDDDLDNLLAQIGDQYADLFLAAKNLSDAILLSDILRVNTEITKAPLSASMIKRYDEHHQDLTLLKALVRQQLPEKYKEIFFDQSKNGYAGYIDGGASQEEFYKFIKPILEKMDGTEELLVKLNREDLLRKQRTFDNGSIPHQIHLGELHAILRRQEDFYPFLKDNREKIEKILTFRIPYYVGPLARGNSRFAWMTRKSEETITPWNFEEVVDKGASAQSFIERMTNFDKNLPNEKVLPKHSLLYEYFTVYNELTKVKYVTEGMRKPAFLSGEQKKAIVDLLFKTNRKVTVKQLKEDYFKKIECFDSVEISGVEDRFNASLGTYHDLLKIIKDKDFLDNEENEDILEDIVLTLTLFEDREMIEERLKTYAHLFDDKVMKQLKRRRYTGWGRLSRKLINGIRDKQSGKTILDFLKSDGFANRNFMQLIHDDSLTFKEDIQKAQVSGQGDSLHEHIANLAGSPAIKKGILQTVKVVDELVKVMGRHKPENIVIEMARENQTTQKGQKNSRERMKRIEEGIKELGSQILKEHPVENTQLQNEKLYLYYLQNGRDMYVDQELDINRLSDYDVDHIVPQSFLKDDSIDNKVLTRSDKARGKSDNVPSEEVVKKMKNYWRQLLNAKLITQRKFDNLTKAERGGLSELDKAGFIKRQLVETRQITKHVAQILDSRMNTKYDENDKLIREVKVITLKSKLVSDFRKDFQFYKVREINNYHHAHDAYLNAVVGTALIKKYPKLESEFVYGDYKVYDVRKMIAKSEQEIGKATAKYFFYSNIMNFFKTEITLANGEIRKRPLIETNGETGEIVWDKGRDFATVRKVLSMPQVNIVKKTEVQTGGFSKESILPKRNSDKLIARKKDWDPKKYGGFDSPTVAYSVLVVAKVEKGKSKKLKSVKELLGITIMERSSFEKNPIDFLEAKGYKEVKKDLIIKLPKYSLFELENGRKRMLASAGELQKGNELALPSKYVNFLYLASHYEKLKGSPEDNEQKQLFVEQHKHYLDEIIEQISEFSKRVILADANLDKVLSAYNKHRDKPIREQAENIIHLFTLTNLGAPAAFKYFDTTIDRKRYTSTKEVLDATLIHQSITGLYETRIDLSQLGGDGGPAPAPAPAPAPGGWVQEISDSRPMLHIYLNGRRFLGLLNTGADKTCIAGRDWPANWPIHQTESSLQGLGMACGVARSSQPLRWQHEDKSGIIHPFVIPTLPFTLWGRDIMKDIKVRLMTDSPDDSQDLMIGAIESNLFADQISWKSDQPVWLNQWPLKQEKLQALQQLVTEQLQLGHLEESNSPWNTPVFVIKKKSGKWRLLQDLRAVNATMHDMGALQPGLPSPVAVPKGWEIIIIDLQDCFFNIKLHPEDCKRFAFSVPSPNFKRPYQRFQWKVLPQGMKNSPTLCQKFVDKAILTVRDKYQDSYIVHYMDDILLAHPSRSIVDEILTSMIQALNKHGLVVSTEKIQKYDNLKYLGTHIQGDSVSYQKLQIRTDKLRTLNDFQKLLGNINWIRPFLKLTTGELKPLFEILNGDSNPISTRKLTPEACKALQLMNERLSTARVKRLDLSQPWSLCILKTEYTPTACLWQDGVVEWIHLPHISPKVITPYDIFCTQLIIKGRHRSKELFSKDPDYIVVPYTKVQFDLLLQEKEDWPISLLGFLGEVHFHLPKDPLLTFTLQTAIIFPHMTSTTPLEKGIVIFTDGSANGRSVTYIQGREPIIKENTQNTAQQAEIVAVITAFEEVSQPFNLYTDSKYVTGLFPEIETATLSPRTKIYTELKHLQRLIHKRQEKFYIGHIRGHTGLPGPLAQGNAYADSLTRILTAGKRTADGSEFEKRTADGSEFESPKKKAKVE

SEQ ID NO: 3176 - protein, 2114 aa, synthetic construct
MPAAKRVKLDGGDKKYSIGLDIGTNSVGWAVITDEYKVPSKKFKVLGNTDRHSIKKNLIGALLFDSGETAEATRLKRTARRRYTRRKNRICYLQEIFSNEMAKVDDSFFHRLEESFLVEEDKKHERHPIFGNIVDEVAYHEKYPTIYHLRKKLVDSTDKADLRLIYLALAHMIKFRGHFLIEGDLNPDNSDVDKLFIQLVQTYNQLFEENPINASGVDAKAILSARLSKSRRLENLIAQLPGEKKNGLFGNLIALSLGLTPNFKSNFDLAEDAKLQLSKDTYDDDLDNLLAQIGDQYADLFLAAKNLSDAILLSDILRVNTEITKAPLSASMIKRYDEHHQDLTLLKALVRQQLPEKYKEIFFDQSKNGYAGYIDGGASQEEFYKFIKPILEKMDGTEELLVKLNREDLLRKQRTFDNGSIPHQIHLGELHAILRRQEDFYPFLKDNREKIEKILTFRIPYYVGPLARGNSRFAWMTRKSEETITPWNFEEVVDKGASAQSFIERMTNFDKNLPNEKVLPKHSLLYEYFTVYNELTKVKYVTEGMRKPAFLSGEQKKAIVDLLFKTNRKVTVKQLKEDYFKKIECFDSVEISGVEDRFNASLGTYHDLLKIIKDKDFLDNEENEDILEDIVLTLTLFEDREMIEERLKTYAHLFDDKVMKQLKRRRYTGWGRLSRKLINGIRDKQSGKTILDFLKSDGFANRNFMQLIHDDSLTFKEDIQKAQVSGQGDSLHEHIANLAGSPAIKKGILQTVKVVDELVKVMGRHKPENIVIEMARENQTTQKGQKNSRERMKRIEEGIKELGSQILKEHPVENTQLQNEKLYLYYLQNGRDMYVDQELDINRLSDYDVDHIVPQSFLKDDSIDNKVLTRSDKARGKSDNVPSEEVVKKMKNYWRQLLNAKLITQRKFDNLTKAERGGLSELDKAGFIKRQLVETRQITKHVAQILDSRMNTKYDENDKLIREVKVITLKSKLVSDFRKDFQFYKVREINNYHHAHDAYLNAVVGTALIKKYPKLESEFVYGDYKVYDVRKMIAKSEQEIGKATAKYFFYSNIMNFFKTEITLANGEIRKRPLIETNGETGEIVWDKGRDFATVRKVLSMPQVNIVKKTEVQTGGFSKESILPKRNSDKLIARKKDWDPKKYGGFDSPTVAYSVLVVAKVEKGKSKKLKSVKELLGITIMERSSFEKNPIDFLEAKGYKEVKKDLIIKLPKYSLFELENGRKRMLASAGELQKGNELALPSKYVNFLYLASHYEKLKGSPEDNEQKQLFVEQHKHYLDEIIEQISEFSKRVILADANLDKVLSAYNKHRDKPIREQAENIIHLFTLTNLGAPAAFKYFDTTIDRKRYTSTKEVLDATLIHQSITGLYETRIDLSQLGGDGGPAPGSSGGSGGWVQEISDSRPMLHIYLNGRRFLGLLNTGADKTCIAGRDWPANWPIHQTESSLQGLGMACGVARSSQPLRWQHEDKSGIIHPFVIPTLPFTLWGRDIMKDIKVRLMTDSPDDSQDLMIGAIESNLFADQISWKSDQPVWLNQWPLKQEKLQALQQLVTEQLQLGHLEESNSPWNTPVFVIKKKSGKWRLLQDLRAVNATMHDMGALQPGLPSPVAVPKGWEIIIIDLQDCFFNIKLHPEDCKRFAFSVPSPNFKRPYQRFQWKVLPQGMKNSPTLCQKFVDKAILTVRDKYQDSYIVHYMDDILLAHPSRSIVDEILTSMIQALNKHGLVVSTEKIQKYDNLKYLGTHIQGDSVSYQKLQIRTDKLRTLNDFQKLLGNINWIRPFLKLTTGELKPLFEILNGDSNPISTRKLTPEACKALQLMNERLSTARVKRLDLSQPWSLCILKTEYTPTACLWQDGVVEWIHLPHISPKVITPYDIFCTQLIIKGRHRSKELFSKDPDYIVVPYTKVQFDLLLQEKEDWPISLLGFLGEVHFHLPKDPLLTFTLQTAIIFPHMTSTTPLEKGIVIFTDGSANGRSVTYIQGREPIIKENTQNTAQQAEIVAVITAFEEVSQPFNLYTDSKYVTGLFPEIETATLSPRTKIYTELKHLQRLIHKRQEKFYIGHIRGHTGLPGPLAQGNAYADSLTRILTAGKRTADGSEFEKRTADGSEFESPKKKAKVE

SEQ ID NO: 3177 - protein, 2113 aa, synthetic construct
MPAAKRVKLDGGDKKYSIGLDIGTNSVGWAVITDEYKVPSKKFKVLGNTDRHSIKKNLIGALLFDSGETAEATRLKRTARRRYTRRKNRICYLQEIFSNEMAKVDDSFFHRLEESFLVEEDKKHERHPIFGNIVDEVAYHEKYPTIYHLRKKLVDSTDKADLRLIYLALAHMIKFRGHFLIEGDLNPDNSDVDKLFIQLVQTYNQLFEENPINASGVDAKAILSARLSKSRRLENLIAQLPGEKKNGLFGNLIALSLGLTPNFKSNFDLAEDAKLQLSKDTYDDDLDNLLAQIGDQYADLFLAAKNLSDAILLSDILRVNTEITKAPLSASMIKRYDEHHQDLTLLKALVRQQLPEKYKEIFFDQSKNGYAGYIDGGASQEEFYKFIKPILEKMDGTEELLVKLNREDLLRKQRTFDNGSIPHQIHLGELHAILRRQEDFYPFLKDNREKIEKILTFRIPYYVGPLARGNSRFAWMTRKSEETITPWNFEEVVDKGASAQSFIERMTNFDKNLPNEKVLPKHSLLYEYFTVYNELTKVKYVTEGMRKPAFLSGEQKKAIVDLLFKTNRKVTVKQLKEDYFKKIECFDSVEISGVEDRFNASLGTYHDLLKIIKDKDFLDNEENEDILEDIVLTLTLFEDREMIEERLKTYAHLFDDKVMKQLKRRRYTGWGRLSRKLINGIRDKQSGKTILDFLKSDGFANRNFMQLIHDDSLTFKEDIQKAQVSGQGDSLHEHIANLAGSPAIKKGILQTVKVVDELVKVMGRHKPENIVIEMARENQTTQKGQKNSRERMKRIEEGIKELGSQILKEHPVENTQLQNEKLYLYYLQNGRDMYVDQELDINRLSDYDVDHIVPQSFLKDDSIDNKVLTRSDKARGKSDNVPSEEVVKKMKNYWRQLLNAKLITQRKFDNLTKAERGGLSELDKAGFIKRQLVETRQITKHVAQILDSRMNTKYDENDKLIREVKVITLKSKLVSDFRKDFQFYKVREINNYHHAHDAYLNAVVGTALIKKYPKLESEFVYGDYKVYDVRKMIAKSEQEIGKATAKYFFYSNIMNFFKTEITLANGEIRKRPLIETNGETGEIVWDKGRDFATVRKVLSMPQVNIVKKTEVQTGGFSKESILPKRNSDKLIARKKDWDPKKYGGFDSPTVAYSVLVVAKVEKGKSKKLKSVKELLGITIMERSSFEKNPIDFLEAKGYKEVKKDLIIKLPKYSLFELENGRKRMLASAGELQKGNELALPSKYVNFLYLASHYEKLKGSPEDNEQKQLFVEQHKHYLDEIIEQISEFSKRVILADANLDKVLSAYNKHRDKPIREQAENIIHLFTLTNLGAPAAFKYFDTTIDRKRYTSTKEVLDATLIHQSITGLYETRIDLSQLGGDGGGGGEAAAKGGWVQEISDSRPMLHIYLNGRRFLGLLNTGADKTCIAGRDWPANWPIHQTESSLQGLGMACGVARSSQPLRWQHEDKSGIIHPFVIPTLPFTLWGRDIMKDIKVRLMTDSPDDSQDLMIGAIESNLFADQISWKSDQPVWLNQWPLKQEKLQALQQLVTEQLQLGHLEESNSPWNTPVFVIKKKSGKWRLLQDLRAVNATMHDMGALQPGLPSPVAVPKGWEIIIIDLQDCFFNIKLHPEDCKRFAFSVPSPNFKRPYQRFQWKVLPQGMKNSPTLCQKFVDKAILTVRDKYQDSYIVHYMDDILLAHPSRSIVDEILTSMIQALNKHGLVVSTEKIQKYDNLKYLGTHIQGDSVSYQKLQIRTDKLRTLNDFQKLLGNINWIRPFLKLTTGELKPLFEILNGDSNPISTRKLTPEACKALQLMNERLSTARVKRLDLSQPWSLCILKTEYTPTACLWQDGVVEWIHLPHISPKVITPYDIFCTQLIIKGRHRSKELFSKDPDYIVVPYTKVQFDLLLQEKEDWPISLLGFLGEVHFHLPKDPLLTFTLQTAIIFPHMTSTTPLEKGIVIFTDGSANGRSVTYIQGREPIIKENTQNTAQQAEIVAVITAFEEVSQPFNLYTDSKYVTGLFPEIETATLSPRTKIYTELKHLQRLIHKRQEKFYIGHIRGHTGLPGPLAQGNAYADSLTRILTAGKRTADGSEFEKRTADGSEFESPKKKAKVE

SEQ ID NO: 3178 - protein, 2116 aa, synthetic construct
MPAAKRVKLDGGDKKYSIGLDIGTNSVGWAVITDEYKVPSKKFKVLGNTDRHSIKKNLIGALLFDSGETAEATRLKRTARRRYTRRKNRICYLQEIFSNEMAKVDDSFFHRLEESFLVEEDKKHERHPIFGNIVDEVAYHEKYPTIYHLRKKLVDSTDKADLRLIYLALAHMIKFRGHFLIEGDLNPDNSDVDKLFIQLVQTYNQLFEENPINASGVDAKAILSARLSKSRRLENLIAQLPGEKKNGLFGNLIALSLGLTPNFKSNFDLAEDAKLQLSKDTYDDDLDNLLAQIGDQYADLFLAAKNLSDAILLSDILRVNTEITKAPLSASMIKRYDEHHQDLTLLKALVRQQLPEKYKEIFFDQSKNGYAGYIDGGASQEEFYKFIKPILEKMDGTEELLVKLNREDLLRKQRTFDNGSIPHQIHLGELHAILRRQEDFYPFLKDNREKIEKILTFRIPYYVGPLARGNSRFAWMTRKSEETITPWNFEEVVDKGASAQSFIERMTNFDKNLPNEKVLPKHSLLYEYFTVYNELTKVKYVTEGMRKPAFLSGEQKKAIVDLLFKTNRKVTVKQLKEDYFKKIECFDSVEISGVEDRFNASLGTYHDLLKIIKDKDFLDNEENEDILEDIVLTLTLFEDREMIEERLKTYAHLFDDKVMKQLKRRRYTGWGRLSRKLINGIRDKQSGKTILDFLKSDGFANRNFMQLIHDDSLTFKEDIQKAQVSGQGDSLHEHIANLAGSPAIKKGILQTVKVVDELVKVMGRHKPENIVIEMARENQTTQKGQKNSRERMKRIEEGIKELGSQILKEHPVENTQLQNEKLYLYYLQNGRDMYVDQELDINRLSDYDVDHIVPQSFLKDDSIDNKVLTRSDKARGKSDNVPSEEVVKKMKNYWRQLLNAKLITQRKFDNLTKAERGGLSELDKAGFIKRQLVETRQITKHVAQILDSRMNTKYDENDKLIREVKVITLKSKLVSDFRKDFQFYKVREINNYHHAHDAYLNAVVGTALIKKYPKLESEFVYGDYKVYDVRKMIAKSEQEIGKATAKYFFYSNIMNFFKTEITLANGEIRKRPLIETNGETGEIVWDKGRDFATVRKVLSMPQVNIVKKTEVQTGGFSKESILPKRNSDKLIARKKDWDPKKYGGFDSPTVAYSVLVVAKVEKGKSKKLKSVKELLGITIMERSSFEKNPIDFLEAKGYKEVKKDLIIKLPKYSLFELENGRKRMLASAGELQKGNELALPSKYVNFLYLASHYEKLKGSPEDNEQKQLFVEQHKHYLDEIIEQISEFSKRVILADANLDKVLSAYNKHRDKPIREQAENIIHLFTLTNLGAPAAFKYFDTTIDRKRYTSTKEVLDATLIHQSITGLYETRIDLSQLGGDGGGGSPAPEAAAKGGWVQEISDSRPMLHIYLNGRRFLGLLNTGADKTCIAGRDWPANWPIHQTESSLQGLGMACGVARSSQPLRWQHEDKSGIIHPFVIPTLPFTLWGRDIMKDIKVRLMTDSPDDSQDLMIGAIESNLFADQISWKSDQPVWLNQWPLKQEKLQALQQLVTEQLQLGHLEESNSPWNTPVFVIKKKSGKWRLLQDLRAVNATMHDMGALQPGLPSPVAVPKGWEIIIIDLQDCFFNIKLHPEDCKRFAFSVPSPNFKRPYQRFQWKVLPQGMKNSPTLCQKFVDKAILTVRDKYQDSYIVHYMDDILLAHPSRSIVDEILTSMIQALNKHGLVVSTEKIQKYDNLKYLGTHIQGDSVSYQKLQIRTDKLRTLNDFQKLLGNINWIRPFLKLTTGELKPLFEILNGDSNPISTRKLTPEACKALQLMNERLSTARVKRLDLSQPWSLCILKTEYTPTACLWQDGVVEWIHLPHISPKVITPYDIFCTQLIIKGRHRSKELFSKDPDYIVVPYTKVQFDLLLQEKEDWPISLLGFLGEVHFHLPKDPLLTFTLQTAIIFPHMTSTTPLEKGIVIFTDGSANGRSVTYIQGREPIIKENTQNTAQQAEIVAVITAFEEVSQPFNLYTDSKYVTGLFPEIETATLSPRTKIYTELKHLQRLIHKRQEKFYIGHIRGHTGLPGPLAQGNAYADSLTRILTAGKRTADGSEFEKRTADGSEFESPKKKAKVE

SEQ ID NO: 3179 - protein, 2114 aa, synthetic construct
MPAAKRVKLDGGDKKYSIGLDIGTNSVGWAVITDEYKVPSKKFKVLGNTDRHSIKKNLIGALLFDSGETAEATRLKRTARRRYTRRKNRICYLQEIFSNEMAKVDDSFFHRLEESFLVEEDKKHERHPIFGNIVDEVAYHEKYPTIYHLRKKLVDSTDKADLRLIYLALAHMIKFRGHFLIEGDLNPDNSDVDKLFIQLVQTYNQLFEENPINASGVDAKAILSARLSKSRRLENLIAQLPGEKKNGLFGNLIALSLGLTPNFKSNFDLAEDAKLQLSKDTYDDDLDNLLAQIGDQYADLFLAAKNLSDAILLSDILRVNTEITKAPLSASMIKRYDEHHQDLTLLKALVRQQLPEKYKEIFFDQSKNGYAGYIDGGASQEEFYKFIKPILEKMDGTEELLVKLNREDLLRKQRTFDNGSIPHQIHLGELHAILRRQEDFYPFLKDNREKIEKILTFRIPYYVGPLARGNSRFAWMTRKSEETITPWNFEEVVDKGASAQSFIERMTNFDKNLPNEKVLPKHSLLYEYFTVYNELTKVKYVTEGMRKPAFLSGEQKKAIVDLLFKTNRKVTVKQLKEDYFKKIECFDSVEISGVEDRFNASLGTYHDLLKIIKDKDFLDNEENEDILEDIVLTLTLFEDREMIEERLKTYAHLFDDKVMKQLKRRRYTGWGRLSRKLINGIRDKQSGKTILDFLKSDGFANRNFMQLIHDDSLTFKEDIQKAQVSGQGDSLHEHIANLAGSPAIKKGILQTVKVVDELVKVMGRHKPENIVIEMARENQTTQKGQKNSRERMKRIEEGIKELGSQILKEHPVENTQLQNEKLYLYYLQNGRDMYVDQELDINRLSDYDVDHIVPQSFLKDDSIDNKVLTRSDKARGKSDNVPSEEVVKKMKNYWRQLLNAKLITQRKFDNLTKAERGGLSELDKAGFIKRQLVETRQITKHVAQILDSRMNTKYDENDKLIREVKVITLKSKLVSDFRKDFQFYKVREINNYHHAHDAYLNAVVGTALIKKYPKLESEFVYGDYKVYDVRKMIAKSEQEIGKATAKYFFYSNIMNFFKTEITLANGEIRKRPLIETNGETGEIVWDKGRDFATVRKVLSMPQVNIVKKTEVQTGGFSKESILPKRNSDKLIARKKDWDPKKYGGFDSPTVAYSVLVVAKVEKGKSKKLKSVKELLGITIMERSSFEKNPIDFLEAKGYKEVKKDLIIKLPKYSLFELENGRKRMLASAGELQKGNELALPSKYVNFLYLASHYEKLKGSPEDNEQKQLFVEQHKHYLDEIIEQISEFSKRVILADANLDKVLSAYNKHRDKPIREQAENIIHLFTLTNLGAPAAFKYFDTTIDRKRYTSTKEVLDATLIHQSITGLYETRIDLSQLGGDGGGGSGSSGGGGGWVQEISDSRPMLHIYLNGRRFLGLLNTGADKTCIAGRDWPANWPIHQTESSLQGLGMACGVARSSQPLRWQHEDKSGIIHPFVIPTLPFTLWGRDIMKDIKVRLMTDSPDDSQDLMIGAIESNLFADQISWKSDQPVWLNQWPLKQEKLQALQQLVTEQLQLGHLEESNSPWNTPVFVIKKKSGKWRLLQDLRAVNATMHDMGALQPGLPSPVAVPKGWEIIIIDLQDCFFNIKLHPEDCKRFAFSVPSPNFKRPYQRFQWKVLPQGMKNSPTLCQKFVDKAILTVRDKYQDSYIVHYMDDILLAHPSRSIVDEILTSMIQALNKHGLVVSTEKIQKYDNLKYLGTHIQGDSVSYQKLQIRTDKLRTLNDFQKLLGNINWIRPFLKLTTGELKPLFEILNGDSNPISTRKLTPEACKALQLMNERLSTARVKRLDLSQPWSLCILKTEYTPTACLWQDGVVEWIHLPHISPKVITPYDIFCTQLIIKGRHRSKELFSKDPDYIVVPYTKVQFDLLLQEKEDWPISLLGFLGEVHFHLPKDPLLTFTLQTAIIFPHMTSTTPLEKGIVIFTDGSANGRSVTYIQGREPIIKENTQNTAQQAEIVAVITAFEEVSQPFNLYTDSKYVTGLFPEIETATLSPRTKIYTELKHLQRLIHKRQEKFYIGHIRGHTGLPGPLAQGNAYADSLTRILTAGKRTADGSEFEKRTADGSEFESPKKKAKVE

SEQ ID NO: 3180 - protein, 2114 aa, synthetic construct
MPAAKRVKLDGGDKKYSIGLDIGTNSVGWAVITDEYKVPSKKFKVLGNTDRHSIKKNLIGALLFDSGETAEATRLKRTARRRYTRRKNRICYLQEIFSNEMAKVDDSFFHRLEESFLVEEDKKHERHPIFGNIVDEVAYHEKYPTIYHLRKKLVDSTDKADLRLIYLALAHMIKFRGHFLIEGDLNPDNSDVDKLFIQLVQTYNQLFEENPINASGVDAKAILSARLSKSRRLENLIAQLPGEKKNGLFGNLIALSLGLTPNFKSNFDLAEDAKLQLSKDTYDDDLDNLLAQIGDQYADLFLAAKNLSDAILLSDILRVNTEITKAPLSASMIKRYDEHHQDLTLLKALVRQQLPEKYKEIFFDQSKNGYAGYIDGGASQEEFYKFIKPILEKMDGTEELLVKLNREDLLRKQRTFDNGSIPHQIHLGELHAILRRQEDFYPFLKDNREKIEKILTFRIPYYVGPLARGNSRFAWMTRKSEETITPWNFEEVVDKGASAQSFIERMTNFDKNLPNEKVLPKHSLLYEYFTVYNELTKVKYVTEGMRKPAFLSGEQKKAIVDLLFKTNRKVTVKQLKEDYFKKIECFDSVEISGVEDRFNASLGTYHDLLKIIKDKDFLDNEENEDILEDIVLTLTLFEDREMIEERLKTYAHLFDDKVMKQLKRRRYTGWGRLSRKLINGIRDKQSGKTILDFLKSDGFANRNFMQLIHDDSLTFKEDIQKAQVSGQGDSLHEHIANLAGSPAIKKGILQTVKVVDELVKVMGRHKPENIVIEMARENQTTQKGQKNSRERMKRIEEGIKELGSQILKEHPVENTQLQNEKLYLYYLQNGRDMYVDQELDINRLSDYDVDHIVPQSFLKDDSIDNKVLTRSDKARGKSDNVPSEEVVKKMKNYWRQLLNAKLITQRKFDNLTKAERGGLSELDKAGFIKRQLVETRQITKHVAQILDSRMNTKYDENDKLIREVKVITLKSKLVSDFRKDFQFYKVREINNYHHAHDAYLNAVVGTALIKKYPKLESEFVYGDYKVYDVRKMIAKSEQEIGKATAKYFFYSNIMNFFKTEITLANGEIRKRPLIETNGETGEIVWDKGRDFATVRKVLSMPQVNIVKKTEVQTGGFSKESILPKRNSDKLIARKKDWDPKKYGGFDSPTVAYSVLVVAKVEKGKSKKLKSVKELLGITIMERSSFEKNPIDFLEAKGYKEVKKDLIIKLPKYSLFELENGRKRMLASAGELQKGNELALPSKYVNFLYLASHYEKLKGSPEDNEQKQLFVEQHKHYLDEIIEQISEFSKRVILADANLDKVLSAYNKHRDKPIREQAENIIHLFTLTNLGAPAAFKYFDTTIDRKRYTSTKEVLDATLIHQSITGLYETRIDLSQLGGDGGPAPAPAPAPGGWVQEISDSRPMLHIYLNGRRFLGLLNTGADKTCIAGRDWPANWPIHQTESSLQGLGMACGVARSSQPLRWQHEDKSGIIHPFVIPTLPFTLWGRDIMKDIKVRLMTDSPDDSQDLMIGAIESNLFADQISWKSDQPVWLNQWPLKQEKLQALQQLVTEQLQLGHLEESNSPWNTPVFVIKKKSGKWRLLQDLRAVNATMHDMGALQPGLPSPVAVPKGWEIIIIDLQDCFFNIKLHPEDCKRFAFSVPSPNFKRPYQRFQWKVLPQGMKNSPTLCQKFVDKAILTVRDKYQDSYIVHYMDDILLAHPSRSIVDEILTSMIQALNKHGLVVSTEKIQKYDNLKYLGTHIQGDSVSYQKLQIRTDKLRTLNDFQKLLGNINWIRPFLKLTTGELKPLFEILNGDSNPISTRKLTPEACKALQLMNERLSTARVKRLDLSQPWSLCILKTEYTPTACLWQDGVVEWIHLPHISPKVITPYDIFCTQLIIKGRHRSKELFSKDPDYIVVPYTKVQFDLLLQEKEDWPISLLGFLGEVHFHLPKDPLLTFTLQTAIIFPHMTSTTPLEKGIVIFTDGSANGRSVTYIQGREPIIKENTQNTAQQAEIVAVITAFEEVSQPFNLYTDSKYVTGLFPEIETATLSPRTKIYTELKHLQRLIHKRQEKFYIGHIRGHTGLPGPLAQGNAYADSLTRILTAGKRTADGSEFEKRTADGSEFESPKKKAKVE

SEQ ID NO: 3181 - protein, 2116 aa, synthetic construct
MPAAKRVKLDGGDKKYSIGLDIGTNSVGWAVITDEYKVPSKKFKVLGNTDRHSIKKNLIGALLFDSGETAEATRLKRTARRRYTRRKNRICYLQEIFSNEMAKVDDSFFHRLEESFLVEEDKKHERHPIFGNIVDEVAYHEKYPTIYHLRKKLVDSTDKADLRLIYLALAHMIKFRGHFLIEGDLNPDNSDVDKLFIQLVQTYNQLFEENPINASGVDAKAILSARLSKSRRLENLIAQLPGEKKNGLFGNLIALSLGLTPNFKSNFDLAEDAKLQLSKDTYDDDLDNLLAQIGDQYADLFLAAKNLSDAILLSDILRVNTEITKAPLSASMIKRYDEHHQDLTLLKALVRQQLPEKYKEIFFDQSKNGYAGYIDGGASQEEFYKFIKPILEKMDGTEELLVKLNREDLLRKQRTFDNGSIPHQIHLGELHAILRRQEDFYPFLKDNREKIEKILTFRIPYYVGPLARGNSRFAWMTRKSEETITPWNFEEVVDKGASAQSFIERMTNFDKNLPNEKVLPKHSLLYEYFTVYNELTKVKYVTEGMRKPAFLSGEQKKAIVDLLFKTNRKVTVKQLKEDYFKKIECFDSVEISGVEDRFNASLGTYHDLLKIIKDKDFLDNEENEDILEDIVLTLTLFEDREMIEERLKTYAHLFDDKVMKQLKRRRYTGWGRLSRKLINGIRDKQSGKTILDFLKSDGFANRNFMQLIHDDSLTFKEDIQKAQVSGQGDSLHEHIANLAGSPAIKKGILQTVKVVDELVKVMGRHKPENIVIEMARENQTTQKGQKNSRERMKRIEEGIKELGSQILKEHPVENTQLQNEKLYLYYLQNGRDMYVDQELDINRLSDYDVDHIVPQSFLKDDSIDNKVLTRSDKARGKSDNVPSEEVVKKMKNYWRQLLNAKLITQRKFDNLTKAERGGLSELDKAGFIKRQLVETRQITKHVAQILDSRMNTKYDENDKLIREVKVITLKSKLVSDFRKDFQFYKVREINNYHHAHDAYLNAVVGTALIKKYPKLESEFVYGDYKVYDVRKMIAKSEQEIGKATAKYFFYSNIMNFFKTEITLANGEIRKRPLIETNGETGEIVWDKGRDFATVRKVLSMPQVNIVKKTEVQTGGFSKESILPKRNSDKLIARKKDWDPKKYGGFDSPTVAYSVLVVAKVEKGKSKKLKSVKELLGITIMERSSFEKNPIDFLEAKGYKEVKKDLIIKLPKYSLFELENGRKRMLASAGELQKGNELALPSKYVNFLYLASHYEKLKGSPEDNEQKQLFVEQHKHYLDEIIEQISEFSKRVILADANLDKVLSAYNKHRDKPIREQAENIIHLFTLTNLGAPAAFKYFDTTIDRKRYTSTKEVLDATLIHQSITGLYETRIDLSQLGGDGGGSSGGGEAAAKGGWVQEISDSRPMLHIYLNGRRFLGLLNTGADKTCIAGRDWPANWPIHQTESSLQGLGMACGVARSSQPLRWQHEDKSGIIHPFVIPTLPFTLWGRDIMKDIKVRLMTDSPDDSQDLMIGAIESNLFADQISWKSDQPVWLNQWPLKQEKLQALQQLVTEQLQLGHLEESNSPWNTPVFVIKKKSGKWRLLQDLRAVNATMHDMGALQPGLPSPVAVPKGWEIIIIDLQDCFFNIKLHPEDCKRFAFSVPSPNFKRPYQRFQWKVLPQGMKNSPTLCQKFVDKAILTVRDKYQDSYIVHYMDDILLAHPSRSIVDEILTSMIQALNKHGLVVSTEKIQKYDNLKYLGTHIQGDSVSYQKLQIRTDKLRTLNDFQKLLGNINWIRPFLKLTTGELKPLFEILNGDSNPISTRKLTPEACKALQLMNERLSTARVKRLDLSQPWSLCILKTEYTPTACLWQDGVVEWIHLPHISPKVITPYDIFCTQLIIKGRHRSKELFSKDPDYIVVPYTKVQFDLLLQEKEDWPISLLGFLGEVHFHLPKDPLLTFTLQTAIIFPHMTSTTPLEKGIVIFTDGSANGRSVTYIQGREPIIKENTQNTAQQAEIVAVITAFEEVSQPFNLYTDSKYVTGLFPEIETATLSPRTKIYTELKHLQRLIHKRQEKFYIGHIRGHTGLPGPLAQGNAYADSLTRILTAGKRTADGSEFEKRTADGSEFESPKKKAKVE

SEQ ID NO: 3182 - protein, 2116 aa, synthetic construct
MPAAKRVKLDGGDKKYSIGLDIGTNSVGWAVITDEYKVPSKKFKVLGNTDRHSIKKNLIGALLFDSGETAEATRLKRTARRRYTRRKNRICYLQEIFSNEMAKVDDSFFHRLEESFLVEEDKKHERHPIFGNIVDEVAYHEKYPTIYHLRKKLVDSTDKADLRLIYLALAHMIKFRGHFLIEGDLNPDNSDVDKLFIQLVQTYNQLFEENPINASGVDAKAILSARLSKSRRLENLIAQLPGEKKNGLFGNLIALSLGLTPNFKSNFDLAEDAKLQLSKDTYDDDLDNLLAQIGDQYADLFLAAKNLSDAILLSDILRVNTEITKAPLSASMIKRYDEHHQDLTLLKALVRQQLPEKYKEIFFDQSKNGYAGYIDGGASQEEFYKFIKPILEKMDGTEELLVKLNREDLLRKQRTFDNGSIPHQIHLGELHAILRRQEDFYPFLKDNREKIEKILTFRIPYYVGPLARGNSRFAWMTRKSEETITPWNFEEVVDKGASAQSFIERMTNFDKNLPNEKVLPKHSLLYEYFTVYNELTKVKYVTEGMRKPAFLSGEQKKAIVDLLFKTNRKVTVKQLKEDYFKKIECFDSVEISGVEDRFNASLGTYHDLLKIIKDKDFLDNEENEDILEDIVLTLTLFEDREMIEERLKTYAHLFDDKVMKQLKRRRYTGWGRLSRKLINGIRDKQSGKTILDFLKSDGFANRNFMQLIHDDSLTFKEDIQKAQVSGQGDSLHEHIANLAGSPAIKKGILQTVKVVDELVKVMGRHKPENIVIEMARENQTTQKGQKNSRERMKRIEEGIKELGSQILKEHPVENTQLQNEKLYLYYLQNGRDMYVDQELDINRLSDYDVDHIVPQSFLKDDSIDNKVLTRSDKARGKSDNVPSEEVVKKMKNYWRQLLNAKLITQRKFDNLTKAERGGLSELDKAGFIKRQLVETRQITKHVAQILDSRMNTKYDENDKLIREVKVITLKSKLVSDFRKDFQFYKVREINNYHHAHDAYLNAVVGTALIKKYPKLESEFVYGDYKVYDVRKMIAKSEQEIGKATAKYFFYSNIMNFFKTEITLANGEIRKRPLIETNGETGEIVWDKGRDFATVRKVLSMPQVNIVKKTEVQTGGFSKESILPKRNSDKLIARKKDWDPKKYGGFDSPTVAYSVLVVAKVEKGKSKKLKSVKELLGITIMERSSFEKNPIDFLEAKGYKEVKKDLIIKLPKYSLFELENGRKRMLASAGELQKGNELALPSKYVNFLYLASHYEKLKGSPEDNEQKQLFVEQHKHYLDEIIEQISEFSKRVILADANLDKVLSAYNKHRDKPIREQAENIIHLFTLTNLGAPAAFKYFDTTIDRKRYTSTKEVLDATLIHQSITGLYETRIDLSQLGGDGGGSSEAAAKPAPGGWVQEISDSRPMLHIYLNGRRFLGLLNTGADKTCIAGRDWPANWPIHQTESSLQGLGMACGVARSSQPLRWQHEDKSGIIHPFVIPTLPFTLWGRDIMKDIKVRLMTDSPDDSQDLMIGAIESNLFADQISWKSDQPVWLNQWPLKQEKLQALQQLVTEQLQLGHLEESNSPWNTPVFVIKKKSGKWRLLQDLRAVNATMHDMGALQPGLPSPVAVPKGWEIIIIDLQDCFFNIKLHPEDCKRFAFSVPSPNFKRPYQRFQWKVLPQGMKNSPTLCQKFVDKAILTVRDKYQDSYIVHYMDDILLAHPSRSIVDEILTSMIQALNKHGLVVSTEKIQKYDNLKYLGTHIQGDSVSYQKLQIRTDKLRTLNDFQKLLGNINWIRPFLKLTTGELKPLFEILNGDSNPISTRKLTPEACKALQLMNERLSTARVKRLDLSQPWSLCILKTEYTPTACLWQDGVVEWIHLPHISPKVITPYDIFCTQLIIKGRHRSKELFSKDPDYIVVPYTKVQFDLLLQEKEDWPISLLGFLGEVHFHLPKDPLLTFTLQTAIIFPHMTSTTPLEKGIVIFTDGSANGRSVTYIQGREPIIKENTQNTAQQAEIVAVITAFEEVSQPFNLYTDSKYVTGLFPEIETATLSPRTKIYTELKHLQRLIHKRQEKFYIGHIRGHTGLPGPLAQGNAYADSLTRILTAGKRTADGSEFEKRTADGSEFESPKKKAKVE

SEQ ID NO: 3183 - protein, 2111 aa, synthetic construct
MPAAKRVKLDGGDKKYSIGLDIGTNSVGWAVITDEYKVPSKKFKVLGNTDRHSIKKNLIGALLFDSGETAEATRLKRTARRRYTRRKNRICYLQEIFSNEMAKVDDSFFHRLEESFLVEEDKKHERHPIFGNIVDEVAYHEKYPTIYHLRKKLVDSTDKADLRLIYLALAHMIKFRGHFLIEGDLNPDNSDVDKLFIQLVQTYNQLFEENPINASGVDAKAILSARLSKSRRLENLIAQLPGEKKNGLFGNLIALSLGLTPNFKSNFDLAEDAKLQLSKDTYDDDLDNLLAQIGDQYADLFLAAKNLSDAILLSDILRVNTEITKAPLSASMIKRYDEHHQDLTLLKALVRQQLPEKYKEIFFDQSKNGYAGYIDGGASQEEFYKFIKPILEKMDGTEELLVKLNREDLLRKQRTFDNGSIPHQIHLGELHAILRRQEDFYPFLKDNREKIEKILTFRIPYYVGPLARGNSRFAWMTRKSEETITPWNFEEVVDKGASAQSFIERMTNFDKNLPNEKVLPKHSLLYEYFTVYNELTKVKYVTEGMRKPAFLSGEQKKAIVDLLFKTNRKVTVKQLKEDYFKKIECFDSVEISGVEDRFNASLGTYHDLLKIIKDKDFLDNEENEDILEDIVLTLTLFEDREMIEERLKTYAHLFDDKVMKQLKRRRYTGWGRLSRKLINGIRDKQSGKTILDFLKSDGFANRNFMQLIHDDSLTFKEDIQKAQVSGQGDSLHEHIANLAGSPAIKKGILQTVKVVDELVKVMGRHKPENIVIEMARENQTTQKGQKNSRERMKRIEEGIKELGSQILKEHPVENTQLQNEKLYLYYLQNGRDMYVDQELDINRLSDYDVDHIVPQSFLKDDSIDNKVLTRSDKARGKSDNVPSEEVVKKMKNYWRQLLNAKLITQRKFDNLTKAERGGLSELDKAGFIKRQLVETRQITKHVAQILDSRMNTKYDENDKLIREVKVITLKSKLVSDFRKDFQFYKVREINNYHHAHDAYLNAVVGTALIKKYPKLESEFVYGDYKVYDVRKMIAKSEQEIGKATAKYFFYSNIMNFFKTEITLANGEIRKRPLIETNGETGEIVWDKGRDFATVRKVLSMPQVNIVKKTEVQTGGFSKESILPKRNSDKLIARKKDWDPKKYGGFDSPTVAYSVLVVAKVEKGKSKKLKSVKELLGITIMERSSFEKNPIDFLEAKGYKEVKKDLIIKLPKYSLFELENGRKRMLASAGELQKGNELALPSKYVNFLYLASHYEKLKGSPEDNEQKQLFVEQHKHYLDEIIEQISEFSKRVILADANLDKVLSAYNKHRDKPIREQAENIIHLFTLTNLGAPAAFKYFDTTIDRKRYTSTKEVLDATLIHQSITGLYETRIDLSQLGGDGGGGSGSSGGWVQEISDSRPMLHIYLNGRRFLGLLNTGADKTCIAGRDWPANWPIHQTESSLQGLGMACGVARSSQPLRWQHEDKSGIIHPFVIPTLPFTLWGRDIMKDIKVRLMTDSPDDSQDLMIGAIESNLFADQISWKSDQPVWLNQWPLKQEKLQALQQLVTEQLQLGHLEESNSPWNTPVFVIKKKSGKWRLLQDLRAVNATMHDMGALQPGLPSPVAVPKGWEIIIIDLQDCFFNIKLHPEDCKRFAFSVPSPNFKRPYQRFQWKVLPQGMKNSPTLCQKFVDKAILTVRDKYQDSYIVHYMDDILLAHPSRSIVDEILTSMIQALNKHGLVVSTEKIQKYDNLKYLGTHIQGDSVSYQKLQIRTDKLRTLNDFQKLLGNINWIRPFLKLTTGELKPLFEILNGDSNPISTRKLTPEACKALQLMNERLSTARVKRLDLSQPWSLCILKTEYTPTACLWQDGVVEWIHLPHISPKVITPYDIFCTQLIIKGRHRSKELFSKDPDYIVVPYTKVQFDLLLQEKEDWPISLLGFLGEVHFHLPKDPLLTFTLQTAIIFPHMTSTTPLEKGIVIFTDGSANGRSVTYIQGREPIIKENTQNTAQQAEIVAVITAFEEVSQPFNLYTDSKYVTGLFPEIETATLSPRTKIYTELKHLQRLIHKRQEKFYIGHIRGHTGLPGPLAQGNAYADSLTRILTAGKRTADGSEFEKRTADGSEFESPKKKAKVE

SEQ ID NO: 3184 - protein, 2114 aa, synthetic construct
MPAAKRVKLDGGDKKYSIGLDIGTNSVGWAVITDEYKVPSKKFKVLGNTDRHSIKKNLIGALLFDSGETAEATRLKRTARRRYTRRKNRICYLQEIFSNEMAKVDDSFFHRLEESFLVEEDKKHERHPIFGNIVDEVAYHEKYPTIYHLRKKLVDSTDKADLRLIYLALAHMIKFRGHFLIEGDLNPDNSDVDKLFIQLVQTYNQLFEENPINASGVDAKAILSARLSKSRRLENLIAQLPGEKKNGLFGNLIALSLGLTPNFKSNFDLAEDAKLQLSKDTYDDDLDNLLAQIGDQYADLFLAAKNLSDAILLSDILRVNTEITKAPLSASMIKRYDEHHQDLTLLKALVRQQLPEKYKEIFFDQSKNGYAGYIDGGASQEEFYKFIKPILEKMDGTEELLVKLNREDLLRKQRTFDNGSIPHQIHLGELHAILRRQEDFYPFLKDNREKIEKILTFRIPYYVGPLARGNSRFAWMTRKSEETITPWNFEEVVDKGASAQSFIERMTNFDKNLPNEKVLPKHSLLYEYFTVYNELTKVKYVTEGMRKPAFLSGEQKKAIVDLLFKTNRKVTVKQLKEDYFKKIECFDSVEISGVEDRFNASLGTYHDLLKIIKDKDFLDNEENEDILEDIVLTLTLFEDREMIEERLKTYAHLFDDKVMKQLKRRRYTGWGRLSRKLINGIRDKQSGKTILDFLKSDGFANRNFMQLIHDDSLTFKEDIQKAQVSGQGDSLHEHIANLAGSPAIKKGILQTVKVVDELVKVMGRHKPENIVIEMARENQTTQKGQKNSRERMKRIEEGIKELGSQILKEHPVENTQLQNEKLYLYYLQNGRDMYVDQELDINRLSDYDVDHIVPQSFLKDDSIDNKVLTRSDKARGKSDNVPSEEVVKKMKNYWRQLLNAKLITQRKFDNLTKAERGGLSELDKAGFIKRQLVETRQITKHVAQILDSRMNTKYDENDKLIREVKVITLKSKLVSDFRKDFQFYKVREINNYHHAHDAYLNAVVGTALIKKYPKLESEFVYGDYKVYDVRKMIAKSEQEIGKATAKYFFYSNIMNFFKTEITLANGEIRKRPLIETNGETGEIVWDKGRDFATVRKVLSMPQVNIVKKTEVQTGGFSKESILPKRNSDKLIARKKDWDPKKYGGFDSPTVAYSVLVVAKVEKGKSKKLKSVKELLGITIMERSSFEKNPIDFLEAKGYKEVKKDLIIKLPKYSLFELENGRKRMLASAGELQKGNELALPSKYVNFLYLASHYEKLKGSPEDNEQKQLFVEQHKHYLDEIIEQISEFSKRVILADANLDKVLSAYNKHRDKPIREQAENIIHLFTLTNLGAPAAFKYFDTTIDRKRYTSTKEVLDATLIHQSITGLYETRIDLSQLGGDGGGGGGSSGGSGGWVQEISDSRPMLHIYLNGRRFLGLLNTGADKTCIAGRDWPANWPIHQTESSLQGLGMACGVARSSQPLRWQHEDKSGIIHPFVIPTLPFTLWGRDIMKDIKVRLMTDSPDDSQDLMIGAIESNLFADQISWKSDQPVWLNQWPLKQEKLQALQQLVTEQLQLGHLEESNSPWNTPVFVIKKKSGKWRLLQDLRAVNATMHDMGALQPGLPSPVAVPKGWEIIIIDLQDCFFNIKLHPEDCKRFAFSVPSPNFKRPYQRFQWKVLPQGMKNSPTLCQKFVDKAILTVRDKYQDSYIVHYMDDILLAHPSRSIVDEILTSMIQALNKHGLVVSTEKIQKYDNLKYLGTHIQGDSVSYQKLQIRTDKLRTLNDFQKLLGNINWIRPFLKLTTGELKPLFEILNGDSNPISTRKLTPEACKALQLMNERLSTARVKRLDLSQPWSLCILKTEYTPTACLWQDGVVEWIHLPHISPKVITPYDIFCTQLIIKGRHRSKELFSKDPDYIVVPYTKVQFDLLLQEKEDWPISLLGFLGEVHFHLPKDPLLTFTLQTAIIFPHMTSTTPLEKGIVIFTDGSANGRSVTYIQGREPIIKENTQNTAQQAEIVAVITAFEEVSQPFNLYTDSKYVTGLFPEIETATLSPRTKIYTELKHLQRLIHKRQEKFYIGHIRGHTGLPGPLAQGNAYADSLTRILTAGKRTADGSEFEKRTADGSEFESPKKKAKVE

SEQ ID NO: 3185 - protein, 2120 aa, synthetic construct
MPAAKRVKLDGGDKKYSIGLDIGTNSVGWAVITDEYKVPSKKFKVLGNTDRHSIKKNLIGALLFDSGETAEATRLKRTARRRYTRRKNRICYLQEIFSNEMAKVDDSFFHRLEESFLVEEDKKHERHPIFGNIVDEVAYHEKYPTIYHLRKKLVDSTDKADLRLIYLALAHMIKFRGHFLIEGDLNPDNSDVDKLFIQLVQTYNQLFEENPINASGVDAKAILSARLSKSRRLENLIAQLPGEKKNGLFGNLIALSLGLTPNFKSNFDLAEDAKLQLSKDTYDDDLDNLLAQIGDQYADLFLAAKNLSDAILLSDILRVNTEITKAPLSASMIKRYDEHHQDLTLLKALVRQQLPEKYKEIFFDQSKNGYAGYIDGGASQEEFYKFIKPILEKMDGTEELLVKLNREDLLRKQRTFDNGSIPHQIHLGELHAILRRQEDFYPFLKDNREKIEKILTFRIPYYVGPLARGNSRFAWMTRKSEETITPWNFEEVVDKGASAQSFIERMTNFDKNLPNEKVLPKHSLLYEYFTVYNELTKVKYVTEGMRKPAFLSGEQKKAIVDLLFKTNRKVTVKQLKEDYFKKIECFDSVEISGVEDRFNASLGTYHDLLKIIKDKDFLDNEENEDILEDIVLTLTLFEDREMIEERLKTYAHLFDDKVMKQLKRRRYTGWGRLSRKLINGIRDKQSGKTILDFLKSDGFANRNFMQLIHDDSLTFKEDIQKAQVSGQGDSLHEHIANLAGSPAIKKGILQTVKVVDELVKVMGRHKPENIVIEMARENQTTQKGQKNSRERMKRIEEGIKELGSQILKEHPVENTQLQNEKLYLYYLQNGRDMYVDQELDINRLSDYDVDHIVPQSFLKDDSIDNKVLTRSDKARGKSDNVPSEEVVKKMKNYWRQLLNAKLITQRKFDNLTKAERGGLSELDKAGFIKRQLVETRQITKHVAQILDSRMNTKYDENDKLIREVKVITLKSKLVSDFRKDFQFYKVREINNYHHAHDAYLNAVVGTALIKKYPKLESEFVYGDYKVYDVRKMIAKSEQEIGKATAKYFFYSNIMNFFKTEITLANGEIRKRPLIETNGETGEIVWDKGRDFATVRKVLSMPQVNIVKKTEVQTGGFSKESILPKRNSDKLIARKKDWDPKKYGGFDSPTVAYSVLVVAKVEKGKSKKLKSVKELLGITIMERSSFEKNPIDFLEAKGYKEVKKDLIIKLPKYSLFELENGRKRMLASAGELQKGNELALPSKYVNFLYLASHYEKLKGSPEDNEQKQLFVEQHKHYLDEIIEQISEFSKRVILADANLDKVLSAYNKHRDKPIREQAENIIHLFTLTNLGAPAAFKYFDTTIDRKRYTSTKEVLDATLIHQSITGLYETRIDLSQLGGDGGEAAAKGGGGSEAAAKGGWVQEISDSRPMLHIYLNGRRFLGLLNTGADKTCIAGRDWPANWPIHQTESSLQGLGMACGVARSSQPLRWQHEDKSGIIHPFVIPTLPFTLWGRDIMKDIKVRLMTDSPDDSQDLMIGAIESNLFADQISWKSDQPVWLNQWPLKQEKLQALQQLVTEQLQLGHLEESNSPWNTPVFVIKKKSGKWRLLQDLRAVNATMHDMGALQPGLPSPVAVPKGWEIIIIDLQDCFFNIKLHPEDCKRFAFSVPSPNFKRPYQRFQWKVLPQGMKNSPTLCQKFVDKAILTVRDKYQDSYIVHYMDDILLAHPSRSIVDEILTSMIQALNKHGLVVSTEKIQKYDNLKYLGTHIQGDSVSYQKLQIRTDKLRTLNDFQKLLGNINWIRPFLKLTTGELKPLFEILNGDSNPISTRKLTPEACKALQLMNERLSTARVKRLDLSQPWSLCILKTEYTPTACLWQDGVVEWIHLPHISPKVITPYDIFCTQLIIKGRHRSKELFSKDPDYIVVPYTKVQFDLLLQEKEDWPISLLGFLGEVHFHLPKDPLLTFTLQTAIIFPHMTSTTPLEKGIVIFTDGSANGRSVTYIQGREPIIKENTQNTAQQAEIVAVITAFEEVSQPFNLYTDSKYVTGLFPEIETATLSPRTKIYTELKHLQRLIHKRQEKFYIGHIRGHTGLPGPLAQGNAYADSLTRILTAGKRTADGSEFEKRTADGSEFESPKKKAKVE

SEQ ID NO: 3186 - protein, 2108 aa, synthetic construct
MPAAKRVKLDGGDKKYSIGLDIGTNSVGWAVITDEYKVPSKKFKVLGNTDRHSIKKNLIGALLFDSGETAEATRLKRTARRRYTRRKNRICYLQEIFSNEMAKVDDSFFHRLEESFLVEEDKKHERHPIFGNIVDEVAYHEKYPTIYHLRKKLVDSTDKADLRLIYLALAHMIKFRGHFLIEGDLNPDNSDVDKLFIQLVQTYNQLFEENPINASGVDAKAILSARLSKSRRLENLIAQLPGEKKNGLFGNLIALSLGLTPNFKSNFDLAEDAKLQLSKDTYDDDLDNLLAQIGDQYADLFLAAKNLSDAILLSDILRVNTEITKAPLSASMIKRYDEHHQDLTLLKALVRQQLPEKYKEIFFDQSKNGYAGYIDGGASQEEFYKFIKPILEKMDGTEELLVKLNREDLLRKQRTFDNGSIPHQIHLGELHAILRRQEDFYPFLKDNREKIEKILTFRIPYYVGPLARGNSRFAWMTRKSEETITPWNFEEVVDKGASAQSFIERMTNFDKNLPNEKVLPKHSLLYEYFTVYNELTKVKYVTEGMRKPAFLSGEQKKAIVDLLFKTNRKVTVKQLKEDYFKKIECFDSVEISGVEDRFNASLGTYHDLLKIIKDKDFLDNEENEDILEDIVLTLTLFEDREMIEERLKTYAHLFDDKVMKQLKRRRYTGWGRLSRKLINGIRDKQSGKTILDFLKSDGFANRNFMQLIHDDSLTFKEDIQKAQVSGQGDSLHEHIANLAGSPAIKKGILQTVKVVDELVKVMGRHKPENIVIEMARENQTTQKGQKNSRERMKRIEEGIKELGSQILKEHPVENTQLQNEKLYLYYLQNGRDMYVDQELDINRLSDYDVDHIVPQSFLKDDSIDNKVLTRSDKARGKSDNVPSEEVVKKMKNYWRQLLNAKLITQRKFDNLTKAERGGLSELDKAGFIKRQLVETRQITKHVAQILDSRMNTKYDENDKLIREVKVITLKSKLVSDFRKDFQFYKVREINNYHHAHDAYLNAVVGTALIKKYPKLESEFVYGDYKVYDVRKMIAKSEQEIGKATAKYFFYSNIMNFFKTEITLANGEIRKRPLIETNGETGEIVWDKGRDFATVRKVLSMPQVNIVKKTEVQTGGFSKESILPKRNSDKLIARKKDWDPKKYGGFDSPTVAYSVLVVAKVEKGKSKKLKSVKELLGITIMERSSFEKNPIDFLEAKGYKEVKKDLIIKLPKYSLFELENGRKRMLASAGELQKGNELALPSKYVNFLYLASHYEKLKGSPEDNEQKQLFVEQHKHYLDEIIEQISEFSKRVILADANLDKVLSAYNKHRDKPIREQAENIIHLFTLTNLGAPAAFKYFDTTIDRKRYTSTKEVLDATLIHQSITGLYETRIDLSQLGGDGGGGSGGWVQEISDSRPMLHIYLNGRRFLGLLNTGADKTCIAGRDWPANWPIHQTESSLQGLGMACGVARSSQPLRWQHEDKSGIIHPFVIPTLPFTLWGRDIMKDIKVRLMTDSPDDSQDLMIGAIESNLFADQISWKSDQPVWLNQWPLKQEKLQALQQLVTEQLQLGHLEESNSPWNTPVFVIKKKSGKWRLLQDLRAVNATMHDMGALQPGLPSPVAVPKGWEIIIIDLQDCFFNIKLHPEDCKRFAFSVPSPNFKRPYQRFQWKVLPQGMKNSPTLCQKFVDKAILTVRDKYQDSYIVHYMDDILLAHPSRSIVDEILTSMIQALNKHGLVVSTEKIQKYDNLKYLGTHIQGDSVSYQKLQIRTDKLRTLNDFQKLLGNINWIRPFLKLTTGELKPLFEILNGDSNPISTRKLTPEACKALQLMNERLSTARVKRLDLSQPWSLCILKTEYTPTACLWQDGVVEWIHLPHISPKVITPYDIFCTQLIIKGRHRSKELFSKDPDYIVVPYTKVQFDLLLQEKEDWPISLLGFLGEVHFHLPKDPLLTFTLQTAIIFPHMTSTTPLEKGIVIFTDGSANGRSVTYIQGREPIIKENTQNTAQQAEIVAVITAFEEVSQPFNLYTDSKYVTGLFPEIETATLSPRTKIYTELKHLQRLIHKRQEKFYIGHIRGHTGLPGPLAQGNAYADSLTRILTAGKRTADGSEFEKRTADGSEFESPKKKAKVE

SEQ ID NO: 3187 - protein, 2114 aa, synthetic construct
MPAAKRVKLDGGDKKYSIGLDIGTNSVGWAVITDEYKVPSKKFKVLGNTDRHSIKKNLIGALLFDSGETAEATRLKRTARRRYTRRKNRICYLQEIFSNEMAKVDDSFFHRLEESFLVEEDKKHERHPIFGNIVDEVAYHEKYPTIYHLRKKLVDSTDKADLRLIYLALAHMIKFRGHFLIEGDLNPDNSDVDKLFIQLVQTYNQLFEENPINASGVDAKAILSARLSKSRRLENLIAQLPGEKKNGLFGNLIALSLGLTPNFKSNFDLAEDAKLQLSKDTYDDDLDNLLAQIGDQYADLFLAAKNLSDAILLSDILRVNTEITKAPLSASMIKRYDEHHQDLTLLKALVRQQLPEKYKEIFFDQSKNGYAGYIDGGASQEEFYKFIKPILEKMDGTEELLVKLNREDLLRKQRTFDNGSIPHQIHLGELHAILRRQEDFYPFLKDNREKIEKILTFRIPYYVGPLARGNSRFAWMTRKSEETITPWNFEEVVDKGASAQSFIERMTNFDKNLPNEKVLPKHSLLYEYFTVYNELTKVKYVTEGMRKPAFLSGEQKKAIVDLLFKTNRKVTVKQLKEDYFKKIECFDSVEISGVEDRFNASLGTYHDLLKIIKDKDFLDNEENEDILEDIVLTLTLFEDREMIEERLKTYAHLFDDKVMKQLKRRRYTGWGRLSRKLINGIRDKQSGKTILDFLKSDGFANRNFMQLIHDDSLTFKEDIQKAQVSGQGDSLHEHIANLAGSPAIKKGILQTVKVVDELVKVMGRHKPENIVIEMARENQTTQKGQKNSRERMKRIEEGIKELGSQILKEHPVENTQLQNEKLYLYYLQNGRDMYVDQELDINRLSDYDVDHIVPQSFLKDDSIDNKVLTRSDKARGKSDNVPSEEVVKKMKNYWRQLLNAKLITQRKFDNLTKAERGGLSELDKAGFIKRQLVETRQITKHVAQILDSRMNTKYDENDKLIREVKVITLKSKLVSDFRKDFQFYKVREINNYHHAHDAYLNAVVGTALIKKYPKLESEFVYGDYKVYDVRKMIAKSEQEIGKATAKYFFYSNIMNFFKTEITLANGEIRKRPLIETNGETGEIVWDKGRDFATVRKVLSMPQVNIVKKTEVQTGGFSKESILPKRNSDKLIARKKDWDPKKYGGFDSPTVAYSVLVVAKVEKGKSKKLKSVKELLGITIMERSSFEKNPIDFLEAKGYKEVKKDLIIKLPKYSLFELENGRKRMLASAGELQKGNELALPSKYVNFLYLASHYEKLKGSPEDNEQKQLFVEQHKHYLDEIIEQISEFSKRVILADANLDKVLSAYNKHRDKPIREQAENIIHLFTLTNLGAPAAFKYFDTTIDRKRYTSTKEVLDATLIHQSITGLYETRIDLSQLGGDGGGSSPAPGGGGGWVQEISDSRPMLHIYLNGRRFLGLLNTGADKTCIAGRDWPANWPIHQTESSLQGLGMACGVARSSQPLRWQHEDKSGIIHPFVIPTLPFTLWGRDIMKDIKVRLMTDSPDDSQDLMIGAIESNLFADQISWKSDQPVWLNQWPLKQEKLQALQQLVTEQLQLGHLEESNSPWNTPVFVIKKKSGKWRLLQDLRAVNATMHDMGALQPGLPSPVAVPKGWEIIIIDLQDCFFNIKLHPEDCKRFAFSVPSPNFKRPYQRFQWKVLPQGMKNSPTLCQKFVDKAILTVRDKYQDSYIVHYMDDILLAHPSRSIVDEILTSMIQALNKHGLVVSTEKIQKYDNLKYLGTHIQGDSVSYQKLQIRTDKLRTLNDFQKLLGNINWIRPFLKLTTGELKPLFEILNGDSNPISTRKLTPEACKALQLMNERLSTARVKRLDLSQPWSLCILKTEYTPTACLWQDGVVEWIHLPHISPKVITPYDIFCTQLIIKGRHRSKELFSKDPDYIVVPYTKVQFDLLLQEKEDWPISLLGFLGEVHFHLPKDPLLTFTLQTAIIFPHMTSTTPLEKGIVIFTDGSANGRSVTYIQGREPIIKENTQNTAQQAEIVAVITAFEEVSQPFNLYTDSKYVTGLFPEIETATLSPRTKIYTELKHLQRLIHKRQEKFYIGHIRGHTGLPGPLAQGNAYADSLTRILTAGKRTADGSEFEKRTADGSEFESPKKKAKVE

SEQ ID NO: 3188 - protein, 2114 aa, synthetic construct
MPAAKRVKLDGGDKKYSIGLDIGTNSVGWAVITDEYKVPSKKFKVLGNTDRHSIKKNLIGALLFDSGETAEATRLKRTARRRYTRRKNRICYLQEIFSNEMAKVDDSFFHRLEESFLVEEDKKHERHPIFGNIVDEVAYHEKYPTIYHLRKKLVDSTDKADLRLIYLALAHMIKFRGHFLIEGDLNPDNSDVDKLFIQLVQTYNQLFEENPINASGVDAKAILSARLSKSRRLENLIAQLPGEKKNGLFGNLIALSLGLTPNFKSNFDLAEDAKLQLSKDTYDDDLDNLLAQIGDQYADLFLAAKNLSDAILLSDILRVNTEITKAPLSASMIKRYDEHHQDLTLLKALVRQQLPEKYKEIFFDQSKNGYAGYIDGGASQEEFYKFIKPILEKMDGTEELLVKLNREDLLRKQRTFDNGSIPHQIHLGELHAILRRQEDFYPFLKDNREKIEKILTFRIPYYVGPLARGNSRFAWMTRKSEETITPWNFEEVVDKGASAQSFIERMTNFDKNLPNEKVLPKHSLLYEYFTVYNELTKVKYVTEGMRKPAFLSGEQKKAIVDLLFKTNRKVTVKQLKEDYFKKIECFDSVEISGVEDRFNASLGTYHDLLKIIKDKDFLDNEENEDILEDIVLTLTLFEDREMIEERLKTYAHLFDDKVMKQLKRRRYTGWGRLSRKLINGIRDKQSGKTILDFLKSDGFANRNFMQLIHDDSLTFKEDIQKAQVSGQGDSLHEHIANLAGSPAIKKGILQTVKVVDELVKVMGRHKPENIVIEMARENQTTQKGQKNSRERMKRIEEGIKELGSQILKEHPVENTQLQNEKLYLYYLQNGRDMYVDQELDINRLSDYDVDHIVPQSFLKDDSIDNKVLTRSDKARGKSDNVPSEEVVKKMKNYWRQLLNAKLITQRKFDNLTKAERGGLSELDKAGFIKRQLVETRQITKHVAQILDSRMNTKYDENDKLIREVKVITLKSKLVSDFRKDFQFYKVREINNYHHAHDAYLNAVVGTALIKKYPKLESEFVYGDYKVYDVRKMIAKSEQEIGKATAKYFFYSNIMNFFKTEITLANGEIRKRPLIETNGETGEIVWDKGRDFATVRKVLSMPQVNIVKKTEVQTGGFSKESILPKRNSDKLIARKKDWDPKKYGGFDSPTVAYSVLVVAKVEKGKSKKLKSVKELLGITIMERSSFEKNPIDFLEAKGYKEVKKDLIIKLPKYSLFELENGRKRMLASAGELQKGNELALPSKYVNFLYLASHYEKLKGSPEDNEQKQLFVEQHKHYLDEIIEQISEFSKRVILADANLDKVLSAYNKHRDKPIREQAENIIHLFTLTNLGAPAAFKYFDTTIDRKRYTSTKEVLDATLIHQSITGLYETRIDLSQLGGDGGPAPGSSGGGGGWVQEISDSRPMLHIYLNGRRFLGLLNTGADKTCIAGRDWPANWPIHQTESSLQGLGMACGVARSSQPLRWQHEDKSGIIHPFVIPTLPFTLWGRDIMKDIKVRLMTDSPDDSQDLMIGAIESNLFADQISWKSDQPVWLNQWPLKQEKLQALQQLVTEQLQLGHLEESNSPWNTPVFVIKKKSGKWRLLQDLRAVNATMHDMGALQPGLPSPVAVPKGWEIIIIDLQDCFFNIKLHPEDCKRFAFSVPSPNFKRPYQRFQWKVLPQGMKNSPTLCQKFVDKAILTVRDKYQDSYIVHYMDDILLAHPSRSIVDEILTSMIQALNKHGLVVSTEKIQKYDNLKYLGTHIQGDSVSYQKLQIRTDKLRTLNDFQKLLGNINWIRPFLKLTTGELKPLFEILNGDSNPISTRKLTPEACKALQLMNERLSTARVKRLDLSQPWSLCILKTEYTPTACLWQDGVVEWIHLPHISPKVITPYDIFCTQLIIKGRHRSKELFSKDPDYIVVPYTKVQFDLLLQEKEDWPISLLGFLGEVHFHLPKDPLLTFTLQTAIIFPHMTSTTPLEKGIVIFTDGSANGRSVTYIQGREPIIKENTQNTAQQAEIVAVITAFEEVSQPFNLYTDSKYVTGLFPEIETATLSPRTKIYTELKHLQRLIHKRQEKFYIGHIRGHTGLPGPLAQGNAYADSLTRILTAGKRTADGSEFEKRTADGSEFESPKKKAKVE

SEQ ID NO: 3189 - protein, 2116 aa, synthetic construct
MPAAKRVKLDGGDKKYSIGLDIGTNSVGWAVITDEYKVPSKKFKVLGNTDRHSIKKNLIGALLFDSGETAEATRLKRTARRRYTRRKNRICYLQEIFSNEMAKVDDSFFHRLEESFLVEEDKKHERHPIFGNIVDEVAYHEKYPTIYHLRKKLVDSTDKADLRLIYLALAHMIKFRGHFLIEGDLNPDNSDVDKLFIQLVQTYNQLFEENPINASGVDAKAILSARLSKSRRLENLIAQLPGEKKNGLFGNLIALSLGLTPNFKSNFDLAEDAKLQLSKDTYDDDLDNLLAQIGDQYADLFLAAKNLSDAILLSDILRVNTEITKAPLSASMIKRYDEHHQDLTLLKALVRQQLPEKYKEIFFDQSKNGYAGYIDGGASQEEFYKFIKPILEKMDGTEELLVKLNREDLLRKQRTFDNGSIPHQIHLGELHAILRRQEDFYPFLKDNREKIEKILTFRIPYYVGPLARGNSRFAWMTRKSEETITPWNFEEVVDKGASAQSFIERMTNFDKNLPNEKVLPKHSLLYEYFTVYNELTKVKYVTEGMRKPAFLSGEQKKAIVDLLFKTNRKVTVKQLKEDYFKKIECFDSVEISGVEDRFNASLGTYHDLLKIIKDKDFLDNEENEDILEDIVLTLTLFEDREMIEERLKTYAHLFDDKVMKQLKRRRYTGWGRLSRKLINGIRDKQSGKTILDFLKSDGFANRNFMQLIHDDSLTFKEDIQKAQVSGQGDSLHEHIANLAGSPAIKKGILQTVKVVDELVKVMGRHKPENIVIEMARENQTTQKGQKNSRERMKRIEEGIKELGSQILKEHPVENTQLQNEKLYLYYLQNGRDMYVDQELDINRLSDYDVDHIVPQSFLKDDSIDNKVLTRSDKARGKSDNVPSEEVVKKMKNYWRQLLNAKLITQRKFDNLTKAERGGLSELDKAGFIKRQLVETRQITKHVAQILDSRMNTKYDENDKLIREVKVITLKSKLVSDFRKDFQFYKVREINNYHHAHDAYLNAVVGTALIKKYPKLESEFVYGDYKVYDVRKMIAKSEQEIGKATAKYFFYSNIMNFFKTEITLANGEIRKRPLIETNGETGEIVWDKGRDFATVRKVLSMPQVNIVKKTEVQTGGFSKESILPKRNSDKLIARKKDWDPKKYGGFDSPTVAYSVLVVAKVEKGKSKKLKSVKELLGITIMERSSFEKNPIDFLEAKGYKEVKKDLIIKLPKYSLFELENGRKRMLASAGELQKGNELALPSKYVNFLYLASHYEKLKGSPEDNEQKQLFVEQHKHYLDEIIEQISEFSKRVILADANLDKVLSAYNKHRDKPIREQAENIIHLFTLTNLGAPAAFKYFDTTIDRKRYTSTKEVLDATLIHQSITGLYETRIDLSQLGGDGGEAAAKGGSPAPGGWVQEISDSRPMLHIYLNGRRFLGLLNTGADKTCIAGRDWPANWPIHQTESSLQGLGMACGVARSSQPLRWQHEDKSGIIHPFVIPTLPFTLWGRDIMKDIKVRLMTDSPDDSQDLMIGAIESNLFADQISWKSDQPVWLNQWPLKQEKLQALQQLVTEQLQLGHLEESNSPWNTPVFVIKKKSGKWRLLQDLRAVNATMHDMGALQPGLPSPVAVPKGWEIIIIDLQDCFFNIKLHPEDCKRFAFSVPSPNFKRPYQRFQWKVLPQGMKNSPTLCQKFVDKAILTVRDKYQDSYIVHYMDDILLAHPSRSIVDEILTSMIQALNKHGLVVSTEKIQKYDNLKYLGTHIQGDSVSYQKLQIRTDKLRTLNDFQKLLGNINWIRPFLKLTTGELKPLFEILNGDSNPISTRKLTPEACKALQLMNERLSTARVKRLDLSQPWSLCILKTEYTPTACLWQDGVVEWIHLPHISPKVITPYDIFCTQLIIKGRHRSKELFSKDPDYIVVPYTKVQFDLLLQEKEDWPISLLGFLGEVHFHLPKDPLLTFTLQTAIIFPHMTSTTPLEKGIVIFTDGSANGRSVTYIQGREPIIKENTQNTAQQAEIVAVITAFEEVSQPFNLYTDSKYVTGLFPEIETATLSPRTKIYTELKHLQRLIHKRQEKFYIGHIRGHTGLPGPLAQGNAYADSLTRILTAGKRTADGSEFEKRTADGSEFESPKKKAKVE

SEQ ID NO: 3190 - protein, 2114 aa, synthetic construct
MPAAKRVKLDGGDKKYSIGLDIGTNSVGWAVITDEYKVPSKKFKVLGNTDRHSIKKNLIGALLFDSGETAEATRLKRTARRRYTRRKNRICYLQEIFSNEMAKVDDSFFHRLEESFLVEEDKKHERHPIFGNIVDEVAYHEKYPTIYHLRKKLVDSTDKADLRLIYLALAHMIKFRGHFLIEGDLNPDNSDVDKLFIQLVQTYNQLFEENPINASGVDAKAILSARLSKSRRLENLIAQLPGEKKNGLFGNLIALSLGLTPNFKSNFDLAEDAKLQLSKDTYDDDLDNLLAQIGDQYADLFLAAKNLSDAILLSDILRVNTEITKAPLSASMIKRYDEHHQDLTLLKALVRQQLPEKYKEIFFDQSKNGYAGYIDGGASQEEFYKFIKPILEKMDGTEELLVKLNREDLLRKQRTFDNGSIPHQIHLGELHAILRRQEDFYPFLKDNREKIEKILTFRIPYYVGPLARGNSRFAWMTRKSEETITPWNFEEVVDKGASAQSFIERMTNFDKNLPNEKVLPKHSLLYEYFTVYNELTKVKYVTEGMRKPAFLSGEQKKAIVDLLFKTNRKVTVKQLKEDYFKKIECFDSVEISGVEDRFNASLGTYHDLLKIIKDKDFLDNEENEDILEDIVLTLTLFEDREMIEERLKTYAHLFDDKVMKQLKRRRYTGWGRLSRKLINGIRDKQSGKTILDFLKSDGFANRNFMQLIHDDSLTFKEDIQKAQVSGQGDSLHEHIANLAGSPAIKKGILQTVKVVDELVKVMGRHKPENIVIEMARENQTTQKGQKNSRERMKRIEEGIKELGSQILKEHPVENTQLQNEKLYLYYLQNGRDMYVDQELDINRLSDYDVDHIVPQSFLKDDSIDNKVLTRSDKARGKSDNVPSEEVVKKMKNYWRQLLNAKLITQRKFDNLTKAERGGLSELDKAGFIKRQLVETRQITKHVAQILDSRMNTKYDENDKLIREVKVITLKSKLVSDFRKDFQFYKVREINNYHHAHDAYLNAVVGTALIKKYPKLESEFVYGDYKVYDVRKMIAKSEQEIGKATAKYFFYSNIMNFFKTEITLANGEIRKRPLIETNGETGEIVWDKGRDFATVRKVLSMPQVNIVKKTEVQTGGFSKESILPKRNSDKLIARKKDWDPKKYGGFDSPTVAYSVLVVAKVEKGKSKKLKSVKELLGITIMERSSFEKNPIDFLEAKGYKEVKKDLIIKLPKYSLFELENGRKRMLASAGELQKGNELALPSKYVNFLYLASHYEKLKGSPEDNEQKQLFVEQHKHYLDEIIEQISEFSKRVILADANLDKVLSAYNKHRDKPIREQAENIIHLFTLTNLGAPAAFKYFDTTIDRKRYTSTKEVLDATLIHQSITGLYETRIDLSQLGGDGGGSSGGSGGGGGWVQEISDSRPMLHIYLNGRRFLGLLNTGADKTCIAGRDWPANWPIHQTESSLQGLGMACGVARSSQPLRWQHEDKSGIIHPFVIPTLPFTLWGRDIMKDIKVRLMTDSPDDSQDLMIGAIESNLFADQISWKSDQPVWLNQWPLKQEKLQALQQLVTEQLQLGHLEESNSPWNTPVFVIKKKSGKWRLLQDLRAVNATMHDMGALQPGLPSPVAVPKGWEIIIIDLQDCFFNIKLHPEDCKRFAFSVPSPNFKRPYQRFQWKVLPQGMKNSPTLCQKFVDKAILTVRDKYQDSYIVHYMDDILLAHPSRSIVDEILTSMIQALNKHGLVVSTEKIQKYDNLKYLGTHIQGDSVSYQKLQIRTDKLRTLNDFQKLLGNINWIRPFLKLTTGELKPLFEILNGDSNPISTRKLTPEACKALQLMNERLSTARVKRLDLSQPWSLCILKTEYTPTACLWQDGVVEWIHLPHISPKVITPYDIFCTQLIIKGRHRSKELFSKDPDYIVVPYTKVQFDLLLQEKEDWPISLLGFLGEVHFHLPKDPLLTFTLQTAIIFPHMTSTTPLEKGIVIFTDGSANGRSVTYIQGREPIIKENTQNTAQQAEIVAVITAFEEVSQPFNLYTDSKYVTGLFPEIETATLSPRTKIYTELKHLQRLIHKRQEKFYIGHIRGHTGLPGPLAQGNAYADSLTRILTAGKRTADGSEFEKRTADGSEFESPKKKAKVE

SEQ ID NO: 3191 - protein, 2116 aa, synthetic construct
MPAAKRVKLDGGDKKYSIGLDIGTNSVGWAVITDEYKVPSKKFKVLGNTDRHSIKKNLIGALLFDSGETAEATRLKRTARRRYTRRKNRICYLQEIFSNEMAKVDDSFFHRLEESFLVEEDKKHERHPIFGNIVDEVAYHEKYPTIYHLRKKLVDSTDKADLRLIYLALAHMIKFRGHFLIEGDLNPDNSDVDKLFIQLVQTYNQLFEENPINASGVDAKAILSARLSKSRRLENLIAQLPGEKKNGLFGNLIALSLGLTPNFKSNFDLAEDAKLQLSKDTYDDDLDNLLAQIGDQYADLFLAAKNLSDAILLSDILRVNTEITKAPLSASMIKRYDEHHQDLTLLKALVRQQLPEKYKEIFFDQSKNGYAGYIDGGASQEEFYKFIKPILEKMDGTEELLVKLNREDLLRKQRTFDNGSIPHQIHLGELHAILRRQEDFYPFLKDNREKIEKILTFRIPYYVGPLARGNSRFAWMTRKSEETITPWNFEEVVDKGASAQSFIERMTNFDKNLPNEKVLPKHSLLYEYFTVYNELTKVKYVTEGMRKPAFLSGEQKKAIVDLLFKTNRKVTVKQLKEDYFKKIECFDSVEISGVEDRFNASLGTYHDLLKIIKDKDFLDNEENEDILEDIVLTLTLFEDREMIEERLKTYAHLFDDKVMKQLKRRRYTGWGRLSRKLINGIRDKQSGKTILDFLKSDGFANRNFMQLIHDDSLTFKEDIQKAQVSGQGDSLHEHIANLAGSPAIKKGILQTVKVVDELVKVMGRHKPENIVIEMARENQTTQKGQKNSRERMKRIEEGIKELGSQILKEHPVENTQLQNEKLYLYYLQNGRDMYVDQELDINRLSDYDVDHIVPQSFLKDDSIDNKVLTRSDKARGKSDNVPSEEVVKKMKNYWRQLLNAKLITQRKFDNLTKAERGGLSELDKAGFIKRQLVETRQITKHVAQILDSRMNTKYDENDKLIREVKVITLKSKLVSDFRKDFQFYKVREINNYHHAHDAYLNAVVGTALIKKYPKLESEFVYGDYKVYDVRKMIAKSEQEIGKATAKYFFYSNIMNFFKTEITLANGEIRKRPLIETNGETGEIVWDKGRDFATVRKVLSMPQVNIVKKTEVQTGGFSKESILPKRNSDKLIARKKDWDPKKYGGFDSPTVAYSVLVVAKVEKGKSKKLKSVKELLGITIMERSSFEKNPIDFLEAKGYKEVKKDLIIKLPKYSLFELENGRKRMLASAGELQKGNELALPSKYVNFLYLASHYEKLKGSPEDNEQKQLFVEQHKHYLDEIIEQISEFSKRVILADANLDKVLSAYNKHRDKPIREQAENIIHLFTLTNLGAPAAFKYFDTTIDRKRYTSTKEVLDATLIHQSITGLYETRIDLSQLGGDGGGGGEAAAKPAPGGWVQEISDSRPMLHIYLNGRRFLGLLNTGADKTCIAGRDWPANWPIHQTESSLQGLGMACGVARSSQPLRWQHEDKSGIIHPFVIPTLPFTLWGRDIMKDIKVRLMTDSPDDSQDLMIGAIESNLFADQISWKSDQPVWLNQWPLKQEKLQALQQLVTEQLQLGHLEESNSPWNTPVFVIKKKSGKWRLLQDLRAVNATMHDMGALQPGLPSPVAVPKGWEIIIIDLQDCFFNIKLHPEDCKRFAFSVPSPNFKRPYQRFQWKVLPQGMKNSPTLCQKFVDKAILTVRDKYQDSYIVHYMDDILLAHPSRSIVDEILTSMIQALNKHGLVVSTEKIQKYDNLKYLGTHIQGDSVSYQKLQIRTDKLRTLNDFQKLLGNINWIRPFLKLTTGELKPLFEILNGDSNPISTRKLTPEACKALQLMNERLSTARVKRLDLSQPWSLCILKTEYTPTACLWQDGVVEWIHLPHISPKVITPYDIFCTQLIIKGRHRSKELFSKDPDYIVVPYTKVQFDLLLQEKEDWPISLLGFLGEVHFHLPKDPLLTFTLQTAIIFPHMTSTTPLEKGIVIFTDGSANGRSVTYIQGREPIIKENTQNTAQQAEIVAVITAFEEVSQPFNLYTDSKYVTGLFPEIETATLSPRTKIYTELKHLQRLIHKRQEKFYIGHIRGHTGLPGPLAQGNAYADSLTRILTAGKRTADGSEFEKRTADGSEFESPKKKAKVE

SEQ ID NO: 3192 - protein, 2116 aa, synthetic construct
MPAAKRVKLDGGDKKYSIGLDIGTNSVGWAVITDEYKVPSKKFKVLGNTDRHSIKKNLIGALLFDSGETAEATRLKRTARRRYTRRKNRICYLQEIFSNEMAKVDDSFFHRLEESFLVEEDKKHERHPIFGNIVDEVAYHEKYPTIYHLRKKLVDSTDKADLRLIYLALAHMIKFRGHFLIEGDLNPDNSDVDKLFIQLVQTYNQLFEENPINASGVDAKAILSARLSKSRRLENLIAQLPGEKKNGLFGNLIALSLGLTPNFKSNFDLAEDAKLQLSKDTYDDDLDNLLAQIGDQYADLFLAAKNLSDAILLSDILRVNTEITKAPLSASMIKRYDEHHQDLTLLKALVRQQLPEKYKEIFFDQSKNGYAGYIDGGASQEEFYKFIKPILEKMDGTEELLVKLNREDLLRKQRTFDNGSIPHQIHLGELHAILRRQEDFYPFLKDNREKIEKILTFRIPYYVGPLARGNSRFAWMTRKSEETITPWNFEEVVDKGASAQSFIERMTNFDKNLPNEKVLPKHSLLYEYFTVYNELTKVKYVTEGMRKPAFLSGEQKKAIVDLLFKTNRKVTVKQLKEDYFKKIECFDSVEISGVEDRFNASLGTYHDLLKIIKDKDFLDNEENEDILEDIVLTLTLFEDREMIEERLKTYAHLFDDKVMKQLKRRRYTGWGRLSRKLINGIRDKQSGKTILDFLKSDGFANRNFMQLIHDDSLTFKEDIQKAQVSGQGDSLHEHIANLAGSPAIKKGILQTVKVVDELVKVMGRHKPENIVIEMARENQTTQKGQKNSRERMKRIEEGIKELGSQILKEHPVENTQLQNEKLYLYYLQNGRDMYVDQELDINRLSDYDVDHIVPQSFLKDDSIDNKVLTRSDKARGKSDNVPSEEVVKKMKNYWRQLLNAKLITQRKFDNLTKAERGGLSELDKAGFIKRQLVETRQITKHVAQILDSRMNTKYDENDKLIREVKVITLKSKLVSDFRKDFQFYKVREINNYHHAHDAYLNAVVGTALIKKYPKLESEFVYGDYKVYDVRKMIAKSEQEIGKATAKYFFYSNIMNFFKTEITLANGEIRKRPLIETNGETGEIVWDKGRDFATVRKVLSMPQVNIVKKTEVQTGGFSKESILPKRNSDKLIARKKDWDPKKYGGFDSPTVAYSVLVVAKVEKGKSKKLKSVKELLGITIMERSSFEKNPIDFLEAKGYKEVKKDLIIKLPKYSLFELENGRKRMLASAGELQKGNELALPSKYVNFLYLASHYEKLKGSPEDNEQKQLFVEQHKHYLDEIIEQISEFSKRVILADANLDKVLSAYNKHRDKPIREQAENIIHLFTLTNLGAPAAFKYFDTTIDRKRYTSTKEVLDATLIHQSITGLYETRIDLSQLGGDGGGSSEAAAKGGSGGWVQEISDSRPMLHIYLNGRRFLGLLNTGADKTCIAGRDWPANWPIHQTESSLQGLGMACGVARSSQPLRWQHEDKSGIIHPFVIPTLPFTLWGRDIMKDIKVRLMTDSPDDSQDLMIGAIESNLFADQISWKSDQPVWLNQWPLKQEKLQALQQLVTEQLQLGHLEESNSPWNTPVFVIKKKSGKWRLLQDLRAVNATMHDMGALQPGLPSPVAVPKGWEIIIIDLQDCFFNIKLHPEDCKRFAFSVPSPNFKRPYQRFQWKVLPQGMKNSPTLCQKFVDKAILTVRDKYQDSYIVHYMDDILLAHPSRSIVDEILTSMIQALNKHGLVVSTEKIQKYDNLKYLGTHIQGDSVSYQKLQIRTDKLRTLNDFQKLLGNINWIRPFLKLTTGELKPLFEILNGDSNPISTRKLTPEACKALQLMNERLSTARVKRLDLSQPWSLCILKTEYTPTACLWQDGVVEWIHLPHISPKVITPYDIFCTQLIIKGRHRSKELFSKDPDYIVVPYTKVQFDLLLQEKEDWPISLLGFLGEVHFHLPKDPLLTFTLQTAIIFPHMTSTTPLEKGIVIFTDGSANGRSVTYIQGREPIIKENTQNTAQQAEIVAVITAFEEVSQPFNLYTDSKYVTGLFPEIETATLSPRTKIYTELKHLQRLIHKRQEKFYIGHIRGHTGLPGPLAQGNAYADSLTRILTAGKRTADGSEFEKRTADGSEFESPKKKAKVE

SEQ ID NO: 3193 - protein, 2125 aa, synthetic construct
MPAAKRVKLDGGDKKYSIGLDIGTNSVGWAVITDEYKVPSKKFKVLGNTDRHSIKKNLIGALLFDSGETAEATRLKRTARRRYTRRKNRICYLQEIFSNEMAKVDDSFFHRLEESFLVEEDKKHERHPIFGNIVDEVAYHEKYPTIYHLRKKLVDSTDKADLRLIYLALAHMIKFRGHFLIEGDLNPDNSDVDKLFIQLVQTYNQLFEENPINASGVDAKAILSARLSKSRRLENLIAQLPGEKKNGLFGNLIALSLGLTPNFKSNFDLAEDAKLQLSKDTYDDDLDNLLAQIGDQYADLFLAAKNLSDAILLSDILRVNTEITKAPLSASMIKRYDEHHQDLTLLKALVRQQLPEKYKEIFFDQSKNGYAGYIDGGASQEEFYKFIKPILEKMDGTEELLVKLNREDLLRKQRTFDNGSIPHQIHLGELHAILRRQEDFYPFLKDNREKIEKILTFRIPYYVGPLARGNSRFAWMTRKSEETITPWNFEEVVDKGASAQSFIERMTNFDKNLPNEKVLPKHSLLYEYFTVYNELTKVKYVTEGMRKPAFLSGEQKKAIVDLLFKTNRKVTVKQLKEDYFKKIECFDSVEISGVEDRFNASLGTYHDLLKIIKDKDFLDNEENEDILEDIVLTLTLFEDREMIEERLKTYAHLFDDKVMKQLKRRRYTGWGRLSRKLINGIRDKQSGKTILDFLKSDGFANRNFMQLIHDDSLTFKEDIQKAQVSGQGDSLHEHIANLAGSPAIKKGILQTVKVVDELVKVMGRHKPENIVIEMARENQTTQKGQKNSRERMKRIEEGIKELGSQILKEHPVENTQLQNEKLYLYYLQNGRDMYVDQELDINRLSDYDVDHIVPQSFLKDDSIDNKVLTRSDKARGKSDNVPSEEVVKKMKNYWRQLLNAKLITQRKFDNLTKAERGGLSELDKAGFIKRQLVETRQITKHVAQILDSRMNTKYDENDKLIREVKVITLKSKLVSDFRKDFQFYKVREINNYHHAHDAYLNAVVGTALIKKYPKLESEFVYGDYKVYDVRKMIAKSEQEIGKATAKYFFYSNIMNFFKTEITLANGEIRKRPLIETNGETGEIVWDKGRDFATVRKVLSMPQVNIVKKTEVQTGGFSKESILPKRNSDKLIARKKDWDPKKYGGFDSPTVAYSVLVVAKVEKGKSKKLKSVKELLGITIMERSSFEKNPIDFLEAKGYKEVKKDLIIKLPKYSLFELENGRKRMLASAGELQKGNELALPSKYVNFLYLASHYEKLKGSPEDNEQKQLFVEQHKHYLDEIIEQISEFSKRVILADANLDKVLSAYNKHRDKPIREQAENIIHLFTLTNLGAPAAFKYFDTTIDRKRYTSTKEVLDATLIHQSITGLYETRIDLSQLGGDGGGGGGSGGGGSGGGGSGGGGSGGWVQEISDSRPMLHIYLNGRRFLGLLNTGADKTCIAGRDWPANWPIHQTESSLQGLGMACGVARSSQPLRWQHEDKSGIIHPFVIPTLPFTLWGRDIMKDIKVRLMTDSPDDSQDLMIGAIESNLFADQISWKSDQPVWLNQWPLKQEKLQALQQLVTEQLQLGHLEESNSPWNTPVFVIKKKSGKWRLLQDLRAVNATMHDMGALQPGLPSPVAVPKGWEIIIIDLQDCFFNIKLHPEDCKRFAFSVPSPNFKRPYQRFQWKVLPQGMKNSPTLCQKFVDKAILTVRDKYQDSYIVHYMDDILLAHPSRSIVDEILTSMIQALNKHGLVVSTEKIQKYDNLKYLGTHIQGDSVSYQKLQIRTDKLRTLNDFQKLLGNINWIRPFLKLTTGELKPLFEILNGDSNPISTRKLTPEACKALQLMNERLSTARVKRLDLSQPWSLCILKTEYTPTACLWQDGVVEWIHLPHISPKVITPYDIFCTQLIIKGRHRSKELFSKDPDYIVVPYTKVQFDLLLQEKEDWPISLLGFLGEVHFHLPKDPLLTFTLQTAIIFPHMTSTTPLEKGIVIFTDGSANGRSVTYIQGREPIIKENTQNTAQQAEIVAVITAFEEVSQPFNLYTDSKYVTGLFPEIETATLSPRTKIYTELKHLQRLIHKRQEKFYIGHIRGHTGLPGPLAQGNAYADSLTRILTAGKRTADGSEFEKRTADGSEFESPKKKAKVE

SEQ ID NO: 3194 - protein, 2115 aa, synthetic construct
MPAAKRVKLDGGDKKYSIGLDIGTNSVGWAVITDEYKVPSKKFKVLGNTDRHSIKKNLIGALLFDSGETAEATRLKRTARRRYTRRKNRICYLQEIFSNEMAKVDDSFFHRLEESFLVEEDKKHERHPIFGNIVDEVAYHEKYPTIYHLRKKLVDSTDKADLRLIYLALAHMIKFRGHFLIEGDLNPDNSDVDKLFIQLVQTYNQLFEENPINASGVDAKAILSARLSKSRRLENLIAQLPGEKKNGLFGNLIALSLGLTPNFKSNFDLAEDAKLQLSKDTYDDDLDNLLAQIGDQYADLFLAAKNLSDAILLSDILRVNTEITKAPLSASMIKRYDEHHQDLTLLKALVRQQLPEKYKEIFFDQSKNGYAGYIDGGASQEEFYKFIKPILEKMDGTEELLVKLNREDLLRKQRTFDNGSIPHQIHLGELHAILRRQEDFYPFLKDNREKIEKILTFRIPYYVGPLARGNSRFAWMTRKSEETITPWNFEEVVDKGASAQSFIERMTNFDKNLPNEKVLPKHSLLYEYFTVYNELTKVKYVTEGMRKPAFLSGEQKKAIVDLLFKTNRKVTVKQLKEDYFKKIECFDSVEISGVEDRFNASLGTYHDLLKIIKDKDFLDNEENEDILEDIVLTLTLFEDREMIEERLKTYAHLFDDKVMKQLKRRRYTGWGRLSRKLINGIRDKQSGKTILDFLKSDGFANRNFMQLIHDDSLTFKEDIQKAQVSGQGDSLHEHIANLAGSPAIKKGILQTVKVVDELVKVMGRHKPENIVIEMARENQTTQKGQKNSRERMKRIEEGIKELGSQILKEHPVENTQLQNEKLYLYYLQNGRDMYVDQELDINRLSDYDVDHIVPQSFLKDDSIDNKVLTRSDKARGKSDNVPSEEVVKKMKNYWRQLLNAKLITQRKFDNLTKAERGGLSELDKAGFIKRQLVETRQITKHVAQILDSRMNTKYDENDKLIREVKVITLKSKLVSDFRKDFQFYKVREINNYHHAHDAYLNAVVGTALIKKYPKLESEFVYGDYKVYDVRKMIAKSEQEIGKATAKYFFYSNIMNFFKTEITLANGEIRKRPLIETNGETGEIVWDKGRDFATVRKVLSMPQVNIVKKTEVQTGGFSKESILPKRNSDKLIARKKDWDPKKYGGFDSPTVAYSVLVVAKVEKGKSKKLKSVKELLGITIMERSSFEKNPIDFLEAKGYKEVKKDLIIKLPKYSLFELENGRKRMLASAGELQKGNELALPSKYVNFLYLASHYEKLKGSPEDNEQKQLFVEQHKHYLDEIIEQISEFSKRVILADANLDKVLSAYNKHRDKPIREQAENIIHLFTLTNLGAPAAFKYFDTTIDRKRYTSTKEVLDATLIHQSITGLYETRIDLSQLGGDGGGGGGSGGGGSGGWVQEISDSRPMLHIYLNGRRFLGLLNTGADKTCIAGRDWPANWPIHQTESSLQGLGMACGVARSSQPLRWQHEDKSGIIHPFVIPTLPFTLWGRDIMKDIKVRLMTDSPDDSQDLMIGAIESNLFADQISWKSDQPVWLNQWPLKQEKLQALQQLVTEQLQLGHLEESNSPWNTPVFVIKKKSGKWRLLQDLRAVNATMHDMGALQPGLPSPVAVPKGWEIIIIDLQDCFFNIKLHPEDCKRFAFSVPSPNFKRPYQRFQWKVLPQGMKNSPTLCQKFVDKAILTVRDKYQDSYIVHYMDDILLAHPSRSIVDEILTSMIQALNKHGLVVSTEKIQKYDNLKYLGTHIQGDSVSYQKLQIRTDKLRTLNDFQKLLGNINWIRPFLKLTTGELKPLFEILNGDSNPISTRKLTPEACKALQLMNERLSTARVKRLDLSQPWSLCILKTEYTPTACLWQDGVVEWIHLPHISPKVITPYDIFCTQLIIKGRHRSKELFSKDPDYIVVPYTKVQFDLLLQEKEDWPISLLGFLGEVHFHLPKDPLLTFTLQTAIIFPHMTSTTPLEKGIVIFTDGSANGRSVTYIQGREPIIKENTQNTAQQAEIVAVITAFEEVSQPFNLYTDSKYVTGLFPEIETATLSPRTKIYTELKHLQRLIHKRQEKFYIGHIRGHTGLPGPLAQGNAYADSLTRILTAGKRTADGSEFEKRTADGSEFESPKKKAKVE

SEQ ID NO: 3195 - protein, 2114 aa, synthetic construct
MPAAKRVKLDGGDKKYSIGLDIGTNSVGWAVITDEYKVPSKKFKVLGNTDRHSIKKNLIGALLFDSGETAEATRLKRTARRRYTRRKNRICYLQEIFSNEMAKVDDSFFHRLEESFLVEEDKKHERHPIFGNIVDEVAYHEKYPTIYHLRKKLVDSTDKADLRLIYLALAHMIKFRGHFLIEGDLNPDNSDVDKLFIQLVQTYNQLFEENPINASGVDAKAILSARLSKSRRLENLIAQLPGEKKNGLFGNLIALSLGLTPNFKSNFDLAEDAKLQLSKDTYDDDLDNLLAQIGDQYADLFLAAKNLSDAILLSDILRVNTEITKAPLSASMIKRYDEHHQDLTLLKALVRQQLPEKYKEIFFDQSKNGYAGYIDGGASQEEFYKFIKPILEKMDGTEELLVKLNREDLLRKQRTFDNGSIPHQIHLGELHAILRRQEDFYPFLKDNREKIEKILTFRIPYYVGPLARGNSRFAWMTRKSEETITPWNFEEVVDKGASAQSFIERMTNFDKNLPNEKVLPKHSLLYEYFTVYNELTKVKYVTEGMRKPAFLSGEQKKAIVDLLFKTNRKVTVKQLKEDYFKKIECFDSVEISGVEDRFNASLGTYHDLLKIIKDKDFLDNEENEDILEDIVLTLTLFEDREMIEERLKTYAHLFDDKVMKQLKRRRYTGWGRLSRKLINGIRDKQSGKTILDFLKSDGFANRNFMQLIHDDSLTFKEDIQKAQVSGQGDSLHEHIANLAGSPAIKKGILQTVKVVDELVKVMGRHKPENIVIEMARENQTTQKGQKNSRERMKRIEEGIKELGSQILKEHPVENTQLQNEKLYLYYLQNGRDMYVDQELDINRLSDYDVDHIVPQSFLKDDSIDNKVLTRSDKARGKSDNVPSEEVVKKMKNYWRQLLNAKLITQRKFDNLTKAERGGLSELDKAGFIKRQLVETRQITKHVAQILDSRMNTKYDENDKLIREVKVITLKSKLVSDFRKDFQFYKVREINNYHHAHDAYLNAVVGTALIKKYPKLESEFVYGDYKVYDVRKMIAKSEQEIGKATAKYFFYSNIMNFFKTEITLANGEIRKRPLIETNGETGEIVWDKGRDFATVRKVLSMPQVNIVKKTEVQTGGFSKESILPKRNSDKLIARKKDWDPKKYGGFDSPTVAYSVLVVAKVEKGKSKKLKSVKELLGITIMERSSFEKNPIDFLEAKGYKEVKKDLIIKLPKYSLFELENGRKRMLASAGELQKGNELALPSKYVNFLYLASHYEKLKGSPEDNEQKQLFVEQHKHYLDEIIEQISEFSKRVILADANLDKVLSAYNKHRDKPIREQAENIIHLFTLTNLGAPAAFKYFDTTIDRKRYTSTKEVLDATLIHQSITGLYETRIDLSQLGGDGGPAPGGGGSSGGWVQEISDSRPMLHIYLNGRRFLGLLNTGADKTCIAGRDWPANWPIHQTESSLQGLGMACGVARSSQPLRWQHEDKSGIIHPFVIPTLPFTLWGRDIMKDIKVRLMTDSPDDSQDLMIGAIESNLFADQISWKSDQPVWLNQWPLKQEKLQALQQLVTEQLQLGHLEESNSPWNTPVFVIKKKSGKWRLLQDLRAVNATMHDMGALQPGLPSPVAVPKGWEIIIIDLQDCFFNIKLHPEDCKRFAFSVPSPNFKRPYQRFQWKVLPQGMKNSPTLCQKFVDKAILTVRDKYQDSYIVHYMDDILLAHPSRSIVDEILTSMIQALNKHGLVVSTEKIQKYDNLKYLGTHIQGDSVSYQKLQIRTDKLRTLNDFQKLLGNINWIRPFLKLTTGELKPLFEILNGDSNPISTRKLTPEACKALQLMNERLSTARVKRLDLSQPWSLCILKTEYTPTACLWQDGVVEWIHLPHISPKVITPYDIFCTQLIIKGRHRSKELFSKDPDYIVVPYTKVQFDLLLQEKEDWPISLLGFLGEVHFHLPKDPLLTFTLQTAIIFPHMTSTTPLEKGIVIFTDGSANGRSVTYIQGREPIIKENTQNTAQQAEIVAVITAFEEVSQPFNLYTDSKYVTGLFPEIETATLSPRTKIYTELKHLQRLIHKRQEKFYIGHIRGHTGLPGPLAQGNAYADSLTRILTAGKRTADGSEFEKRTADGSEFESPKKKAKVE

SEQ ID NO: 3196 - protein, 2024 aa, synthetic construct
MPAAKRVKLDGGDKKYSIGLDIGTNSVGWAVITDEYKVPSKKFKVLGNTDRHSIKKNLIGALLFDSGETAEATRLKRTARRRYTRRKNRICYLQEIFSNEMAKVDDSFFHRLEESFLVEEDKKHERHPIFGNIVDEVAYHEKYPTIYHLRKKLVDSTDKADLRLIYLALAHMIKFRGHFLIEGDLNPDNSDVDKLFIQLVQTYNQLFEENPINASGVDAKAILSARLSKSRRLENLIAQLPGEKKNGLFGNLIALSLGLTPNFKSNFDLAEDAKLQLSKDTYDDDLDNLLAQIGDQYADLFLAAKNLSDAILLSDILRVNTEITKAPLSASMIKRYDEHHQDLTLLKALVRQQLPEKYKEIFFDQSKNGYAGYIDGGASQEEFYKFIKPILEKMDGTEELLVKLNREDLLRKQRTFDNGSIPHQIHLGELHAILRRQEDFYPFLKDNREKIEKILTFRIPYYVGPLARGNSRFAWMTRKSEETITPWNFEEVVDKGASAQSFIERMTNFDKNLPNEKVLPKHSLLYEYFTVYNELTKVKYVTEGMRKPAFLSGEQKKAIVDLLFKTNRKVTVKQLKEDYFKKIECFDSVEISGVEDRFNASLGTYHDLLKIIKDKDFLDNEENEDILEDIVLTLTLFEDREMIEERLKTYAHLFDDKVMKQLKRRRYTGWGRLSRKLINGIRDKQSGKTILDFLKSDGFANRNFMQLIHDDSLTFKEDIQKAQVSGQGDSLHEHIANLAGSPAIKKGILQTVKVVDELVKVMGRHKPENIVIEMARENQTTQKGQKNSRERMKRIEEGIKELGSQILKEHPVENTQLQNEKLYLYYLQNGRDMYVDQELDINRLSDYDVDHIVPQSFLKDDSIDNKVLTRSDKARGKSDNVPSEEVVKKMKNYWRQLLNAKLITQRKFDNLTKAERGGLSELDKAGFIKRQLVETRQITKHVAQILDSRMNTKYDENDKLIREVKVITLKSKLVSDFRKDFQFYKVREINNYHHAHDAYLNAVVGTALIKKYPKLESEFVYGDYKVYDVRKMIAKSEQEIGKATAKYFFYSNIMNFFKTEITLANGEIRKRPLIETNGETGEIVWDKGRDFATVRKVLSMPQVNIVKKTEVQTGGFSKESILPKRNSDKLIARKKDWDPKKYGGFDSPTVAYSVLVVAKVEKGKSKKLKSVKELLGITIMERSSFEKNPIDFLEAKGYKEVKKDLIIKLPKYSLFELENGRKRMLASAGELQKGNELALPSKYVNFLYLASHYEKLKGSPEDNEQKQLFVEQHKHYLDEIIEQISEFSKRVILADANLDKVLSAYNKHRDKPIREQAENIIHLFTLTNLGAPAAFKYFDTTIDRKRYTSTKEVLDATLIHQSITGLYETRIDLSQLGGDGGGGGPAPEAAAKGGGRDIMKDIKVRLMTDSPDDSQDLMIGAIESNLFADQISWKSDQPVWLNQWPLKQEKLQALQQLVTEQLQLGHLEESNSPWNTPVFVIKKKSGKWRLLQDLRAVNATMHDMGALQPGLPSPVAVPKGWEIIIIDLQDCFFNIKLHPEDCKRFAFSVPSPNFKRPYQRFQWKVLPQGMKNSPTLCQKFVDKAILTVRDKYQDSYIVHYMDDILLAHPSRSIVDEILTSMIQALNKHGLVVSTEKIQKYDNLKYLGTHIQGDSVSYQKLQIRTDKLRTLNDFQKLLGNINWIRPFLKLTTGELKPLFEILNGDSNPISTRKLTPEACKALQLMNERLSTARVKRLDLSQPWSLCILKTEYTPTACLWQDGVVEWIHLPHISPKVITPYDIFCTQLIIKGRHRSKELFSKDPDYIVVPYTKVQFDLLLQEKEDWPISLLGFLGEVHFHLPKDPLLTFTLQTAIIFPHMTSTTPLEKGIVIFTDGSANGRSVTYIQGREPIIKENTQNTAQQAEIVAVITAFEEVSQPFNLYTDSKYVTGLFPEIETATLSPRTKIYTELKHLQRLIHKRQEKFYIGHIRGHTGLPGPLAQGNAYADSLTRILTAGKRTADGSEFEKRTADGSEFESPKKKAKVE

SEQ ID NO: 3197 - protein, 2059 aa, synthetic construct
MPAAKRVKLDGGDKKYSIGLDIGTNSVGWAVITDEYKVPSKKFKVLGNTDRHSIKKNLIGALLFDSGETAEATRLKRTARRRYTRRKNRICYLQEIFSNEMAKVDDSFFHRLEESFLVEEDKKHERHPIFGNIVDEVAYHEKYPTIYHLRKKLVDSTDKADLRLIYLALAHMIKFRGHFLIEGDLNPDNSDVDKLFIQLVQTYNQLFEENPINASGVDAKAILSARLSKSRRLENLIAQLPGEKKNGLFGNLIALSLGLTPNFKSNFDLAEDAKLQLSKDTYDDDLDNLLAQIGDQYADLFLAAKNLSDAILLSDILRVNTEITKAPLSASMIKRYDEHHQDLTLLKALVRQQLPEKYKEIFFDQSKNGYAGYIDGGASQEEFYKFIKPILEKMDGTEELLVKLNREDLLRKQRTFDNGSIPHQIHLGELHAILRRQEDFYPFLKDNREKIEKILTFRIPYYVGPLARGNSRFAWMTRKSEETITPWNFEEVVDKGASAQSFIERMTNFDKNLPNEKVLPKHSLLYEYFTVYNELTKVKYVTEGMRKPAFLSGEQKKAIVDLLFKTNRKVTVKQLKEDYFKKIECFDSVEISGVEDRFNASLGTYHDLLKIIKDKDFLDNEENEDILEDIVLTLTLFEDREMIEERLKTYAHLFDDKVMKQLKRRRYTGWGRLSRKLINGIRDKQSGKTILDFLKSDGFANRNFMQLIHDDSLTFKEDIQKAQVSGQGDSLHEHIANLAGSPAIKKGILQTVKVVDELVKVMGRHKPENIVIEMARENQTTQKGQKNSRERMKRIEEGIKELGSQILKEHPVENTQLQNEKLYLYYLQNGRDMYVDQELDINRLSDYDVDHIVPQSFLKDDSIDNKVLTRSDKARGKSDNVPSEEVVKKMKNYWRQLLNAKLITQRKFDNLTKAERGGLSELDKAGFIKRQLVETRQITKHVAQILDSRMNTKYDENDKLIREVKVITLKSKLVSDFRKDFQFYKVREINNYHHAHDAYLNAVVGTALIKKYPKLESEFVYGDYKVYDVRKMIAKSEQEIGKATAKYFFYSNIMNFFKTEITLANGEIRKRPLIETNGETGEIVWDKGRDFATVRKVLSMPQVNIVKKTEVQTGGFSKESILPKRNSDKLIARKKDWDPKKYGGFDSPTVAYSVLVVAKVEKGKSKKLKSVKELLGITIMERSSFEKNPIDFLEAKGYKEVKKDLIIKLPKYSLFELENGRKRMLASAGELQKGNELALPSKYVNFLYLASHYEKLKGSPEDNEQKQLFVEQHKHYLDEIIEQISEFSKRVILADANLDKVLSAYNKHRDKPIREQAENIIHLFTLTNLGAPAAFKYFDTTIDRKRYTSTKEVLDATLIHQSITGLYETRIDLSQLGGDGGAEAAAKEAAAKEAAAKEAAAKALEAEAAAKEAAAKEAAAKEAAAKAGGGRDIMKDIKVRLMTDSPDDSQDLMIGAIESNLFADQISWKSDQPVWLNQWPLKQEKLQALQQLVTEQLQLGHLEESNSPWNTPVFVIKKKSGKWRLLQDLRAVNATMHDMGALQPGLPSPVAVPKGWEIIIIDLQDCFFNIKLHPEDCKRFAFSVPSPNFKRPYQRFQWKVLPQGMKNSPTLCQKFVDKAILTVRDKYQDSYIVHYMDDILLAHPSRSIVDEILTSMIQALNKHGLVVSTEKIQKYDNLKYLGTHIQGDSVSYQKLQIRTDKLRTLNDFQKLLGNINWIRPFLKLTTGELKPLFEILNGDSNPISTRKLTPEACKALQLMNERLSTARVKRLDLSQPWSLCILKTEYTPTACLWQDGVVEWIHLPHISPKVITPYDIFCTQLIIKGRHRSKELFSKDPDYIVVPYTKVQFDLLLQEKEDWPISLLGFLGEVHFHLPKDPLLTFTLQTAIIFPHMTSTTPLEKGIVIFTDGSANGRSVTYIQGREPIIKENTQNTAQQAEIVAVITAFEEVSQPFNLYTDSKYVTGLFPEIETATLSPRTKIYTELKHLQRLIHKRQEKFYIGHIRGHTGLPGPLAQGNAYADSLTRILTAGKRTADGSEFEKRTADGSEFESPKKKAKVE

SEQ ID NO: 3198 - protein, 2024 aa, synthetic construct
MPAAKRVKLDGGDKKYSIGLDIGTNSVGWAVITDEYKVPSKKFKVLGNTDRHSIKKNLIGALLFDSGETAEATRLKRTARRRYTRRKNRICYLQEIFSNEMAKVDDSFFHRLEESFLVEEDKKHERHPIFGNIVDEVAYHEKYPTIYHLRKKLVDSTDKADLRLIYLALAHMIKFRGHFLIEGDLNPDNSDVDKLFIQLVQTYNQLFEENPINASGVDAKAILSARLSKSRRLENLIAQLPGEKKNGLFGNLIALSLGLTPNFKSNFDLAEDAKLQLSKDTYDDDLDNLLAQIGDQYADLFLAAKNLSDAILLSDILRVNTEITKAPLSASMIKRYDEHHQDLTLLKALVRQQLPEKYKEIFFDQSKNGYAGYIDGGASQEEFYKFIKPILEKMDGTEELLVKLNREDLLRKQRTFDNGSIPHQIHLGELHAILRRQEDFYPFLKDNREKIEKILTFRIPYYVGPLARGNSRFAWMTRKSEETITPWNFEEVVDKGASAQSFIERMTNFDKNLPNEKVLPKHSLLYEYFTVYNELTKVKYVTEGMRKPAFLSGEQKKAIVDLLFKTNRKVTVKQLKEDYFKKIECFDSVEISGVEDRFNASLGTYHDLLKIIKDKDFLDNEENEDILEDIVLTLTLFEDREMIEERLKTYAHLFDDKVMKQLKRRRYTGWGRLSRKLINGIRDKQSGKTILDFLKSDGFANRNFMQLIHDDSLTFKEDIQKAQVSGQGDSLHEHIANLAGSPAIKKGILQTVKVVDELVKVMGRHKPENIVIEMARENQTTQKGQKNSRERMKRIEEGIKELGSQILKEHPVENTQLQNEKLYLYYLQNGRDMYVDQELDINRLSDYDVDHIVPQSFLKDDSIDNKVLTRSDKARGKSDNVPSEEVVKKMKNYWRQLLNAKLITQRKFDNLTKAERGGLSELDKAGFIKRQLVETRQITKHVAQILDSRMNTKYDENDKLIREVKVITLKSKLVSDFRKDFQFYKVREINNYHHAHDAYLNAVVGTALIKKYPKLESEFVYGDYKVYDVRKMIAKSEQEIGKATAKYFFYSNIMNFFKTEITLANGEIRKRPLIETNGETGEIVWDKGRDFATVRKVLSMPQVNIVKKTEVQTGGFSKESILPKRNSDKLIARKKDWDPKKYGGFDSPTVAYSVLVVAKVEKGKSKKLKSVKELLGITIMERSSFEKNPIDFLEAKGYKEVKKDLIIKLPKYSLFELENGRKRMLASAGELQKGNELALPSKYVNFLYLASHYEKLKGSPEDNEQKQLFVEQHKHYLDEIIEQISEFSKRVILADANLDKVLSAYNKHRDKPIREQAENIIHLFTLTNLGAPAAFKYFDTTIDRKRYTSTKEVLDATLIHQSITGLYETRIDLSQLGGDGGPAPGSSEAAAKGGGRDIMKDIKVRLMTDSPDDSQDLMIGAIESNLFADQISWKSDQPVWLNQWPLKQEKLQALQQLVTEQLQLGHLEESNSPWNTPVFVIKKKSGKWRLLQDLRAVNATMHDMGALQPGLPSPVAVPKGWEIIIIDLQDCFFNIKLHPEDCKRFAFSVPSPNFKRPYQRFQWKVLPQGMKNSPTLCQKFVDKAILTVRDKYQDSYIVHYMDDILLAHPSRSIVDEILTSMIQALNKHGLVVSTEKIQKYDNLKYLGTHIQGDSVSYQKLQIRTDKLRTLNDFQKLLGNINWIRPFLKLTTGELKPLFEILNGDSNPISTRKLTPEACKALQLMNERLSTARVKRLDLSQPWSLCILKTEYTPTACLWQDGVVEWIHLPHISPKVITPYDIFCTQLIIKGRHRSKELFSKDPDYIVVPYTKVQFDLLLQEKEDWPISLLGFLGEVHFHLPKDPLLTFTLQTAIIFPHMTSTTPLEKGIVIFTDGSANGRSVTYIQGREPIIKENTQNTAQQAEIVAVITAFEEVSQPFNLYTDSKYVTGLFPEIETATLSPRTKIYTELKHLQRLIHKRQEKFYIGHIRGHTGLPGPLAQGNAYADSLTRILTAGKRTADGSEFEKRTADGSEFESPKKKAKVE

SEQ ID NO: 3199 - protein, 2022 aa, synthetic construct
MPAAKRVKLDGGDKKYSIGLDIGTNSVGWAVITDEYKVPSKKFKVLGNTDRHSIKKNLIGALLFDSGETAEATRLKRTARRRYTRRKNRICYLQEIFSNEMAKVDDSFFHRLEESFLVEEDKKHERHPIFGNIVDEVAYHEKYPTIYHLRKKLVDSTDKADLRLIYLALAHMIKFRGHFLIEGDLNPDNSDVDKLFIQLVQTYNQLFEENPINASGVDAKAILSARLSKSRRLENLIAQLPGEKKNGLFGNLIALSLGLTPNFKSNFDLAEDAKLQLSKDTYDDDLDNLLAQIGDQYADLFLAAKNLSDAILLSDILRVNTEITKAPLSASMIKRYDEHHQDLTLLKALVRQQLPEKYKEIFFDQSKNGYAGYIDGGASQEEFYKFIKPILEKMDGTEELLVKLNREDLLRKQRTFDNGSIPHQIHLGELHAILRRQEDFYPFLKDNREKIEKILTFRIPYYVGPLARGNSRFAWMTRKSEETITPWNFEEVVDKGASAQSFIERMTNFDKNLPNEKVLPKHSLLYEYFTVYNELTKVKYVTEGMRKPAFLSGEQKKAIVDLLFKTNRKVTVKQLKEDYFKKIECFDSVEISGVEDRFNASLGTYHDLLKIIKDKDFLDNEENEDILEDIVLTLTLFEDREMIEERLKTYAHLFDDKVMKQLKRRRYTGWGRLSRKLINGIRDKQSGKTILDFLKSDGFANRNFMQLIHDDSLTFKEDIQKAQVSGQGDSLHEHIANLAGSPAIKKGILQTVKVVDELVKVMGRHKPENIVIEMARENQTTQKGQKNSRERMKRIEEGIKELGSQILKEHPVENTQLQNEKLYLYYLQNGRDMYVDQELDINRLSDYDVDHIVPQSFLKDDSIDNKVLTRSDKARGKSDNVPSEEVVKKMKNYWRQLLNAKLITQRKFDNLTKAERGGLSELDKAGFIKRQLVETRQITKHVAQILDSRMNTKYDENDKLIREVKVITLKSKLVSDFRKDFQFYKVREINNYHHAHDAYLNAVVGTALIKKYPKLESEFVYGDYKVYDVRKMIAKSEQEIGKATAKYFFYSNIMNFFKTEITLANGEIRKRPLIETNGETGEIVWDKGRDFATVRKVLSMPQVNIVKKTEVQTGGFSKESILPKRNSDKLIARKKDWDPKKYGGFDSPTVAYSVLVVAKVEKGKSKKLKSVKELLGITIMERSSFEKNPIDFLEAKGYKEVKKDLIIKLPKYSLFELENGRKRMLASAGELQKGNELALPSKYVNFLYLASHYEKLKGSPEDNEQKQLFVEQHKHYLDEIIEQISEFSKRVILADANLDKVLSAYNKHRDKPIREQAENIIHLFTLTNLGAPAAFKYFDTTIDRKRYTSTKEVLDATLIHQSITGLYETRIDLSQLGGDGGGGSGGGGSSGGGRDIMKDIKVRLMTDSPDDSQDLMIGAIESNLFADQISWKSDQPVWLNQWPLKQEKLQALQQLVTEQLQLGHLEESNSPWNTPVFVIKKKSGKWRLLQDLRAVNATMHDMGALQPGLPSPVAVPKGWEIIIIDLQDCFFNIKLHPEDCKRFAFSVPSPNFKRPYQRFQWKVLPQGMKNSPTLCQKFVDKAILTVRDKYQDSYIVHYMDDILLAHPSRSIVDEILTSMIQALNKHGLVVSTEKIQKYDNLKYLGTHIQGDSVSYQKLQIRTDKLRTLNDFQKLLGNINWIRPFLKLTTGELKPLFEILNGDSNPISTRKLTPEACKALQLMNERLSTARVKRLDLSQPWSLCILKTEYTPTACLWQDGVVEWIHLPHISPKVITPYDIFCTQLIIKGRHRSKELFSKDPDYIVVPYTKVQFDLLLQEKEDWPISLLGFLGEVHFHLPKDPLLTFTLQTAIIFPHMTSTTPLEKGIVIFTDGSANGRSVTYIQGREPIIKENTQNTAQQAEIVAVITAFEEVSQPFNLYTDSKYVTGLFPEIETATLSPRTKIYTELKHLQRLIHKRQEKFYIGHIRGHTGLPGPLAQGNAYADSLTRILTAGKRTADGSEFEKRTADGSEFESPKKKAKVE

SEQ ID NO: 3200 - protein, 2024 aa, synthetic construct
MPAAKRVKLDGGDKKYSIGLDIGTNSVGWAVITDEYKVPSKKFKVLGNTDRHSIKKNLIGALLFDSGETAEATRLKRTARRRYTRRKNRICYLQEIFSNEMAKVDDSFFHRLEESFLVEEDKKHERHPIFGNIVDEVAYHEKYPTIYHLRKKLVDSTDKADLRLIYLALAHMIKFRGHFLIEGDLNPDNSDVDKLFIQLVQTYNQLFEENPINASGVDAKAILSARLSKSRRLENLIAQLPGEKKNGLFGNLIALSLGLTPNFKSNFDLAEDAKLQLSKDTYDDDLDNLLAQIGDQYADLFLAAKNLSDAILLSDILRVNTEITKAPLSASMIKRYDEHHQDLTLLKALVRQQLPEKYKEIFFDQSKNGYAGYIDGGASQEEFYKFIKPILEKMDGTEELLVKLNREDLLRKQRTFDNGSIPHQIHLGELHAILRRQEDFYPFLKDNREKIEKILTFRIPYYVGPLARGNSRFAWMTRKSEETITPWNFEEVVDKGASAQSFIERMTNFDKNLPNEKVLPKHSLLYEYFTVYNELTKVKYVTEGMRKPAFLSGEQKKAIVDLLFKTNRKVTVKQLKEDYFKKIECFDSVEISGVEDRFNASLGTYHDLLKIIKDKDFLDNEENEDILEDIVLTLTLFEDREMIEERLKTYAHLFDDKVMKQLKRRRYTGWGRLSRKLINGIRDKQSGKTILDFLKSDGFANRNFMQLIHDDSLTFKEDIQKAQVSGQGDSLHEHIANLAGSPAIKKGILQTVKVVDELVKVMGRHKPENIVIEMARENQTTQKGQKNSRERMKRIEEGIKELGSQILKEHPVENTQLQNEKLYLYYLQNGRDMYVDQELDINRLSDYDVDHIVPQSFLKDDSIDNKVLTRSDKARGKSDNVPSEEVVKKMKNYWRQLLNAKLITQRKFDNLTKAERGGLSELDKAGFIKRQLVETRQITKHVAQILDSRMNTKYDENDKLIREVKVITLKSKLVSDFRKDFQFYKVREINNYHHAHDAYLNAVVGTALIKKYPKLESEFVYGDYKVYDVRKMIAKSEQEIGKATAKYFFYSNIMNFFKTEITLANGEIRKRPLIETNGETGEIVWDKGRDFATVRKVLSMPQVNIVKKTEVQTGGFSKESILPKRNSDKLIARKKDWDPKKYGGFDSPTVAYSVLVVAKVEKGKSKKLKSVKELLGITIMERSSFEKNPIDFLEAKGYKEVKKDLIIKLPKYSLFELENGRKRMLASAGELQKGNELALPSKYVNFLYLASHYEKLKGSPEDNEQKQLFVEQHKHYLDEIIEQISEFSKRVILADANLDKVLSAYNKHRDKPIREQAENIIHLFTLTNLGAPAAFKYFDTTIDRKRYTSTKEVLDATLIHQSITGLYETRIDLSQLGGDGGPAPEAAAKGGGGGGRDIMKDIKVRLMTDSPDDSQDLMIGAIESNLFADQISWKSDQPVWLNQWPLKQEKLQALQQLVTEQLQLGHLEESNSPWNTPVFVIKKKSGKWRLLQDLRAVNATMHDMGALQPGLPSPVAVPKGWEIIIIDLQDCFFNIKLHPEDCKRFAFSVPSPNFKRPYQRFQWKVLPQGMKNSPTLCQKFVDKAILTVRDKYQDSYIVHYMDDILLAHPSRSIVDEILTSMIQALNKHGLVVSTEKIQKYDNLKYLGTHIQGDSVSYQKLQIRTDKLRTLNDFQKLLGNINWIRPFLKLTTGELKPLFEILNGDSNPISTRKLTPEACKALQLMNERLSTARVKRLDLSQPWSLCILKTEYTPTACLWQDGVVEWIHLPHISPKVITPYDIFCTQLIIKGRHRSKELFSKDPDYIVVPYTKVQFDLLLQEKEDWPISLLGFLGEVHFHLPKDPLLTFTLQTAIIFPHMTSTTPLEKGIVIFTDGSANGRSVTYIQGREPIIKENTQNTAQQAEIVAVITAFEEVSQPFNLYTDSKYVTGLFPEIETATLSPRTKIYTELKHLQRLIHKRQEKFYIGHIRGHTGLPGPLAQGNAYADSLTRILTAGKRTADGSEFEKRTADGSEFESPKKKAKVE

SEQ ID NO: 3201 - protein, 2028 aa, synthetic construct
MPAAKRVKLDGGDKKYSIGLDIGTNSVGWAVITDEYKVPSKKFKVLGNTDRHSIKKNLIGALLFDSGETAEATRLKRTARRRYTRRKNRICYLQEIFSNEMAKVDDSFFHRLEESFLVEEDKKHERHPIFGNIVDEVAYHEKYPTIYHLRKKLVDSTDKADLRLIYLALAHMIKFRGHFLIEGDLNPDNSDVDKLFIQLVQTYNQLFEENPINASGVDAKAILSARLSKSRRLENLIAQLPGEKKNGLFGNLIALSLGLTPNFKSNFDLAEDAKLQLSKDTYDDDLDNLLAQIGDQYADLFLAAKNLSDAILLSDILRVNTEITKAPLSASMIKRYDEHHQDLTLLKALVRQQLPEKYKEIFFDQSKNGYAGYIDGGASQEEFYKFIKPILEKMDGTEELLVKLNREDLLRKQRTFDNGSIPHQIHLGELHAILRRQEDFYPFLKDNREKIEKILTFRIPYYVGPLARGNSRFAWMTRKSEETITPWNFEEVVDKGASAQSFIERMTNFDKNLPNEKVLPKHSLLYEYFTVYNELTKVKYVTEGMRKPAFLSGEQKKAIVDLLFKTNRKVTVKQLKEDYFKKIECFDSVEISGVEDRFNASLGTYHDLLKIIKDKDFLDNEENEDILEDIVLTLTLFEDREMIEERLKTYAHLFDDKVMKQLKRRRYTGWGRLSRKLINGIRDKQSGKTILDFLKSDGFANRNFMQLIHDDSLTFKEDIQKAQVSGQGDSLHEHIANLAGSPAIKKGILQTVKVVDELVKVMGRHKPENIVIEMARENQTTQKGQKNSRERMKRIEEGIKELGSQILKEHPVENTQLQNEKLYLYYLQNGRDMYVDQELDINRLSDYDVDHIVPQSFLKDDSIDNKVLTRSDKARGKSDNVPSEEVVKKMKNYWRQLLNAKLITQRKFDNLTKAERGGLSELDKAGFIKRQLVETRQITKHVAQILDSRMNTKYDENDKLIREVKVITLKSKLVSDFRKDFQFYKVREINNYHHAHDAYLNAVVGTALIKKYPKLESEFVYGDYKVYDVRKMIAKSEQEIGKATAKYFFYSNIMNFFKTEITLANGEIRKRPLIETNGETGEIVWDKGRDFATVRKVLSMPQVNIVKKTEVQTGGFSKESILPKRNSDKLIARKKDWDPKKYGGFDSPTVAYSVLVVAKVEKGKSKKLKSVKELLGITIMERSSFEKNPIDFLEAKGYKEVKKDLIIKLPKYSLFELENGRKRMLASAGELQKGNELALPSKYVNFLYLASHYEKLKGSPEDNEQKQLFVEQHKHYLDEIIEQISEFSKRVILADANLDKVLSAYNKHRDKPIREQAENIIHLFTLTNLGAPAAFKYFDTTIDRKRYTSTKEVLDATLIHQSITGLYETRIDLSQLGGDGGEAAAKGGGGSEAAAKGGGRDIMKDIKVRLMTDSPDDSQDLMIGAIESNLFADQISWKSDQPVWLNQWPLKQEKLQALQQLVTEQLQLGHLEESNSPWNTPVFVIKKKSGKWRLLQDLRAVNATMHDMGALQPGLPSPVAVPKGWEIIIIDLQDCFFNIKLHPEDCKRFAFSVPSPNFKRPYQRFQWKVLPQGMKNSPTLCQKFVDKAILTVRDKYQDSYIVHYMDDILLAHPSRSIVDEILTSMIQALNKHGLVVSTEKIQKYDNLKYLGTHIQGDSVSYQKLQIRTDKLRTLNDFQKLLGNINWIRPFLKLTTGELKPLFEILNGDSNPISTRKLTPEACKALQLMNERLSTARVKRLDLSQPWSLCILKTEYTPTACLWQDGVVEWIHLPHISPKVITPYDIFCTQLIIKGRHRSKELFSKDPDYIVVPYTKVQFDLLLQEKEDWPISLLGFLGEVHFHLPKDPLLTFTLQTAIIFPHMTSTTPLEKGIVIFTDGSANGRSVTYIQGREPIIKENTQNTAQQAEIVAVITAFEEVSQPFNLYTDSKYVTGLFPEIETATLSPRTKIYTELKHLQRLIHKRQEKFYIGHIRGHTGLPGPLAQGNAYADSLTRILTAGKRTADGSEFEKRTADGSEFESPKKKAKVE

SEQ ID NO: 3202 - protein, 2019 aa, synthetic construct
MPAAKRVKLDGGDKKYSIGLDIGTNSVGWAVITDEYKVPSKKFKVLGNTDRHSIKKNLIGALLFDSGETAEATRLKRTARRRYTRRKNRICYLQEIFSNEMAKVDDSFFHRLEESFLVEEDKKHERHPIFGNIVDEVAYHEKYPTIYHLRKKLVDSTDKADLRLIYLALAHMIKFRGHFLIEGDLNPDNSDVDKLFIQLVQTYNQLFEENPINASGVDAKAILSARLSKSRRLENLIAQLPGEKKNGLFGNLIALSLGLTPNFKSNFDLAEDAKLQLSKDTYDDDLDNLLAQIGDQYADLFLAAKNLSDAILLSDILRVNTEITKAPLSASMIKRYDEHHQDLTLLKALVRQQLPEKYKEIFFDQSKNGYAGYIDGGASQEEFYKFIKPILEKMDGTEELLVKLNREDLLRKQRTFDNGSIPHQIHLGELHAILRRQEDFYPFLKDNREKIEKILTFRIPYYVGPLARGNSRFAWMTRKSEETITPWNFEEVVDKGASAQSFIERMTNFDKNLPNEKVLPKHSLLYEYFTVYNELTKVKYVTEGMRKPAFLSGEQKKAIVDLLFKTNRKVTVKQLKEDYFKKIECFDSVEISGVEDRFNASLGTYHDLLKIIKDKDFLDNEENEDILEDIVLTLTLFEDREMIEERLKTYAHLFDDKVMKQLKRRRYTGWGRLSRKLINGIRDKQSGKTILDFLKSDGFANRNFMQLIHDDSLTFKEDIQKAQVSGQGDSLHEHIANLAGSPAIKKGILQTVKVVDELVKVMGRHKPENIVIEMARENQTTQKGQKNSRERMKRIEEGIKELGSQILKEHPVENTQLQNEKLYLYYLQNGRDMYVDQELDINRLSDYDVDHIVPQSFLKDDSIDNKVLTRSDKARGKSDNVPSEEVVKKMKNYWRQLLNAKLITQRKFDNLTKAERGGLSELDKAGFIKRQLVETRQITKHVAQILDSRMNTKYDENDKLIREVKVITLKSKLVSDFRKDFQFYKVREINNYHHAHDAYLNAVVGTALIKKYPKLESEFVYGDYKVYDVRKMIAKSEQEIGKATAKYFFYSNIMNFFKTEITLANGEIRKRPLIETNGETGEIVWDKGRDFATVRKVLSMPQVNIVKKTEVQTGGFSKESILPKRNSDKLIARKKDWDPKKYGGFDSPTVAYSVLVVAKVEKGKSKKLKSVKELLGITIMERSSFEKNPIDFLEAKGYKEVKKDLIIKLPKYSLFELENGRKRMLASAGELQKGNELALPSKYVNFLYLASHYEKLKGSPEDNEQKQLFVEQHKHYLDEIIEQISEFSKRVILADANLDKVLSAYNKHRDKPIREQAENIIHLFTLTNLGAPAAFKYFDTTIDRKRYTSTKEVLDATLIHQSITGLYETRIDLSQLGGDGGGGGPAPGGGRDIMKDIKVRLMTDSPDDSQDLMIGAIESNLFADQISWKSDQPVWLNQWPLKQEKLQALQQLVTEQLQLGHLEESNSPWNTPVFVIKKKSGKWRLLQDLRAVNATMHDMGALQPGLPSPVAVPKGWEIIIIDLQDCFFNIKLHPEDCKRFAFSVPSPNFKRPYQRFQWKVLPQGMKNSPTLCQKFVDKAILTVRDKYQDSYIVHYMDDILLAHPSRSIVDEILTSMIQALNKHGLVVSTEKIQKYDNLKYLGTHIQGDSVSYQKLQIRTDKLRTLNDFQKLLGNINWIRPFLKLTTGELKPLFEILNGDSNPISTRKLTPEACKALQLMNERLSTARVKRLDLSQPWSLCILKTEYTPTACLWQDGVVEWIHLPHISPKVITPYDIFCTQLIIKGRHRSKELFSKDPDYIVVPYTKVQFDLLLQEKEDWPISLLGFLGEVHFHLPKDPLLTFTLQTAIIFPHMTSTTPLEKGIVIFTDGSANGRSVTYIQGREPIIKENTQNTAQQAEIVAVITAFEEVSQPFNLYTDSKYVTGLFPEIETATLSPRTKIYTELKHLQRLIHKRQEKFYIGHIRGHTGLPGPLAQGNAYADSLTRILTAGKRTADGSEFEKRTADGSEFESPKKKAKVE

SEQ ID NO: 3203 - protein, 2028 aa, synthetic construct
MPAAKRVKLDGGDKKYSIGLDIGTNSVGWAVITDEYKVPSKKFKVLGNTDRHSIKKNLIGALLFDSGETAEATRLKRTARRRYTRRKNRICYLQEIFSNEMAKVDDSFFHRLEESFLVEEDKKHERHPIFGNIVDEVAYHEKYPTIYHLRKKLVDSTDKADLRLIYLALAHMIKFRGHFLIEGDLNPDNSDVDKLFIQLVQTYNQLFEENPINASGVDAKAILSARLSKSRRLENLIAQLPGEKKNGLFGNLIALSLGLTPNFKSNFDLAEDAKLQLSKDTYDDDLDNLLAQIGDQYADLFLAAKNLSDAILLSDILRVNTEITKAPLSASMIKRYDEHHQDLTLLKALVRQQLPEKYKEIFFDQSKNGYAGYIDGGASQEEFYKFIKPILEKMDGTEELLVKLNREDLLRKQRTFDNGSIPHQIHLGELHAILRRQEDFYPFLKDNREKIEKILTFRIPYYVGPLARGNSRFAWMTRKSEETITPWNFEEVVDKGASAQSFIERMTNFDKNLPNEKVLPKHSLLYEYFTVYNELTKVKYVTEGMRKPAFLSGEQKKAIVDLLFKTNRKVTVKQLKEDYFKKIECFDSVEISGVEDRFNASLGTYHDLLKIIKDKDFLDNEENEDILEDIVLTLTLFEDREMIEERLKTYAHLFDDKVMKQLKRRRYTGWGRLSRKLINGIRDKQSGKTILDFLKSDGFANRNFMQLIHDDSLTFKEDIQKAQVSGQGDSLHEHIANLAGSPAIKKGILQTVKVVDELVKVMGRHKPENIVIEMARENQTTQKGQKNSRERMKRIEEGIKELGSQILKEHPVENTQLQNEKLYLYYLQNGRDMYVDQELDINRLSDYDVDHIVPQSFLKDDSIDNKVLTRSDKARGKSDNVPSEEVVKKMKNYWRQLLNAKLITQRKFDNLTKAERGGLSELDKAGFIKRQLVETRQITKHVAQILDSRMNTKYDENDKLIREVKVITLKSKLVSDFRKDFQFYKVREINNYHHAHDAYLNAVVGTALIKKYPKLESEFVYGDYKVYDVRKMIAKSEQEIGKATAKYFFYSNIMNFFKTEITLANGEIRKRPLIETNGETGEIVWDKGRDFATVRKVLSMPQVNIVKKTEVQTGGFSKESILPKRNSDKLIARKKDWDPKKYGGFDSPTVAYSVLVVAKVEKGKSKKLKSVKELLGITIMERSSFEKNPIDFLEAKGYKEVKKDLIIKLPKYSLFELENGRKRMLASAGELQKGNELALPSKYVNFLYLASHYEKLKGSPEDNEQKQLFVEQHKHYLDEIIEQISEFSKRVILADANLDKVLSAYNKHRDKPIREQAENIIHLFTLTNLGAPAAFKYFDTTIDRKRYTSTKEVLDATLIHQSITGLYETRIDLSQLGGDGGGGGGSGGGGSGGGGSGGGRDIMKDIKVRLMTDSPDDSQDLMIGAIESNLFADQISWKSDQPVWLNQWPLKQEKLQALQQLVTEQLQLGHLEESNSPWNTPVFVIKKKSGKWRLLQDLRAVNATMHDMGALQPGLPSPVAVPKGWEIIIIDLQDCFFNIKLHPEDCKRFAFSVPSPNFKRPYQRFQWKVLPQGMKNSPTLCQKFVDKAILTVRDKYQDSYIVHYMDDILLAHPSRSIVDEILTSMIQALNKHGLVVSTEKIQKYDNLKYLGTHIQGDSVSYQKLQIRTDKLRTLNDFQKLLGNINWIRPFLKLTTGELKPLFEILNGDSNPISTRKLTPEACKALQLMNERLSTARVKRLDLSQPWSLCILKTEYTPTACLWQDGVVEWIHLPHISPKVITPYDIFCTQLIIKGRHRSKELFSKDPDYIVVPYTKVQFDLLLQEKEDWPISLLGFLGEVHFHLPKDPLLTFTLQTAIIFPHMTSTTPLEKGIVIFTDGSANGRSVTYIQGREPIIKENTQNTAQQAEIVAVITAFEEVSQPFNLYTDSKYVTGLFPEIETATLSPRTKIYTELKHLQRLIHKRQEKFYIGHIRGHTGLPGPLAQGNAYADSLTRILTAGKRTADGSEFEKRTADGSEFESPKKKAKVE

SEQ ID NO: 3204 - protein, 2022 aa, synthetic construct
MPAAKRVKLDGGDKKYSIGLDIGTNSVGWAVITDEYKVPSKKFKVLGNTDRHSIKKNLIGALLFDSGETAEATRLKRTARRRYTRRKNRICYLQEIFSNEMAKVDDSFFHRLEESFLVEEDKKHERHPIFGNIVDEVAYHEKYPTIYHLRKKLVDSTDKADLRLIYLALAHMIKFRGHFLIEGDLNPDNSDVDKLFIQLVQTYNQLFEENPINASGVDAKAILSARLSKSRRLENLIAQLPGEKKNGLFGNLIALSLGLTPNFKSNFDLAEDAKLQLSKDTYDDDLDNLLAQIGDQYADLFLAAKNLSDAILLSDILRVNTEITKAPLSASMIKRYDEHHQDLTLLKALVRQQLPEKYKEIFFDQSKNGYAGYIDGGASQEEFYKFIKPILEKMDGTEELLVKLNREDLLRKQRTFDNGSIPHQIHLGELHAILRRQEDFYPFLKDNREKIEKILTFRIPYYVGPLARGNSRFAWMTRKSEETITPWNFEEVVDKGASAQSFIERMTNFDKNLPNEKVLPKHSLLYEYFTVYNELTKVKYVTEGMRKPAFLSGEQKKAIVDLLFKTNRKVTVKQLKEDYFKKIECFDSVEISGVEDRFNASLGTYHDLLKIIKDKDFLDNEENEDILEDIVLTLTLFEDREMIEERLKTYAHLFDDKVMKQLKRRRYTGWGRLSRKLINGIRDKQSGKTILDFLKSDGFANRNFMQLIHDDSLTFKEDIQKAQVSGQGDSLHEHIANLAGSPAIKKGILQTVKVVDELVKVMGRHKPENIVIEMARENQTTQKGQKNSRERMKRIEEGIKELGSQILKEHPVENTQLQNEKLYLYYLQNGRDMYVDQELDINRLSDYDVDHIVPQSFLKDDSIDNKVLTRSDKARGKSDNVPSEEVVKKMKNYWRQLLNAKLITQRKFDNLTKAERGGLSELDKAGFIKRQLVETRQITKHVAQILDSRMNTKYDENDKLIREVKVITLKSKLVSDFRKDFQFYKVREINNYHHAHDAYLNAVVGTALIKKYPKLESEFVYGDYKVYDVRKMIAKSEQEIGKATAKYFFYSNIMNFFKTEITLANGEIRKRPLIETNGETGEIVWDKGRDFATVRKVLSMPQVNIVKKTEVQTGGFSKESILPKRNSDKLIARKKDWDPKKYGGFDSPTVAYSVLVVAKVEKGKSKKLKSVKELLGITIMERSSFEKNPIDFLEAKGYKEVKKDLIIKLPKYSLFELENGRKRMLASAGELQKGNELALPSKYVNFLYLASHYEKLKGSPEDNEQKQLFVEQHKHYLDEIIEQISEFSKRVILADANLDKVLSAYNKHRDKPIREQAENIIHLFTLTNLGAPAAFKYFDTTIDRKRYTSTKEVLDATLIHQSITGLYETRIDLSQLGGDGGGSSGGGPAPGGGRDIMKDIKVRLMTDSPDDSQDLMIGAIESNLFADQISWKSDQPVWLNQWPLKQEKLQALQQLVTEQLQLGHLEESNSPWNTPVFVIKKKSGKWRLLQDLRAVNATMHDMGALQPGLPSPVAVPKGWEIIIIDLQDCFFNIKLHPEDCKRFAFSVPSPNFKRPYQRFQWKVLPQGMKNSPTLCQKFVDKAILTVRDKYQDSYIVHYMDDILLAHPSRSIVDEILTSMIQALNKHGLVVSTEKIQKYDNLKYLGTHIQGDSVSYQKLQIRTDKLRTLNDFQKLLGNINWIRPFLKLTTGELKPLFEILNGDSNPISTRKLTPEACKALQLMNERLSTARVKRLDLSQPWSLCILKTEYTPTACLWQDGVVEWIHLPHISPKVITPYDIFCTQLIIKGRHRSKELFSKDPDYIVVPYTKVQFDLLLQEKEDWPISLLGFLGEVHFHLPKDPLLTFTLQTAIIFPHMTSTTPLEKGIVIFTDGSANGRSVTYIQGREPIIKENTQNTAQQAEIVAVITAFEEVSQPFNLYTDSKYVTGLFPEIETATLSPRTKIYTELKHLQRLIHKRQEKFYIGHIRGHTGLPGPLAQGNAYADSLTRILTAGKRTADGSEFEKRTADGSEFESPKKKAKVE

SEQ ID NO: 3205 - protein, 2022 aa, synthetic construct
MPAAKRVKLDGGDKKYSIGLDIGTNSVGWAVITDEYKVPSKKFKVLGNTDRHSIKKNLIGALLFDSGETAEATRLKRTARRRYTRRKNRICYLQEIFSNEMAKVDDSFFHRLEESFLVEEDKKHERHPIFGNIVDEVAYHEKYPTIYHLRKKLVDSTDKADLRLIYLALAHMIKFRGHFLIEGDLNPDNSDVDKLFIQLVQTYNQLFEENPINASGVDAKAILSARLSKSRRLENLIAQLPGEKKNGLFGNLIALSLGLTPNFKSNFDLAEDAKLQLSKDTYDDDLDNLLAQIGDQYADLFLAAKNLSDAILLSDILRVNTEITKAPLSASMIKRYDEHHQDLTLLKALVRQQLPEKYKEIFFDQSKNGYAGYIDGGASQEEFYKFIKPILEKMDGTEELLVKLNREDLLRKQRTFDNGSIPHQIHLGELHAILRRQEDFYPFLKDNREKIEKILTFRIPYYVGPLARGNSRFAWMTRKSEETITPWNFEEVVDKGASAQSFIERMTNFDKNLPNEKVLPKHSLLYEYFTVYNELTKVKYVTEGMRKPAFLSGEQKKAIVDLLFKTNRKVTVKQLKEDYFKKIECFDSVEISGVEDRFNASLGTYHDLLKIIKDKDFLDNEENEDILEDIVLTLTLFEDREMIEERLKTYAHLFDDKVMKQLKRRRYTGWGRLSRKLINGIRDKQSGKTILDFLKSDGFANRNFMQLIHDDSLTFKEDIQKAQVSGQGDSLHEHIANLAGSPAIKKGILQTVKVVDELVKVMGRHKPENIVIEMARENQTTQKGQKNSRERMKRIEEGIKELGSQILKEHPVENTQLQNEKLYLYYLQNGRDMYVDQELDINRLSDYDVDHIVPQSFLKDDSIDNKVLTRSDKARGKSDNVPSEEVVKKMKNYWRQLLNAKLITQRKFDNLTKAERGGLSELDKAGFIKRQLVETRQITKHVAQILDSRMNTKYDENDKLIREVKVITLKSKLVSDFRKDFQFYKVREINNYHHAHDAYLNAVVGTALIKKYPKLESEFVYGDYKVYDVRKMIAKSEQEIGKATAKYFFYSNIMNFFKTEITLANGEIRKRPLIETNGETGEIVWDKGRDFATVRKVLSMPQVNIVKKTEVQTGGFSKESILPKRNSDKLIARKKDWDPKKYGGFDSPTVAYSVLVVAKVEKGKSKKLKSVKELLGITIMERSSFEKNPIDFLEAKGYKEVKKDLIIKLPKYSLFELENGRKRMLASAGELQKGNELALPSKYVNFLYLASHYEKLKGSPEDNEQKQLFVEQHKHYLDEIIEQISEFSKRVILADANLDKVLSAYNKHRDKPIREQAENIIHLFTLTNLGAPAAFKYFDTTIDRKRYTSTKEVLDATLIHQSITGLYETRIDLSQLGGDGGGSSGGSGGGGGGRDIMKDIKVRLMTDSPDDSQDLMIGAIESNLFADQISWKSDQPVWLNQWPLKQEKLQALQQLVTEQLQLGHLEESNSPWNTPVFVIKKKSGKWRLLQDLRAVNATMHDMGALQPGLPSPVAVPKGWEIIIIDLQDCFFNIKLHPEDCKRFAFSVPSPNFKRPYQRFQWKVLPQGMKNSPTLCQKFVDKAILTVRDKYQDSYIVHYMDDILLAHPSRSIVDEILTSMIQALNKHGLVVSTEKIQKYDNLKYLGTHIQGDSVSYQKLQIRTDKLRTLNDFQKLLGNINWIRPFLKLTTGELKPLFEILNGDSNPISTRKLTPEACKALQLMNERLSTARVKRLDLSQPWSLCILKTEYTPTACLWQDGVVEWIHLPHISPKVITPYDIFCTQLIIKGRHRSKELFSKDPDYIVVPYTKVQFDLLLQEKEDWPISLLGFLGEVHFHLPKDPLLTFTLQTAIIFPHMTSTTPLEKGIVIFTDGSANGRSVTYIQGREPIIKENTQNTAQQAEIVAVITAFEEVSQPFNLYTDSKYVTGLFPEIETATLSPRTKIYTELKHLQRLIHKRQEKFYIGHIRGHTGLPGPLAQGNAYADSLTRILTAGKRTADGSEFEKRTADGSEFESPKKKAKVE

SEQ ID NO: 3206 - protein, 2021 aa, synthetic construct
MPAAKRVKLDGGDKKYSIGLDIGTNSVGWAVITDEYKVPSKKFKVLGNTDRHSIKKNLIGALLFDSGETAEATRLKRTARRRYTRRKNRICYLQEIFSNEMAKVDDSFFHRLEESFLVEEDKKHERHPIFGNIVDEVAYHEKYPTIYHLRKKLVDSTDKADLRLIYLALAHMIKFRGHFLIEGDLNPDNSDVDKLFIQLVQTYNQLFEENPINASGVDAKAILSARLSKSRRLENLIAQLPGEKKNGLFGNLIALSLGLTPNFKSNFDLAEDAKLQLSKDTYDDDLDNLLAQIGDQYADLFLAAKNLSDAILLSDILRVNTEITKAPLSASMIKRYDEHHQDLTLLKALVRQQLPEKYKEIFFDQSKNGYAGYIDGGASQEEFYKFIKPILEKMDGTEELLVKLNREDLLRKQRTFDNGSIPHQIHLGELHAILRRQEDFYPFLKDNREKIEKILTFRIPYYVGPLARGNSRFAWMTRKSEETITPWNFEEVVDKGASAQSFIERMTNFDKNLPNEKVLPKHSLLYEYFTVYNELTKVKYVTEGMRKPAFLSGEQKKAIVDLLFKTNRKVTVKQLKEDYFKKIECFDSVEISGVEDRFNASLGTYHDLLKIIKDKDFLDNEENEDILEDIVLTLTLFEDREMIEERLKTYAHLFDDKVMKQLKRRRYTGWGRLSRKLINGIRDKQSGKTILDFLKSDGFANRNFMQLIHDDSLTFKEDIQKAQVSGQGDSLHEHIANLAGSPAIKKGILQTVKVVDELVKVMGRHKPENIVIEMARENQTTQKGQKNSRERMKRIEEGIKELGSQILKEHPVENTQLQNEKLYLYYLQNGRDMYVDQELDINRLSDYDVDHIVPQSFLKDDSIDNKVLTRSDKARGKSDNVPSEEVVKKMKNYWRQLLNAKLITQRKFDNLTKAERGGLSELDKAGFIKRQLVETRQITKHVAQILDSRMNTKYDENDKLIREVKVITLKSKLVSDFRKDFQFYKVREINNYHHAHDAYLNAVVGTALIKKYPKLESEFVYGDYKVYDVRKMIAKSEQEIGKATAKYFFYSNIMNFFKTEITLANGEIRKRPLIETNGETGEIVWDKGRDFATVRKVLSMPQVNIVKKTEVQTGGFSKESILPKRNSDKLIARKKDWDPKKYGGFDSPTVAYSVLVVAKVEKGKSKKLKSVKELLGITIMERSSFEKNPIDFLEAKGYKEVKKDLIIKLPKYSLFELENGRKRMLASAGELQKGNELALPSKYVNFLYLASHYEKLKGSPEDNEQKQLFVEQHKHYLDEIIEQISEFSKRVILADANLDKVLSAYNKHRDKPIREQAENIIHLFTLTNLGAPAAFKYFDTTIDRKRYTSTKEVLDATLIHQSITGLYETRIDLSQLGGDGGEAAAKGGSGGGRDIMKDIKVRLMTDSPDDSQDLMIGAIESNLFADQISWKSDQPVWLNQWPLKQEKLQALQQLVTEQLQLGHLEESNSPWNTPVFVIKKKSGKWRLLQDLRAVNATMHDMGALQPGLPSPVAVPKGWEIIIIDLQDCFFNIKLHPEDCKRFAFSVPSPNFKRPYQRFQWKVLPQGMKNSPTLCQKFVDKAILTVRDKYQDSYIVHYMDDILLAHPSRSIVDEILTSMIQALNKHGLVVSTEKIQKYDNLKYLGTHIQGDSVSYQKLQIRTDKLRTLNDFQKLLGNINWIRPFLKLTTGELKPLFEILNGDSNPISTRKLTPEACKALQLMNERLSTARVKRLDLSQPWSLCILKTEYTPTACLWQDGVVEWIHLPHISPKVITPYDIFCTQLIIKGRHRSKELFSKDPDYIVVPYTKVQFDLLLQEKEDWPISLLGFLGEVHFHLPKDPLLTFTLQTAIIFPHMTSTTPLEKGIVIFTDGSANGRSVTYIQGREPIIKENTQNTAQQAEIVAVITAFEEVSQPFNLYTDSKYVTGLFPEIETATLSPRTKIYTELKHLQRLIHKRQEKFYIGHIRGHTGLPGPLAQGNAYADSLTRILTAGKRTADGSEFEKRTADGSEFESPKKKAKVE

SEQ ID NO: 3207 - protein, 2024 aa, synthetic construct
MPAAKRVKLDGGDKKYSIGLDIGTNSVGWAVITDEYKVPSKKFKVLGNTDRHSIKKNLIGALLFDSGETAEATRLKRTARRRYTRRKNRICYLQEIFSNEMAKVDDSFFHRLEESFLVEEDKKHERHPIFGNIVDEVAYHEKYPTIYHLRKKLVDSTDKADLRLIYLALAHMIKFRGHFLIEGDLNPDNSDVDKLFIQLVQTYNQLFEENPINASGVDAKAILSARLSKSRRLENLIAQLPGEKKNGLFGNLIALSLGLTPNFKSNFDLAEDAKLQLSKDTYDDDLDNLLAQIGDQYADLFLAAKNLSDAILLSDILRVNTEITKAPLSASMIKRYDEHHQDLTLLKALVRQQLPEKYKEIFFDQSKNGYAGYIDGGASQEEFYKFIKPILEKMDGTEELLVKLNREDLLRKQRTFDNGSIPHQIHLGELHAILRRQEDFYPFLKDNREKIEKILTFRIPYYVGPLARGNSRFAWMTRKSEETITPWNFEEVVDKGASAQSFIERMTNFDKNLPNEKVLPKHSLLYEYFTVYNELTKVKYVTEGMRKPAFLSGEQKKAIVDLLFKTNRKVTVKQLKEDYFKKIECFDSVEISGVEDRFNASLGTYHDLLKIIKDKDFLDNEENEDILEDIVLTLTLFEDREMIEERLKTYAHLFDDKVMKQLKRRRYTGWGRLSRKLINGIRDKQSGKTILDFLKSDGFANRNFMQLIHDDSLTFKEDIQKAQVSGQGDSLHEHIANLAGSPAIKKGILQTVKVVDELVKVMGRHKPENIVIEMARENQTTQKGQKNSRERMKRIEEGIKELGSQILKEHPVENTQLQNEKLYLYYLQNGRDMYVDQELDINRLSDYDVDHIVPQSFLKDDSIDNKVLTRSDKARGKSDNVPSEEVVKKMKNYWRQLLNAKLITQRKFDNLTKAERGGLSELDKAGFIKRQLVETRQITKHVAQILDSRMNTKYDENDKLIREVKVITLKSKLVSDFRKDFQFYKVREINNYHHAHDAYLNAVVGTALIKKYPKLESEFVYGDYKVYDVRKMIAKSEQEIGKATAKYFFYSNIMNFFKTEITLANGEIRKRPLIETNGETGEIVWDKGRDFATVRKVLSMPQVNIVKKTEVQTGGFSKESILPKRNSDKLIARKKDWDPKKYGGFDSPTVAYSVLVVAKVEKGKSKKLKSVKELLGITIMERSSFEKNPIDFLEAKGYKEVKKDLIIKLPKYSLFELENGRKRMLASAGELQKGNELALPSKYVNFLYLASHYEKLKGSPEDNEQKQLFVEQHKHYLDEIIEQISEFSKRVILADANLDKVLSAYNKHRDKPIREQAENIIHLFTLTNLGAPAAFKYFDTTIDRKRYTSTKEVLDATLIHQSITGLYETRIDLSQLGGDGGGSSEAAAKPAPGGGRDIMKDIKVRLMTDSPDDSQDLMIGAIESNLFADQISWKSDQPVWLNQWPLKQEKLQALQQLVTEQLQLGHLEESNSPWNTPVFVIKKKSGKWRLLQDLRAVNATMHDMGALQPGLPSPVAVPKGWEIIIIDLQDCFFNIKLHPEDCKRFAFSVPSPNFKRPYQRFQWKVLPQGMKNSPTLCQKFVDKAILTVRDKYQDSYIVHYMDDILLAHPSRSIVDEILTSMIQALNKHGLVVSTEKIQKYDNLKYLGTHIQGDSVSYQKLQIRTDKLRTLNDFQKLLGNINWIRPFLKLTTGELKPLFEILNGDSNPISTRKLTPEACKALQLMNERLSTARVKRLDLSQPWSLCILKTEYTPTACLWQDGVVEWIHLPHISPKVITPYDIFCTQLIIKGRHRSKELFSKDPDYIVVPYTKVQFDLLLQEKEDWPISLLGFLGEVHFHLPKDPLLTFTLQTAIIFPHMTSTTPLEKGIVIFTDGSANGRSVTYIQGREPIIKENTQNTAQQAEIVAVITAFEEVSQPFNLYTDSKYVTGLFPEIETATLSPRTKIYTELKHLQRLIHKRQEKFYIGHIRGHTGLPGPLAQGNAYADSLTRILTAGKRTADGSEFEKRTADGSEFESPKKKAKVE

SEQ ID NO: 3208 - protein, 2021 aa, synthetic construct
MPAAKRVKLDGGDKKYSIGLDIGTNSVGWAVITDEYKVPSKKFKVLGNTDRHSIKKNLIGALLFDSGETAEATRLKRTARRRYTRRKNRICYLQEIFSNEMAKVDDSFFHRLEESFLVEEDKKHERHPIFGNIVDEVAYHEKYPTIYHLRKKLVDSTDKADLRLIYLALAHMIKFRGHFLIEGDLNPDNSDVDKLFIQLVQTYNQLFEENPINASGVDAKAILSARLSKSRRLENLIAQLPGEKKNGLFGNLIALSLGLTPNFKSNFDLAEDAKLQLSKDTYDDDLDNLLAQIGDQYADLFLAAKNLSDAILLSDILRVNTEITKAPLSASMIKRYDEHHQDLTLLKALVRQQLPEKYKEIFFDQSKNGYAGYIDGGASQEEFYKFIKPILEKMDGTEELLVKLNREDLLRKQRTFDNGSIPHQIHLGELHAILRRQEDFYPFLKDNREKIEKILTFRIPYYVGPLARGNSRFAWMTRKSEETITPWNFEEVVDKGASAQSFIERMTNFDKNLPNEKVLPKHSLLYEYFTVYNELTKVKYVTEGMRKPAFLSGEQKKAIVDLLFKTNRKVTVKQLKEDYFKKIECFDSVEISGVEDRFNASLGTYHDLLKIIKDKDFLDNEENEDILEDIVLTLTLFEDREMIEERLKTYAHLFDDKVMKQLKRRRYTGWGRLSRKLINGIRDKQSGKTILDFLKSDGFANRNFMQLIHDDSLTFKEDIQKAQVSGQGDSLHEHIANLAGSPAIKKGILQTVKVVDELVKVMGRHKPENIVIEMARENQTTQKGQKNSRERMKRIEEGIKELGSQILKEHPVENTQLQNEKLYLYYLQNGRDMYVDQELDINRLSDYDVDHIVPQSFLKDDSIDNKVLTRSDKARGKSDNVPSEEVVKKMKNYWRQLLNAKLITQRKFDNLTKAERGGLSELDKAGFIKRQLVETRQITKHVAQILDSRMNTKYDENDKLIREVKVITLKSKLVSDFRKDFQFYKVREINNYHHAHDAYLNAVVGTALIKKYPKLESEFVYGDYKVYDVRKMIAKSEQEIGKATAKYFFYSNIMNFFKTEITLANGEIRKRPLIETNGETGEIVWDKGRDFATVRKVLSMPQVNIVKKTEVQTGGFSKESILPKRNSDKLIARKKDWDPKKYGGFDSPTVAYSVLVVAKVEKGKSKKLKSVKELLGITIMERSSFEKNPIDFLEAKGYKEVKKDLIIKLPKYSLFELENGRKRMLASAGELQKGNELALPSKYVNFLYLASHYEKLKGSPEDNEQKQLFVEQHKHYLDEIIEQISEFSKRVILADANLDKVLSAYNKHRDKPIREQAENIIHLFTLTNLGAPAAFKYFDTTIDRKRYTSTKEVLDATLIHQSITGLYETRIDLSQLGGDGGGGGEAAAKGGGRDIMKDIKVRLMTDSPDDSQDLMIGAIESNLFADQISWKSDQPVWLNQWPLKQEKLQALQQLVTEQLQLGHLEESNSPWNTPVFVIKKKSGKWRLLQDLRAVNATMHDMGALQPGLPSPVAVPKGWEIIIIDLQDCFFNIKLHPEDCKRFAFSVPSPNFKRPYQRFQWKVLPQGMKNSPTLCQKFVDKAILTVRDKYQDSYIVHYMDDILLAHPSRSIVDEILTSMIQALNKHGLVVSTEKIQKYDNLKYLGTHIQGDSVSYQKLQIRTDKLRTLNDFQKLLGNINWIRPFLKLTTGELKPLFEILNGDSNPISTRKLTPEACKALQLMNERLSTARVKRLDLSQPWSLCILKTEYTPTACLWQDGVVEWIHLPHISPKVITPYDIFCTQLIIKGRHRSKELFSKDPDYIVVPYTKVQFDLLLQEKEDWPISLLGFLGEVHFHLPKDPLLTFTLQTAIIFPHMTSTTPLEKGIVIFTDGSANGRSVTYIQGREPIIKENTQNTAQQAEIVAVITAFEEVSQPFNLYTDSKYVTGLFPEIETATLSPRTKIYTELKHLQRLIHKRQEKFYIGHIRGHTGLPGPLAQGNAYADSLTRILTAGKRTADGSEFEKRTADGSEFESPKKKAKVE

SEQ ID NO: 3209 - protein, 2022 aa, synthetic construct
MPAAKRVKLDGGDKKYSIGLDIGTNSVGWAVITDEYKVPSKKFKVLGNTDRHSIKKNLIGALLFDSGETAEATRLKRTARRRYTRRKNRICYLQEIFSNEMAKVDDSFFHRLEESFLVEEDKKHERHPIFGNIVDEVAYHEKYPTIYHLRKKLVDSTDKADLRLIYLALAHMIKFRGHFLIEGDLNPDNSDVDKLFIQLVQTYNQLFEENPINASGVDAKAILSARLSKSRRLENLIAQLPGEKKNGLFGNLIALSLGLTPNFKSNFDLAEDAKLQLSKDTYDDDLDNLLAQIGDQYADLFLAAKNLSDAILLSDILRVNTEITKAPLSASMIKRYDEHHQDLTLLKALVRQQLPEKYKEIFFDQSKNGYAGYIDGGASQEEFYKFIKPILEKMDGTEELLVKLNREDLLRKQRTFDNGSIPHQIHLGELHAILRRQEDFYPFLKDNREKIEKILTFRIPYYVGPLARGNSRFAWMTRKSEETITPWNFEEVVDKGASAQSFIERMTNFDKNLPNEKVLPKHSLLYEYFTVYNELTKVKYVTEGMRKPAFLSGEQKKAIVDLLFKTNRKVTVKQLKEDYFKKIECFDSVEISGVEDRFNASLGTYHDLLKIIKDKDFLDNEENEDILEDIVLTLTLFEDREMIEERLKTYAHLFDDKVMKQLKRRRYTGWGRLSRKLINGIRDKQSGKTILDFLKSDGFANRNFMQLIHDDSLTFKEDIQKAQVSGQGDSLHEHIANLAGSPAIKKGILQTVKVVDELVKVMGRHKPENIVIEMARENQTTQKGQKNSRERMKRIEEGIKELGSQILKEHPVENTQLQNEKLYLYYLQNGRDMYVDQELDINRLSDYDVDHIVPQSFLKDDSIDNKVLTRSDKARGKSDNVPSEEVVKKMKNYWRQLLNAKLITQRKFDNLTKAERGGLSELDKAGFIKRQLVETRQITKHVAQILDSRMNTKYDENDKLIREVKVITLKSKLVSDFRKDFQFYKVREINNYHHAHDAYLNAVVGTALIKKYPKLESEFVYGDYKVYDVRKMIAKSEQEIGKATAKYFFYSNIMNFFKTEITLANGEIRKRPLIETNGETGEIVWDKGRDFATVRKVLSMPQVNIVKKTEVQTGGFSKESILPKRNSDKLIARKKDWDPKKYGGFDSPTVAYSVLVVAKVEKGKSKKLKSVKELLGITIMERSSFEKNPIDFLEAKGYKEVKKDLIIKLPKYSLFELENGRKRMLASAGELQKGNELALPSKYVNFLYLASHYEKLKGSPEDNEQKQLFVEQHKHYLDEIIEQISEFSKRVILADANLDKVLSAYNKHRDKPIREQAENIIHLFTLTNLGAPAAFKYFDTTIDRKRYTSTKEVLDATLIHQSITGLYETRIDLSQLGGDGGPAPGGSGSSGGGRDIMKDIKVRLMTDSPDDSQDLMIGAIESNLFADQISWKSDQPVWLNQWPLKQEKLQALQQLVTEQLQLGHLEESNSPWNTPVFVIKKKSGKWRLLQDLRAVNATMHDMGALQPGLPSPVAVPKGWEIIIIDLQDCFFNIKLHPEDCKRFAFSVPSPNFKRPYQRFQWKVLPQGMKNSPTLCQKFVDKAILTVRDKYQDSYIVHYMDDILLAHPSRSIVDEILTSMIQALNKHGLVVSTEKIQKYDNLKYLGTHIQGDSVSYQKLQIRTDKLRTLNDFQKLLGNINWIRPFLKLTTGELKPLFEILNGDSNPISTRKLTPEACKALQLMNERLSTARVKRLDLSQPWSLCILKTEYTPTACLWQDGVVEWIHLPHISPKVITPYDIFCTQLIIKGRHRSKELFSKDPDYIVVPYTKVQFDLLLQEKEDWPISLLGFLGEVHFHLPKDPLLTFTLQTAIIFPHMTSTTPLEKGIVIFTDGSANGRSVTYIQGREPIIKENTQNTAQQAEIVAVITAFEEVSQPFNLYTDSKYVTGLFPEIETATLSPRTKIYTELKHLQRLIHKRQEKFYIGHIRGHTGLPGPLAQGNAYADSLTRILTAGKRTADGSEFEKRTADGSEFESPKKKAKVE

SEQ ID NO: 3210 - protein, 2016 aa, synthetic construct
MPAAKRVKLDGGDKKYSIGLDIGTNSVGWAVITDEYKVPSKKFKVLGNTDRHSIKKNLIGALLFDSGETAEATRLKRTARRRYTRRKNRICYLQEIFSNEMAKVDDSFFHRLEESFLVEEDKKHERHPIFGNIVDEVAYHEKYPTIYHLRKKLVDSTDKADLRLIYLALAHMIKFRGHFLIEGDLNPDNSDVDKLFIQLVQTYNQLFEENPINASGVDAKAILSARLSKSRRLENLIAQLPGEKKNGLFGNLIALSLGLTPNFKSNFDLAEDAKLQLSKDTYDDDLDNLLAQIGDQYADLFLAAKNLSDAILLSDILRVNTEITKAPLSASMIKRYDEHHQDLTLLKALVRQQLPEKYKEIFFDQSKNGYAGYIDGGASQEEFYKFIKPILEKMDGTEELLVKLNREDLLRKQRTFDNGSIPHQIHLGELHAILRRQEDFYPFLKDNREKIEKILTFRIPYYVGPLARGNSRFAWMTRKSEETITPWNFEEVVDKGASAQSFIERMTNFDKNLPNEKVLPKHSLLYEYFTVYNELTKVKYVTEGMRKPAFLSGEQKKAIVDLLFKTNRKVTVKQLKEDYFKKIECFDSVEISGVEDRFNASLGTYHDLLKIIKDKDFLDNEENEDILEDIVLTLTLFEDREMIEERLKTYAHLFDDKVMKQLKRRRYTGWGRLSRKLINGIRDKQSGKTILDFLKSDGFANRNFMQLIHDDSLTFKEDIQKAQVSGQGDSLHEHIANLAGSPAIKKGILQTVKVVDELVKVMGRHKPENIVIEMARENQTTQKGQKNSRERMKRIEEGIKELGSQILKEHPVENTQLQNEKLYLYYLQNGRDMYVDQELDINRLSDYDVDHIVPQSFLKDDSIDNKVLTRSDKARGKSDNVPSEEVVKKMKNYWRQLLNAKLITQRKFDNLTKAERGGLSELDKAGFIKRQLVETRQITKHVAQILDSRMNTKYDENDKLIREVKVITLKSKLVSDFRKDFQFYKVREINNYHHAHDAYLNAVVGTALIKKYPKLESEFVYGDYKVYDVRKMIAKSEQEIGKATAKYFFYSNIMNFFKTEITLANGEIRKRPLIETNGETGEIVWDKGRDFATVRKVLSMPQVNIVKKTEVQTGGFSKESILPKRNSDKLIARKKDWDPKKYGGFDSPTVAYSVLVVAKVEKGKSKKLKSVKELLGITIMERSSFEKNPIDFLEAKGYKEVKKDLIIKLPKYSLFELENGRKRMLASAGELQKGNELALPSKYVNFLYLASHYEKLKGSPEDNEQKQLFVEQHKHYLDEIIEQISEFSKRVILADANLDKVLSAYNKHRDKPIREQAENIIHLFTLTNLGAPAAFKYFDTTIDRKRYTSTKEVLDATLIHQSITGLYETRIDLSQLGGDGGGGGGGGRDIMKDIKVRLMTDSPDDSQDLMIGAIESNLFADQISWKSDQPVWLNQWPLKQEKLQALQQLVTEQLQLGHLEESNSPWNTPVFVIKKKSGKWRLLQDLRAVNATMHDMGALQPGLPSPVAVPKGWEIIIIDLQDCFFNIKLHPEDCKRFAFSVPSPNFKRPYQRFQWKVLPQGMKNSPTLCQKFVDKAILTVRDKYQDSYIVHYMDDILLAHPSRSIVDEILTSMIQALNKHGLVVSTEKIQKYDNLKYLGTHIQGDSVSYQKLQIRTDKLRTLNDFQKLLGNINWIRPFLKLTTGELKPLFEILNGDSNPISTRKLTPEACKALQLMNERLSTARVKRLDLSQPWSLCILKTEYTPTACLWQDGVVEWIHLPHISPKVITPYDIFCTQLIIKGRHRSKELFSKDPDYIVVPYTKVQFDLLLQEKEDWPISLLGFLGEVHFHLPKDPLLTFTLQTAIIFPHMTSTTPLEKGIVIFTDGSANGRSVTYIQGREPIIKENTQNTAQQAEIVAVITAFEEVSQPFNLYTDSKYVTGLFPEIETATLSPRTKIYTELKHLQRLIHKRQEKFYIGHIRGHTGLPGPLAQGNAYADSLTRILTAGKRTADGSEFEKRTADGSEFESPKKKAKVE

SEQ ID NO: 3211 - protein, 2019 aa, synthetic construct
MPAAKRVKLDGGDKKYSIGLDIGTNSVGWAVITDEYKVPSKKFKVLGNTDRHSIKKNLIGALLFDSGETAEATRLKRTARRRYTRRKNRICYLQEIFSNEMAKVDDSFFHRLEESFLVEEDKKHERHPIFGNIVDEVAYHEKYPTIYHLRKKLVDSTDKADLRLIYLALAHMIKFRGHFLIEGDLNPDNSDVDKLFIQLVQTYNQLFEENPINASGVDAKAILSARLSKSRRLENLIAQLPGEKKNGLFGNLIALSLGLTPNFKSNFDLAEDAKLQLSKDTYDDDLDNLLAQIGDQYADLFLAAKNLSDAILLSDILRVNTEITKAPLSASMIKRYDEHHQDLTLLKALVRQQLPEKYKEIFFDQSKNGYAGYIDGGASQEEFYKFIKPILEKMDGTEELLVKLNREDLLRKQRTFDNGSIPHQIHLGELHAILRRQEDFYPFLKDNREKIEKILTFRIPYYVGPLARGNSRFAWMTRKSEETITPWNFEEVVDKGASAQSFIERMTNFDKNLPNEKVLPKHSLLYEYFTVYNELTKVKYVTEGMRKPAFLSGEQKKAIVDLLFKTNRKVTVKQLKEDYFKKIECFDSVEISGVEDRFNASLGTYHDLLKIIKDKDFLDNEENEDILEDIVLTLTLFEDREMIEERLKTYAHLFDDKVMKQLKRRRYTGWGRLSRKLINGIRDKQSGKTILDFLKSDGFANRNFMQLIHDDSLTFKEDIQKAQVSGQGDSLHEHIANLAGSPAIKKGILQTVKVVDELVKVMGRHKPENIVIEMARENQTTQKGQKNSRERMKRIEEGIKELGSQILKEHPVENTQLQNEKLYLYYLQNGRDMYVDQELDINRLSDYDVDHIVPQSFLKDDSIDNKVLTRSDKARGKSDNVPSEEVVKKMKNYWRQLLNAKLITQRKFDNLTKAERGGLSELDKAGFIKRQLVETRQITKHVAQILDSRMNTKYDENDKLIREVKVITLKSKLVSDFRKDFQFYKVREINNYHHAHDAYLNAVVGTALIKKYPKLESEFVYGDYKVYDVRKMIAKSEQEIGKATAKYFFYSNIMNFFKTEITLANGEIRKRPLIETNGETGEIVWDKGRDFATVRKVLSMPQVNIVKKTEVQTGGFSKESILPKRNSDKLIARKKDWDPKKYGGFDSPTVAYSVLVVAKVEKGKSKKLKSVKELLGITIMERSSFEKNPIDFLEAKGYKEVKKDLIIKLPKYSLFELENGRKRMLASAGELQKGNELALPSKYVNFLYLASHYEKLKGSPEDNEQKQLFVEQHKHYLDEIIEQISEFSKRVILADANLDKVLSAYNKHRDKPIREQAENIIHLFTLTNLGAPAAFKYFDTTIDRKRYTSTKEVLDATLIHQSITGLYETRIDLSQLGGDGGGSSGGGGGGRDIMKDIKVRLMTDSPDDSQDLMIGAIESNLFADQISWKSDQPVWLNQWPLKQEKLQALQQLVTEQLQLGHLEESNSPWNTPVFVIKKKSGKWRLLQDLRAVNATMHDMGALQPGLPSPVAVPKGWEIIIIDLQDCFFNIKLHPEDCKRFAFSVPSPNFKRPYQRFQWKVLPQGMKNSPTLCQKFVDKAILTVRDKYQDSYIVHYMDDILLAHPSRSIVDEILTSMIQALNKHGLVVSTEKIQKYDNLKYLGTHIQGDSVSYQKLQIRTDKLRTLNDFQKLLGNINWIRPFLKLTTGELKPLFEILNGDSNPISTRKLTPEACKALQLMNERLSTARVKRLDLSQPWSLCILKTEYTPTACLWQDGVVEWIHLPHISPKVITPYDIFCTQLIIKGRHRSKELFSKDPDYIVVPYTKVQFDLLLQEKEDWPISLLGFLGEVHFHLPKDPLLTFTLQTAIIFPHMTSTTPLEKGIVIFTDGSANGRSVTYIQGREPIIKENTQNTAQQAEIVAVITAFEEVSQPFNLYTDSKYVTGLFPEIETATLSPRTKIYTELKHLQRLIHKRQEKFYIGHIRGHTGLPGPLAQGNAYADSLTRILTAGKRTADGSEFEKRTADGSEFESPKKKAKVE

SEQ ID NO: 3212 - protein, 2020 aa, synthetic construct
MPAAKRVKLDGGDKKYSIGLDIGTNSVGWAVITDEYKVPSKKFKVLGNTDRHSIKKNLIGALLFDSGETAEATRLKRTARRRYTRRKNRICYLQEIFSNEMAKVDDSFFHRLEESFLVEEDKKHERHPIFGNIVDEVAYHEKYPTIYHLRKKLVDSTDKADLRLIYLALAHMIKFRGHFLIEGDLNPDNSDVDKLFIQLVQTYNQLFEENPINASGVDAKAILSARLSKSRRLENLIAQLPGEKKNGLFGNLIALSLGLTPNFKSNFDLAEDAKLQLSKDTYDDDLDNLLAQIGDQYADLFLAAKNLSDAILLSDILRVNTEITKAPLSASMIKRYDEHHQDLTLLKALVRQQLPEKYKEIFFDQSKNGYAGYIDGGASQEEFYKFIKPILEKMDGTEELLVKLNREDLLRKQRTFDNGSIPHQIHLGELHAILRRQEDFYPFLKDNREKIEKILTFRIPYYVGPLARGNSRFAWMTRKSEETITPWNFEEVVDKGASAQSFIERMTNFDKNLPNEKVLPKHSLLYEYFTVYNELTKVKYVTEGMRKPAFLSGEQKKAIVDLLFKTNRKVTVKQLKEDYFKKIECFDSVEISGVEDRFNASLGTYHDLLKIIKDKDFLDNEENEDILEDIVLTLTLFEDREMIEERLKTYAHLFDDKVMKQLKRRRYTGWGRLSRKLINGIRDKQSGKTILDFLKSDGFANRNFMQLIHDDSLTFKEDIQKAQVSGQGDSLHEHIANLAGSPAIKKGILQTVKVVDELVKVMGRHKPENIVIEMARENQTTQKGQKNSRERMKRIEEGIKELGSQILKEHPVENTQLQNEKLYLYYLQNGRDMYVDQELDINRLSDYDVDHIVPQSFLKDDSIDNKVLTRSDKARGKSDNVPSEEVVKKMKNYWRQLLNAKLITQRKFDNLTKAERGGLSELDKAGFIKRQLVETRQITKHVAQILDSRMNTKYDENDKLIREVKVITLKSKLVSDFRKDFQFYKVREINNYHHAHDAYLNAVVGTALIKKYPKLESEFVYGDYKVYDVRKMIAKSEQEIGKATAKYFFYSNIMNFFKTEITLANGEIRKRPLIETNGETGEIVWDKGRDFATVRKVLSMPQVNIVKKTEVQTGGFSKESILPKRNSDKLIARKKDWDPKKYGGFDSPTVAYSVLVVAKVEKGKSKKLKSVKELLGITIMERSSFEKNPIDFLEAKGYKEVKKDLIIKLPKYSLFELENGRKRMLASAGELQKGNELALPSKYVNFLYLASHYEKLKGSPEDNEQKQLFVEQHKHYLDEIIEQISEFSKRVILADANLDKVLSAYNKHRDKPIREQAENIIHLFTLTNLGAPAAFKYFDTTIDRKRYTSTKEVLDATLIHQSITGLYETRIDLSQLGGDGGGGGGGGGGGGRDIMKDIKVRLMTDSPDDSQDLMIGAIESNLFADQISWKSDQPVWLNQWPLKQEKLQALQQLVTEQLQLGHLEESNSPWNTPVFVIKKKSGKWRLLQDLRAVNATMHDMGALQPGLPSPVAVPKGWEIIIIDLQDCFFNIKLHPEDCKRFAFSVPSPNFKRPYQRFQWKVLPQGMKNSPTLCQKFVDKAILTVRDKYQDSYIVHYMDDILLAHPSRSIVDEILTSMIQALNKHGLVVSTEKIQKYDNLKYLGTHIQGDSVSYQKLQIRTDKLRTLNDFQKLLGNINWIRPFLKLTTGELKPLFEILNGDSNPISTRKLTPEACKALQLMNERLSTARVKRLDLSQPWSLCILKTEYTPTACLWQDGVVEWIHLPHISPKVITPYDIFCTQLIIKGRHRSKELFSKDPDYIVVPYTKVQFDLLLQEKEDWPISLLGFLGEVHFHLPKDPLLTFTLQTAIIFPHMTSTTPLEKGIVIFTDGSANGRSVTYIQGREPIIKENTQNTAQQAEIVAVITAFEEVSQPFNLYTDSKYVTGLFPEIETATLSPRTKIYTELKHLQRLIHKRQEKFYIGHIRGHTGLPGPLAQGNAYADSLTRILTAGKRTADGSEFEKRTADGSEFESPKKKAKVE

SEQ ID NO: 3213 - protein, 2024 aa, synthetic construct
MPAAKRVKLDGGDKKYSIGLDIGTNSVGWAVITDEYKVPSKKFKVLGNTDRHSIKKNLIGALLFDSGETAEATRLKRTARRRYTRRKNRICYLQEIFSNEMAKVDDSFFHRLEESFLVEEDKKHERHPIFGNIVDEVAYHEKYPTIYHLRKKLVDSTDKADLRLIYLALAHMIKFRGHFLIEGDLNPDNSDVDKLFIQLVQTYNQLFEENPINASGVDAKAILSARLSKSRRLENLIAQLPGEKKNGLFGNLIALSLGLTPNFKSNFDLAEDAKLQLSKDTYDDDLDNLLAQIGDQYADLFLAAKNLSDAILLSDILRVNTEITKAPLSASMIKRYDEHHQDLTLLKALVRQQLPEKYKEIFFDQSKNGYAGYIDGGASQEEFYKFIKPILEKMDGTEELLVKLNREDLLRKQRTFDNGSIPHQIHLGELHAILRRQEDFYPFLKDNREKIEKILTFRIPYYVGPLARGNSRFAWMTRKSEETITPWNFEEVVDKGASAQSFIERMTNFDKNLPNEKVLPKHSLLYEYFTVYNELTKVKYVTEGMRKPAFLSGEQKKAIVDLLFKTNRKVTVKQLKEDYFKKIECFDSVEISGVEDRFNASLGTYHDLLKIIKDKDFLDNEENEDILEDIVLTLTLFEDREMIEERLKTYAHLFDDKVMKQLKRRRYTGWGRLSRKLINGIRDKQSGKTILDFLKSDGFANRNFMQLIHDDSLTFKEDIQKAQVSGQGDSLHEHIANLAGSPAIKKGILQTVKVVDELVKVMGRHKPENIVIEMARENQTTQKGQKNSRERMKRIEEGIKELGSQILKEHPVENTQLQNEKLYLYYLQNGRDMYVDQELDINRLSDYDVDHIVPQSFLKDDSIDNKVLTRSDKARGKSDNVPSEEVVKKMKNYWRQLLNAKLITQRKFDNLTKAERGGLSELDKAGFIKRQLVETRQITKHVAQILDSRMNTKYDENDKLIREVKVITLKSKLVSDFRKDFQFYKVREINNYHHAHDAYLNAVVGTALIKKYPKLESEFVYGDYKVYDVRKMIAKSEQEIGKATAKYFFYSNIMNFFKTEITLANGEIRKRPLIETNGETGEIVWDKGRDFATVRKVLSMPQVNIVKKTEVQTGGFSKESILPKRNSDKLIARKKDWDPKKYGGFDSPTVAYSVLVVAKVEKGKSKKLKSVKELLGITIMERSSFEKNPIDFLEAKGYKEVKKDLIIKLPKYSLFELENGRKRMLASAGELQKGNELALPSKYVNFLYLASHYEKLKGSPEDNEQKQLFVEQHKHYLDEIIEQISEFSKRVILADANLDKVLSAYNKHRDKPIREQAENIIHLFTLTNLGAPAAFKYFDTTIDRKRYTSTKEVLDATLIHQSITGLYETRIDLSQLGGDGGGGGEAAAKPAPGGGRDIMKDIKVRLMTDSPDDSQDLMIGAIESNLFADQISWKSDQPVWLNQWPLKQEKLQALQQLVTEQLQLGHLEESNSPWNTPVFVIKKKSGKWRLLQDLRAVNATMHDMGALQPGLPSPVAVPKGWEIIIIDLQDCFFNIKLHPEDCKRFAFSVPSPNFKRPYQRFQWKVLPQGMKNSPTLCQKFVDKAILTVRDKYQDSYIVHYMDDILLAHPSRSIVDEILTSMIQALNKHGLVVSTEKIQKYDNLKYLGTHIQGDSVSYQKLQIRTDKLRTLNDFQKLLGNINWIRPFLKLTTGELKPLFEILNGDSNPISTRKLTPEACKALQLMNERLSTARVKRLDLSQPWSLCILKTEYTPTACLWQDGVVEWIHLPHISPKVITPYDIFCTQLIIKGRHRSKELFSKDPDYIVVPYTKVQFDLLLQEKEDWPISLLGFLGEVHFHLPKDPLLTFTLQTAIIFPHMTSTTPLEKGIVIFTDGSANGRSVTYIQGREPIIKENTQNTAQQAEIVAVITAFEEVSQPFNLYTDSKYVTGLFPEIETATLSPRTKIYTELKHLQRLIHKRQEKFYIGHIRGHTGLPGPLAQGNAYADSLTRILTAGKRTADGSEFEKRTADGSEFESPKKKAKVE

SEQ ID NO: 3214 - protein, 2024 aa, synthetic construct
MPAAKRVKLDGGDKKYSIGLDIGTNSVGWAVITDEYKVPSKKFKVLGNTDRHSIKKNLIGALLFDSGETAEATRLKRTARRRYTRRKNRICYLQEIFSNEMAKVDDSFFHRLEESFLVEEDKKHERHPIFGNIVDEVAYHEKYPTIYHLRKKLVDSTDKADLRLIYLALAHMIKFRGHFLIEGDLNPDNSDVDKLFIQLVQTYNQLFEENPINASGVDAKAILSARLSKSRRLENLIAQLPGEKKNGLFGNLIALSLGLTPNFKSNFDLAEDAKLQLSKDTYDDDLDNLLAQIGDQYADLFLAAKNLSDAILLSDILRVNTEITKAPLSASMIKRYDEHHQDLTLLKALVRQQLPEKYKEIFFDQSKNGYAGYIDGGASQEEFYKFIKPILEKMDGTEELLVKLNREDLLRKQRTFDNGSIPHQIHLGELHAILRRQEDFYPFLKDNREKIEKILTFRIPYYVGPLARGNSRFAWMTRKSEETITPWNFEEVVDKGASAQSFIERMTNFDKNLPNEKVLPKHSLLYEYFTVYNELTKVKYVTEGMRKPAFLSGEQKKAIVDLLFKTNRKVTVKQLKEDYFKKIECFDSVEISGVEDRFNASLGTYHDLLKIIKDKDFLDNEENEDILEDIVLTLTLFEDREMIEERLKTYAHLFDDKVMKQLKRRRYTGWGRLSRKLINGIRDKQSGKTILDFLKSDGFANRNFMQLIHDDSLTFKEDIQKAQVSGQGDSLHEHIANLAGSPAIKKGILQTVKVVDELVKVMGRHKPENIVIEMARENQTTQKGQKNSRERMKRIEEGIKELGSQILKEHPVENTQLQNEKLYLYYLQNGRDMYVDQELDINRLSDYDVDHIVPQSFLKDDSIDNKVLTRSDKARGKSDNVPSEEVVKKMKNYWRQLLNAKLITQRKFDNLTKAERGGLSELDKAGFIKRQLVETRQITKHVAQILDSRMNTKYDENDKLIREVKVITLKSKLVSDFRKDFQFYKVREINNYHHAHDAYLNAVVGTALIKKYPKLESEFVYGDYKVYDVRKMIAKSEQEIGKATAKYFFYSNIMNFFKTEITLANGEIRKRPLIETNGETGEIVWDKGRDFATVRKVLSMPQVNIVKKTEVQTGGFSKESILPKRNSDKLIARKKDWDPKKYGGFDSPTVAYSVLVVAKVEKGKSKKLKSVKELLGITIMERSSFEKNPIDFLEAKGYKEVKKDLIIKLPKYSLFELENGRKRMLASAGELQKGNELALPSKYVNFLYLASHYEKLKGSPEDNEQKQLFVEQHKHYLDEIIEQISEFSKRVILADANLDKVLSAYNKHRDKPIREQAENIIHLFTLTNLGAPAAFKYFDTTIDRKRYTSTKEVLDATLIHQSITGLYETRIDLSQLGGDGGGGGEAAAKGGSGGGRDIMKDIKVRLMTDSPDDSQDLMIGAIESNLFADQISWKSDQPVWLNQWPLKQEKLQALQQLVTEQLQLGHLEESNSPWNTPVFVIKKKSGKWRLLQDLRAVNATMHDMGALQPGLPSPVAVPKGWEIIIIDLQDCFFNIKLHPEDCKRFAFSVPSPNFKRPYQRFQWKVLPQGMKNSPTLCQKFVDKAILTVRDKYQDSYIVHYMDDILLAHPSRSIVDEILTSMIQALNKHGLVVSTEKIQKYDNLKYLGTHIQGDSVSYQKLQIRTDKLRTLNDFQKLLGNINWIRPFLKLTTGELKPLFEILNGDSNPISTRKLTPEACKALQLMNERLSTARVKRLDLSQPWSLCILKTEYTPTACLWQDGVVEWIHLPHISPKVITPYDIFCTQLIIKGRHRSKELFSKDPDYIVVPYTKVQFDLLLQEKEDWPISLLGFLGEVHFHLPKDPLLTFTLQTAIIFPHMTSTTPLEKGIVIFTDGSANGRSVTYIQGREPIIKENTQNTAQQAEIVAVITAFEEVSQPFNLYTDSKYVTGLFPEIETATLSPRTKIYTELKHLQRLIHKRQEKFYIGHIRGHTGLPGPLAQGNAYADSLTRILTAGKRTADGSEFEKRTADGSEFESPKKKAKVE

SEQ ID NO: 3215 - protein, 2022 aa, synthetic construct
MPAAKRVKLDGGDKKYSIGLDIGTNSVGWAVITDEYKVPSKKFKVLGNTDRHSIKKNLIGALLFDSGETAEATRLKRTARRRYTRRKNRICYLQEIFSNEMAKVDDSFFHRLEESFLVEEDKKHERHPIFGNIVDEVAYHEKYPTIYHLRKKLVDSTDKADLRLIYLALAHMIKFRGHFLIEGDLNPDNSDVDKLFIQLVQTYNQLFEENPINASGVDAKAILSARLSKSRRLENLIAQLPGEKKNGLFGNLIALSLGLTPNFKSNFDLAEDAKLQLSKDTYDDDLDNLLAQIGDQYADLFLAAKNLSDAILLSDILRVNTEITKAPLSASMIKRYDEHHQDLTLLKALVRQQLPEKYKEIFFDQSKNGYAGYIDGGASQEEFYKFIKPILEKMDGTEELLVKLNREDLLRKQRTFDNGSIPHQIHLGELHAILRRQEDFYPFLKDNREKIEKILTFRIPYYVGPLARGNSRFAWMTRKSEETITPWNFEEVVDKGASAQSFIERMTNFDKNLPNEKVLPKHSLLYEYFTVYNELTKVKYVTEGMRKPAFLSGEQKKAIVDLLFKTNRKVTVKQLKEDYFKKIECFDSVEISGVEDRFNASLGTYHDLLKIIKDKDFLDNEENEDILEDIVLTLTLFEDREMIEERLKTYAHLFDDKVMKQLKRRRYTGWGRLSRKLINGIRDKQSGKTILDFLKSDGFANRNFMQLIHDDSLTFKEDIQKAQVSGQGDSLHEHIANLAGSPAIKKGILQTVKVVDELVKVMGRHKPENIVIEMARENQTTQKGQKNSRERMKRIEEGIKELGSQILKEHPVENTQLQNEKLYLYYLQNGRDMYVDQELDINRLSDYDVDHIVPQSFLKDDSIDNKVLTRSDKARGKSDNVPSEEVVKKMKNYWRQLLNAKLITQRKFDNLTKAERGGLSELDKAGFIKRQLVETRQITKHVAQILDSRMNTKYDENDKLIREVKVITLKSKLVSDFRKDFQFYKVREINNYHHAHDAYLNAVVGTALIKKYPKLESEFVYGDYKVYDVRKMIAKSEQEIGKATAKYFFYSNIMNFFKTEITLANGEIRKRPLIETNGETGEIVWDKGRDFATVRKVLSMPQVNIVKKTEVQTGGFSKESILPKRNSDKLIARKKDWDPKKYGGFDSPTVAYSVLVVAKVEKGKSKKLKSVKELLGITIMERSSFEKNPIDFLEAKGYKEVKKDLIIKLPKYSLFELENGRKRMLASAGELQKGNELALPSKYVNFLYLASHYEKLKGSPEDNEQKQLFVEQHKHYLDEIIEQISEFSKRVILADANLDKVLSAYNKHRDKPIREQAENIIHLFTLTNLGAPAAFKYFDTTIDRKRYTSTKEVLDATLIHQSITGLYETRIDLSQLGGDGGPAPGSSGGSGGGRDIMKDIKVRLMTDSPDDSQDLMIGAIESNLFADQISWKSDQPVWLNQWPLKQEKLQALQQLVTEQLQLGHLEESNSPWNTPVFVIKKKSGKWRLLQDLRAVNATMHDMGALQPGLPSPVAVPKGWEIIIIDLQDCFFNIKLHPEDCKRFAFSVPSPNFKRPYQRFQWKVLPQGMKNSPTLCQKFVDKAILTVRDKYQDSYIVHYMDDILLAHPSRSIVDEILTSMIQALNKHGLVVSTEKIQKYDNLKYLGTHIQGDSVSYQKLQIRTDKLRTLNDFQKLLGNINWIRPFLKLTTGELKPLFEILNGDSNPISTRKLTPEACKALQLMNERLSTARVKRLDLSQPWSLCILKTEYTPTACLWQDGVVEWIHLPHISPKVITPYDIFCTQLIIKGRHRSKELFSKDPDYIVVPYTKVQFDLLLQEKEDWPISLLGFLGEVHFHLPKDPLLTFTLQTAIIFPHMTSTTPLEKGIVIFTDGSANGRSVTYIQGREPIIKENTQNTAQQAEIVAVITAFEEVSQPFNLYTDSKYVTGLFPEIETATLSPRTKIYTELKHLQRLIHKRQEKFYIGHIRGHTGLPGPLAQGNAYADSLTRILTAGKRTADGSEFEKRTADGSEFESPKKKAKVE

SEQ ID NO: 3216 - protein, 2043 aa, synthetic construct
MPAAKRVKLDGGDKKYSIGLDIGTNSVGWAVITDEYKVPSKKFKVLGNTDRHSIKKNLIGALLFDSGETAEATRLKRTARRRYTRRKNRICYLQEIFSNEMAKVDDSFFHRLEESFLVEEDKKHERHPIFGNIVDEVAYHEKYPTIYHLRKKLVDSTDKADLRLIYLALAHMIKFRGHFLIEGDLNPDNSDVDKLFIQLVQTYNQLFEENPINASGVDAKAILSARLSKSRRLENLIAQLPGEKKNGLFGNLIALSLGLTPNFKSNFDLAEDAKLQLSKDTYDDDLDNLLAQIGDQYADLFLAAKNLSDAILLSDILRVNTEITKAPLSASMIKRYDEHHQDLTLLKALVRQQLPEKYKEIFFDQSKNGYAGYIDGGASQEEFYKFIKPILEKMDGTEELLVKLNREDLLRKQRTFDNGSIPHQIHLGELHAILRRQEDFYPFLKDNREKIEKILTFRIPYYVGPLARGNSRFAWMTRKSEETITPWNFEEVVDKGASAQSFIERMTNFDKNLPNEKVLPKHSLLYEYFTVYNELTKVKYVTEGMRKPAFLSGEQKKAIVDLLFKTNRKVTVKQLKEDYFKKIECFDSVEISGVEDRFNASLGTYHDLLKIIKDKDFLDNEENEDILEDIVLTLTLFEDREMIEERLKTYAHLFDDKVMKQLKRRRYTGWGRLSRKLINGIRDKQSGKTILDFLKSDGFANRNFMQLIHDDSLTFKEDIQKAQVSGQGDSLHEHIANLAGSPAIKKGILQTVKVVDELVKVMGRHKPENIVIEMARENQTTQKGQKNSRERMKRIEEGIKELGSQILKEHPVENTQLQNEKLYLYYLQNGRDMYVDQELDINRLSDYDVDHIVPQSFLKDDSIDNKVLTRSDKARGKSDNVPSEEVVKKMKNYWRQLLNAKLITQRKFDNLTKAERGGLSELDKAGFIKRQLVETRQITKHVAQILDSRMNTKYDENDKLIREVKVITLKSKLVSDFRKDFQFYKVREINNYHHAHDAYLNAVVGTALIKKYPKLESEFVYGDYKVYDVRKMIAKSEQEIGKATAKYFFYSNIMNFFKTEITLANGEIRKRPLIETNGETGEIVWDKGRDFATVRKVLSMPQVNIVKKTEVQTGGFSKESILPKRNSDKLIARKKDWDPKKYGGFDSPTVAYSVLVVAKVEKGKSKKLKSVKELLGITIMERSSFEKNPIDFLEAKGYKEVKKDLIIKLPKYSLFELENGRKRMLASAGELQKGNELALPSKYVNFLYLASHYEKLKGSPEDNEQKQLFVEQHKHYLDEIIEQISEFSKRVILADANLDKVLSAYNKHRDKPIREQAENIIHLFTLTNLGAPAAFKYFDTTIDRKRYTSTKEVLDATLIHQSITGLYETRIDLSQLGGDGGGGGGSGGGGSGGGGSGGGGSGGGGSGGGGSGGGRDIMKDIKVRLMTDSPDDSQDLMIGAIESNLFADQISWKSDQPVWLNQWPLKQEKLQALQQLVTEQLQLGHLEESNSPWNTPVFVIKKKSGKWRLLQDLRAVNATMHDMGALQPGLPSPVAVPKGWEIIIIDLQDCFFNIKLHPEDCKRFAFSVPSPNFKRPYQRFQWKVLPQGMKNSPTLCQKFVDKAILTVRDKYQDSYIVHYMDDILLAHPSRSIVDEILTSMIQALNKHGLVVSTEKIQKYDNLKYLGTHIQGDSVSYQKLQIRTDKLRTLNDFQKLLGNINWIRPFLKLTTGELKPLFEILNGDSNPISTRKLTPEACKALQLMNERLSTARVKRLDLSQPWSLCILKTEYTPTACLWQDGVVEWIHLPHISPKVITPYDIFCTQLIIKGRHRSKELFSKDPDYIVVPYTKVQFDLLLQEKEDWPISLLGFLGEVHFHLPKDPLLTFTLQTAIIFPHMTSTTPLEKGIVIFTDGSANGRSVTYIQGREPIIKENTQNTAQQAEIVAVITAFEEVSQPFNLYTDSKYVTGLFPEIETATLSPRTKIYTELKHLQRLIHKRQEKFYIGHIRGHTGLPGPLAQGNAYADSLTRILTAGKRTADGSEFEKRTADGSEFESPKKKAKVE
